United States Patent Application Publication US 2007/0048818 A1 - sequence listing, part 8

SEQ ID NO: 11081 - DNA, 16936 bp, Homo sapiens
acggtttctcccctgccctaggtccgaggctctttgccactggtccttgcaggcccggggaaagtgagccagacatttgcttctcctcgggtgtctcagctgctgacctgtccctctgccattctgtgtttgcagtgggaagtcgccagaagggagagcactcggtgagggcagccggcaaagagaagtgcgtctacttcttctggcaaggccggcactccaccgtgagtgagaagggcacgtcggcgctgatgacggtggagctggacgaggaaaggggggcccaggtgagtcctggggagctctgcaccccggggactgagaggagcatcctctcctgggagccgatggcactcggcctggtccctcccaacatgattctgataatggaagaccacgtcacccaaagcacttcagtcctggtctggcttctgcaggtctcaggctgtgcctcccatttctttcctcctcccactttttgtaagatgatcctggagaaaatgttgtatctgcaaataggaaatccacatgacaagtgcagatggccaatgggtggctttgaaaggtttccacctaaccaatcaaggcactgtaagtaaaacaaagagatgccatcatccacttctcacagtggtagtgattttttaaagaatggatccagggccagctggcaaggcctcggtaggatgaggatgctatgttttgggtgagaagtgtaacttgaacagccatcctgaaattttgtcacgagaaccttaaaactttgatcacttgttccatgtacacgaatctacatgaaggaagtatcaggtgaatgtaaggattgggaacgcccatcacctgtattcgtggcagcctgagtggttttctggaacaggtcagattgggtcactcccttactgtctgccacacacactgcagtctaagcggcttcccagggctccagcaccttcgtgatgggccctgggcacctctccaagctccccctgctcctcccctccacccaggccactccagcctctccctgttccacggccacctccttccactcacctcctgccctgtgacccattccactgtctggaaacttcccctgcctactccatactgcctctacgtatgtacccctgtgtacagcctcttatgaggcaggtttctgttgaaatgttacccgcaccactgccccccgcacccattctatccagagccttctcattctcccatccttctcagtccctgcactttatccctttattttcacagcacttcccaccacctaaagctacatgatcccccaggagcatgacagagaccctgagaccctggccttacaaccccatggccttatcatcccagggcctgcatcgtgcctgggagggactgctgcccagatccaaggccacctaaagctactggcctcacaaccccatggccttataaccccagggcctgcatcatgcttggcagggactgctgcccagatccaaggcttgcaaacctgtctctttaacattcagatgagctctgcctgagtctcctctgctctgtagagtaccagcaattaagagttaacttgctgagtagcagcaattaagaattaactctgggattctttgaaaacaggacaatgccatgtgcaaatctctttattctcctggatgaatgattaacgatagcaggagggaagacagcagagacattcttgccagaaatagatccacactcacccagccttccacagttccaagaaccaatcacatttcctaaaacaatattttctactatggactatattttagaaatggtactggcaagagttgcattttaatttattcctaatagccatttcaactacccctttatttttttgtaaaggccatgaatgaatatgcttttatcatgccttcaaaatcatcctcagagttttgagtcttaatctctctcatttgagcattttacctgttaccaatccagtggatggaaaatcattttatttttatttgtatcatttttttgagacaggggtctcactctgtcacccaggctggagtgcagtggcactatcaccactcactgcagccttgacctcccaggctcaatcagtcctccttcctcagcctcctgggtagctgggacttcaggcatgcaccactacaggcatgagccatggtccagctctggaaaatcattttagatatgaaatactgccacaaaatggcaattggttatgcaaaatgggcacagagattgataactcacagtgagaaatgctttctctcagtgctccctgactaccagctccaggaaacatttcctctttaaggaaaggtgtcctagagggaggtgactcaaacctaacattattcgtggtgcagataacacctgaaggaagagccttctctaacaggccaggaagaggctgagtggactgctggggtggccacaaaccatatattttccctagaattattaccaagtcagtgatgagtcattctcattgctgagagctatcttgttaagaatgtatttatatcagtcttgtgacatcaataaccacagaataccattaaaatatcaggagttatgttttaaaagaatattccttgacagaacaacattaagtaaagaaaatgaggctgtacatcaatataaagcaaggctcctattttgtttaggaaaagaagaccctccctgagtaacaccctgagaggaggctgcacacggcagcgttcgcagagcttctctttaggtggtagtgttagcaatggcttttgtttgtacgtcttggtatttttcagattttctgcaagaggcatgtattgtttttaggactttgaaagccccgcgccccttacctatttacctctgtttaaatcggaaggtccaggttctccagggaaaggagcccccctgtttcctgcagtgtttccagggggggatggtggtgcactcggggaggcgggaagaggaagaagaaaatgtgcaaagtaagtcacttttactgctggaattcgactttgcctttccctctcttggaaagaatttttataagctgggggctgaaagtgagtctgtcttcatctagctgtggctcgacctctgaaagcctcctgatgtttgcctgataactcagctctatgggtgctcatgacccgcctctccctggagaatttactcggggattcacctttgcacgcaggaggctggaaggtggtctcccctcctctgtctgctgtttttaggaagaaagaaaaatcagtggctcttctatgataaattatgaaattttgtgttgaccagcaccccaccccccaaaaaaatcttagctctagagccttttaaaatatgcctgttatagaacttgttgtataaatcttgggaaaatggcttttctacattgtggacttcagatcacctgcttctaactatgtaagaacccactttttaggctggcaggaaggcctgatgcctcagtgctccacagggctccctgtgcagtgcctcagcccctccagtcccctaagtccctggccctggacggaggtggctgccttggacgacacagcggacactaggaagggccgcgtttgctgccactcgctcacgtgctaactcctccgcgccgccggtgccccctgcaggtgagtggcggctgtactgcgtgcgtggagaggtgcccgtggaagggaatttgctggaagtggcctgtcactgtagcagcctgaggtccagaacttccatggtggtgcttaacgtcaacaaggccctcatctacctgtggcacggatgcaaagcccaggcccacacgaaggaggtcggaaggaccgctgcgaacaagatcaaggaacagtgagtgttgtgtctgcggcgagtccccccacacaccgggcttcccagagggacggggcaggctcaggggtaccaagactcccagcagatcccagggtgctgaaagtgactgcagcaaaggatggctgggaacgtggtcaggggcctctgacattccgagcagagaggacacacatctcagtccagacctccgacttgggggccgctctgaggatttatctggctgggtgagaggctggtgaggagccagggagtgactcttggaagcactctgggttctttcttcatagttgccgttcagcttttggatgagaagcctgggggcctttgatatttaaagggagcacatttcaaatttgtggagttttcgtttgccagaacagcagagtgttaaaaagctaaagaagagtgtgggaaaccgccatctgtgtcagacgataagatatcccccattctggagagcagcccccgatggagagggatcggactctccgggcacttcccgggtacagcacttccgggttgggttttgttcccctcccaggcaggcacctgccgttggccacttgcaaagactcagcacactgtgagatagcactgagtggggaccttggggaagaggggaaccggaagggcagtgaaggccacagcccagggaggacgctgtggtggccggcccccccggtaaggtggtctgcctctgtggctctgcacttcctagcagcccaggcaaaataagcattgcaagctgccagagaagcccagtgtcgcccaggcattcaggaggcaactgagacctgtgaggacctcagtgaggaaaagtgaagagcttcctagggtcacatgtccccagagtttgatttggtgaaccccattctctgggttctggaacagagcagtggccagggcccctgtgtccactctgaaaacacactacccagagagggcagagaggagaacggggcaggtgacctctctacagggaggcagatgtgaaacaagatgtttcatctcaaaacaccacctgtgggctagggcacggggaggggtgagaaatcacatgccctgaggtggcccaaggcatttgaggcccatcagagggtttacttggaccactgaggaaaagaaaaacaatgaagagctcattcacatattcactcaacaaacatttattgagtacctgattggcgccaagcaatctggaattacaggacttatcctataaatctcggaaaaaatggtttttctgcatcatgaactttgggcaacctgcttctaactccaaaggactggagttaggaactggggacttggtggtgaataagcccaagtctctgtcctcatgaagttcatgttctagcaggagagaaagacaagaaatagtcaatatgtattgttctgtataaaaatgtgtgtaattttcatgacacattagatgtgattaaacatccctccctaggagcaagtcaacttcccctcctccaccacacacacttagagactgcagagcatttttccattcatgagtaagaattgcttttccttagaaagtagaagagacggtgaactgatctccagatttagttttgaataatttatggctgtaccccatatatatatgtacatgtatatatatatgtatatatatatacacctactattagtatatacccacaaattttaaatttaaaaaaagcagacaataacaagtattggcaaggatgtgaaaattggaacccttacacattacttggaaaacagtctagcaatttctcaaaagatttaacaatacagttaccatatgactagcaactctactagatatctacccaagagaaatgaaaacacttgtacatgaaggttcatagccatattagtcatagtggccaaaagatggaaataacccaaatatctaccaacatattaatggatgaaaaaaattagtggaatattattctgccataaaaaagaattcagtattgatacatgctacaacatggatgcaccttaaaaacattacactaagtttaaaaactcagtcacaaaggaacatatattatataattccatctgtatgaaatgtccaaaacaggcaagtccataaatacaggagtagattagtggattctgaggactaaggatgggggaaatgcggagtgactgctaacgggtacagggcttcttcttccgggagatgaaaatgttctgaaattagtgatgacagttgcacaactctgtgaataaactgaaatctgtacacataaaaagagtgaattttatgacatgtgaattatatctcaataaagctattataaagctgttatcataatagtaataataattttgggtcaccagcactctccagacttataaagaactcttggagtttctcccttgcagatgtcccctggaagcaggactgcatagtagcagcaaagtcacaatacacgagtgtgatgaaggctccgagccactcggattctgggatgccttaggaaggagagacaggaaagcctacgattgcatgcttcaaggtaatgtggcatccacagtctgcgatctggtttttttgtttgtttttggaaacaagagtcttgctctgttatccaggctggagtatagtggtatgatcacagctcactgcagcttcaacctcctgggctcaagtgatcagcctgcctcagcctctcaaagtgcaggcttgagccactgtgccccattcatgttttatcttaattcttcagtgtgtcttaaatctagtgtgatgagtattatgtccagctgattgaacagtttttttcttcccaggggtgagtttaacttggacaccaggacttcaaattctcactggcaaatcagctcccaaggcctcccggggaccaagccaccttccagggtcttagggactcagggcaccattttctttctttcctcatagctgccacctgagaaatagcagtcctctgggtgttggagtgcgatctggggaaggaagccggcctcttatcccctttccagagcccttcagtcattaacctatttggaaatacaaagatcgtgtctgtatagaacaggcactcccattcaccagagtgaggttaggtgtgtatatgtgtactttcccagctgttctaaaaatacagatgaacattagaaggaaagcgaacttttgttaagcagttccagtaagccagacaccagccagcaccttacatatagtaactccgttagtacaacccaacactctgccatttttacagatgaggaaactgaggcatacagaagttaatcaacttgcccaaggctgggcagcaatggagtatcctcataactgctccataatactctgcccctcaatgtttataaacttttatatagctttttaaacataatgcctagaaaacgtttgaaattatggagaagttaaaaaaagaaatgaagtcacttataaccacatttctcagaacagaattcacatttctctatgctatatataatatctattttaaaaaataatatgtggatctactgttttgtaaccttttttcctttataatgaataatttcccaagttattaaaatttagatttctaatggctgtgagatattctgttatactgtgaatatatgccactctctacctgacagtctctgacagctggggagttgagttgtttcttatttctgatttttctcccttatacaataatgcagtttgaatactttttaaaataatcctatacattcattcctaattgagaggaattcctagatgtggaaccgctgtgcttgtcataaaatctgatagcatgtatcagctcgggccaagtttcattctcacctgcaatacacagaagcgttcatttctcagcacaatcataaattcagcatattattttttcctctttgccaaattgatgaaaggagacagatagctaagcattgttttgttttacttagaagtacatatagatgtatatttatatacatgtataatgtatataaaatacaatatatgtatatttatgttatataacatatatgcatatttatgttacatatgtgtatgtgatatacacatacatatatctgtgtatagatatgcatatatacacagtatctatatatattttttagccattttaatttctactttggtgagtgttctatttgtgtcttttgcacattttattgatatttattttttccttatgtatgtcccttcatgtattaaggatattaactagttgctgtattacaaatatttcccatttgttacttggtttttcttttctttttaattttgcattgtttttcatttttatataattaatgcattattttcccttttgattggttcttttactattgcacttgaaaaggctttctccaccttgaagctcagataaatcctacctgtgtttccacagtgctttgaattatttcatattttacattcattcttcatctggaatttactttgatgcacatgatatcttcagctttgttctcttttctttcaaagatcctggaagttttaacttcgcgccccgcctgttcatcctcagcagctcctctggggattttgcagccacagagtttgtgtaccctgcccgagccccctctgtggtcagttccatgcccttcctgcaggaagatctgtacagcgcgccccagccaggtaaggcctgcagggggcagctatgctgagcagtagaaggcacatcttccagaaagccttttgattttacgttggtatttattaagcagcttctgtttgccaagtacattcccagagcacccagaacatgtgcttacactcttttcatcctcacccctacaccaaaaggaaggagagtgaaatcagccacactttatagcataaggaacgagactcaagtcacttaacccacccaaagacgtcagctaagaacaggttgagcaccacagcggcaggcctggcgtctccgctcttttcccagccttcctctcagtcttgttgctgcatggtcacccgtcgactgccattgctccagccattatgtttgcattcaagatagaaagagaaagaaaggggaaggaaaaaagcccacctaatagccactctctctctttaatcagataaagcacgtgttttcccagaagcccccagcagacttctgcttacatcccattggccggagcctgtcacatggccagccccagctgcaagggagcctggggaagcaaatggcagaggagaaggatgttggggtattggctaagttagccagggaacagggtctgccataccaagtctccacagcagagccaagactccagcccaggtcttctgatcccaaggtcagggctctgtgccctcattctggttgggaaagtaacaagagactgggcttgacaacccctcccacccaccctccaatgaagccaaggtcagctgcctctcagtttgtgtttgttgcttctcacattacaagagcctggagctgcagccagggacctcatcttgcaccgggatctcagggcagcactgaaagtttgcccagtgcacatgtcatgcttggaaaatcagccaccagtaagagagggtgtgcccacgcccttcatcctggggctcagggcgggttatcaacctccactgggcttttaaagtgtggttttcacagaatcctgaaatgcatgtcaggaaaggacttacagtgagccgactagcaagagtgagaggcattttgccacctggagtaagagtcagactgacaatttgaggaggagaaaaaggtaggaggaaaaggcagtagaacagttttgatttttatttccttttattttattttttagagacagggtcttactctgtcatccaggctggagtgcagtggcgcagtcatggctcactgcagcctctaactcttgggctcaagcgatcctctctccttagcttcctgagtagtggagactacatgcatgcagcaccatgcctcgctaattttttttttctttttgtagagatagggtctcatcatgtggcccaggctggtcttcaacctccgggctcaagcagtccttcctcctcagcctcccaaagcactgggattacaggcatgagccaccactcccggtggcagttttgctttttaaggcccatttctctgtaagagagccatgagctcacctcactgctaagcaatcgcgtgcagggcaggaacgccactgacctgtctgcagtgagatgtgcgctccagtgttgattgtgctctttggagatatgcggtgctaacagccccttgagtggcacatgcattatcccttccactcttagcacagccctgccagtatccagaagggccagggccttgagctggggcaaagggaggaggacctggaggacgaggaatgaaaaagaccaactccttgacaccacttctctctgcctacaggcttctccccgttgaactgtcaaagggctggggtatcctgggtttctctgtttgcccctttgcccctggtttgatggccaagggggtttccccctgtgacactgcagtcaagagggacaacatccactaggttgggggaggagtgagctagaagtgtccgtgaaggagctcctgatggtctggccctgtccctgccctcacagcacttttccttgttgacaatcaccacgaggtgtacctctggcaaggctggtggcccatcgagaacaagatcactggttccgcccgcatccgctgggcctccgaccggaagagtgcgatggagactgtgctccagtactgcaaaggtgaggctccctctaacatgcctgcagcacggaacagatggggaagcccctcaggcatgcgcagccaggagacccccttccccttctgtgcatgtcagccagcatccatccataaagcctggcaggtggtgatgaaaccaattttttcccctttaactttttgagatgtattaagttttagattagcgcattctcagctgccagcatgaagaagaactagtttttctctctgatattatgaggctaacttgttaccctcaaggataaaggctgtattgtggaatgccccaggcagattaaaaccccgctgtactcggggttgatcatgctgagagacaagttggcctctgccctgtacattatctgcaagcactaccacgctgttggagaatggaggtctcccccaaacagtgaacggccattgccaacctttttattattcattattatttttagtattatatccaaagagaaatacccatagtaagttcatggttctttactatacacatgaaatttctagtcttttatataaaatgaaaatgccagtaattaatcttatttaatttttatggtttcattgacacaactagtttaatgtcactgagtatgtgcaatggattctcttcctgaaaaactctttagcaataaataacatatgaaaccttccactcaatgttatagtgaatgtggatgtataagatgctgtcgttcgccgtcagtcattatgggagttaatcctgtgctaggaaatgagacggatgactctacaggtgaattcaggaggaagaaaatgctccacccagaagctgcagacagagcctctctctcccttccaggaatacacagcgttttgttaggttcaagaagtatagactcaggttgattataggtcactatggtagtcacaggcatgaaactaacaaacatcttatataaacattatccatgtgttgttatgaactactggtaacttgcattttaagcatgaagtcatgagttctggcaaagaagaaaagatttcaagggaaatcagagaaagacagggtctccctggggtctactgacattgcaatctgtgtaactacaggaaaaaatctcaagaaaccagcccccaagtcttaccttatccacgctggtctggagcccctgacattcaccaatatgtttcccagctgggagcacagagaggacatcgctgagatcacagagatggtgagcacgctttcctgccctatgaaggtggctcctgcgccttttggattgtgggttaactttactttggggagagcatccaattgcactttcagagtgggaaaatatttttccttttgcaacatcttaacaaacctacatagaatttgcttaggaagaagagaagtctaatggaaaatcaattaactattttagtaattttctacacgatacccaaattttaaaaacttaaaagcaaaggtgagttgaatcatgttgaggactatatatgtacataaaagctgcgaactcttcattctgtttgctaagaacctgttgcttggcattgcttgtctctcagtgtccatgtgacgcacaaccaaaccctcatgtttcagatgttaaccttgtgtagaggagacacaaacgaaatctgatgaattagtatgttcagaaaactgaatgaatggaggtgctgcgactcccttatgataagggatcactcaacatctcattaatattgtcttttatgagaccacctggtatttctgcatgaggcatttatcataacttctatccaccaaaatatattataatctagaatgttttcttttccaaccacacaggaaagaattttattatagctatgttgaatttcttatatatgagctattaacattgctaggaatagcaaatccaaggatttgttttgatttggtgagagataggttttttaccattttgatttttttttaccatgtgagagctgctttgcttggggaaacgacccaagtgtattttataggaaattcgagtaattttaaacaaacagaatctacttctgcttagcaatggagagggcctgttgggtagtacagacatcactgctcaccctaacctgtctccctggagccaaatggacttgatgtacacagggaaggggctgacttcagcttggtgtctgccgcagccggaacgagatgtttctgttcactgcaactgtggtttcgtgaaaccagaaggctctagggattacgagctctatggctgctgcatgcagtctaagttcaggagttaccaaattgccaggggttcagtccagggcttattgctcactacacagaagaaagccaatcactgagacaagcatagccaaggaagaaagtttatttgggtgctacagccaaggggaacaggacataagtctcaaatctgtgtctctggcctactaaaattagggatttttatagcagggaagaaatgtaaccatgtgtgggaaacaggaattagggaggggtgaggaagaggagctggtcaacaggaagcggggggttggttaggcatcatggtgggtaaggggtctggtaagcttcaggttttgtttttgttttttgagacagggtcttgctctgttgcccaggctggagtgcagtggtgtaatcacagctcactgcagcctccagctccaggctcagacaatcctcccacatcagcctcccaggtagctgggactacaagcacacaccataatgcctggctaatttgttttgtattttcaatgaggttttgccatgtctctcagtctggtcttgaactcctgagctcaagccatctgcccacctcagcctctcaaagtgctgggattacaagcatgagccactgctggctttttgatactattggagatgcctgatggttggtttcctgagaaaggaactcagataagacaaatataactttctcgaatttcaagactaggagagttaatttcgacgtttattccaaagaaatcataaacatcagttctgtggcacagttgagccactttcagaaggatataactcaccatcctccctgtgtattcactatagatcttgggggttagcagcggggccatttactgttgtgcaggcctgtgggattccagccggagaagagtcaggcttcccacaccagcaagttatacaaataattaacattcagcaagtgcccactctgcactaggcacatctccaagcactttacactgattttctcatttatcacaacagtccatcaagatatcttattattattcccattttactggtgtgggagcagagacacaaaaacacgaagtcacttggccaaagtgactttcagtgagtggaggagtcagtactcagacgcaggcaagatcatccaaaattcgcctcttctttttttagagaaaggatcttgctttgtcacccaggctgcagtgtggtgactcaatcatggctcacacaaaccttgaacccctgggctcaaacgaccctaccacctcagccaccccaagtaggtaggactacaggtgcacacttccatgcctagcctatttttgtattctttatagagacagggtctcatcatattgcccaagctggtctccaactcctggattcaaggactcttcccacctcagcctcctacagtgttgagattacaggcacaagtcactgcacccagcccaaaacctgcctcttgaccaccagtctgttccatgtatttctaatatgagcaacagctcttagtcatgcattcccaccatccacccacccaaaaggagagcagccaatctggggtcccaagtttaatggaggaagagaatttacccagaatagtttgttcatattcacacagtggttttaaaaacaaaaaaattgattctgctccagaatattctaggtgcattttctgaccttctttttctattgcagattaagaaatggggccaggggagggaaggggggtgtgatttcttttcaggttattttttaatatttatttttaaacaaattccattatttggaggcttctggtgtttagacttcaaatctactaatcttagtccataattcactcatgggacagtccctaaacatttttccagagacagttctgagacagggtttgtttaaaactctgtgacaaggtgagaaaagatctataagtcagagaaacaagactccatcatctctacaaaaaaattttttaaattattaggtgcgcgtggtggcacatgccaatagtgccagctactcaggaggcttgaggtgggaggactgcttgagtccaggagtttaaggctgcagagagctatgattgagccactgccctccagcctgggttacagtgagacactgtctctaaaaaataacaaaatttggggtcaagtgtggtggttcacacctgtaatcccagcaggaggatcgcttgaggccagaagtttgagaccagcctaagcagtatagcaagacccagtctctacaaaaaaaaaaaaaaaaatggaaaaggaaaaataaattagccaggcctggtgatgcatactcatagtcccagttactcaggaggctgaggcaggaggatcacttgagcccaggagctggaggctgcagtgagctatgattgcaccactgcactccagcctgagtagcagagtgagaccttgtctcaaaaaataccattttttaatttaaaatttaaaaattttaaaaattaaaagtccagacaactgcagggctttgggcgatcccttttctttcagagccatttcctcctcagtgatatggaactatgcatcctcaggcagtatgcaggtggcacagggctgtgtgtctgtaagcacttaataaaacaagttcaaatgtaggacacgagctctcctctctgccccctcctcttctctaggacacggaagtttccaatcagatcaccctcgtggaagacgtcttagccaagctctgtaaaaccatttacccgctggccgacctcctggccaggccactcccggagggggtcgatcctctgaagcttgagatctatctcaccgacgaagacttcgaggtaagcggttcttccggtggggtggggatgggagtaaaacaacacacgcacgcccggctcctttcactgagccgcggggcgcttctcccaatgtttccagtttgcactagacatgacgagggatgaatacaacgccctgcccgcctggaagcaggtgaacctgaagaaagcaaaaggcctgttctgagtggggagacgccagaggagcctcacggtcacgtccaacaacaccactgcaccagggaaatggatatatatttttggactggtgtttttcacaaagtatttttcaatcagagttttcagaacctgacattgttaaagatactgcttgtcccggagttgtgtattttgtaaatgttcaagggaactgtttggaaacttctttccaccattcaggaggttatcagaattaataaaagtatctgttatgtgcacttaagccgcagctgctatagatagcactgccttcttgttccagctaggcaatgccttttttttttttttttgaagcagttctctttataaagtgttattttgatagtttgtggattctaaaatatatatatatttatataaacaccatataagtcaaatatgtatttaacaaagcaatatgtattcattcactttcaagatttgttttggtgtcaaaataacatgaaaaggtagatggagttgcttctgttgaattagctctgccaccaatatgtatcttcatacacgtttggaaatgtttcctgcagcattaggtatgacttgttctgagtactgcttccggtgctaaaatgaacaaagaatttgtacttaatggcatggactctggagaatctatgcgaatcaacctttctaccttaatatctccccaaaaatgtatagtgccttgtttttatgtacagtttatatacagaaaagtttgctctgcatttttgatgatggtttggaacattatctacaattttactctcaaatagtcaaaataaaaacatctcaatttctaataccggttgtaaacagtacacatgtcattttgtgatataggactcccaaataaaagtatcagaataaacacaacaattaactggttcacattgaattccaagcatgttcctttctggaattttttttttttttggtaaatattaacatagcaccaaattttgtaattaagtataaatgactatacatttgaatttagtttagggcaagattttatacaaggtcataagattaaatacagagtta

SEQ ID NO: 11082 - DNA, 398 bp, Homo sapiens
tccctaaacatttttccagagacagttctgagacagggtttgtttaaaactctgtgacaaggtgagaaaagatctataagtcagagaaacaagactccatcatctctacaaaaaaattttttaaattattaggtgcgcgtggtggcacatgccaatagtgccagctactcaggaggcttgaggtgggaggactgcttgagtccaggagtttaaggctgcagagagctatgattgagccactgccctccagcctgggttacagtgagacactgtctctaaaaaataacaaaatttggggtcaagtgtggtggttcacacctgtaatcccagcaggaggatcgcttgaggccagaagtttgagaccagcctaagcagtatagcaagacccagtctctaca

SEQ ID NO: 11083 - DNA, 3334 bp, Homo sapiens
agaagatgagacttttgaatgaatgaaaaagggtatcttgatacccagaattccccccaaagtacgggtaattcaacctgcacagttttctttcactcaaagtgttcagcacttgtgagtgaaaaatcatgtaattatctgtaaatatgtagctaacaaattgacctagtttctgtatttttttgtttttgtactaaagtttataggtctgtgccagctagagagaagttgctgtcattaccagttgtggtcctagcatctaaccctgaaaccatcctaggtgacatttttagaattaatacttaaatgttaaacagggggaaatgaagcttaatcatggtcaggtttgagatcttttgcagtgaaataattttatttaatataaatgatcacatgtcctcaatcatgaatgaggtagggagcctctctcccccagtggccatgtttacaaaagtgtgttttgtctataaagtgcaagtgttttaatgtttatgtaaattatgcaggtgataacatggtttggaactgtttattgggctctttaactgaattttcaaatgaaatgaactatgcttattgctggcacattgatcccatttctggaacatttttcctatttccagagttacatatgttcttttgtcattacccaatttaacctccctttctctgatatgccttgtagccaaagtattaaaggctgatgaacatagacaagggaaatgcatttcttagaaatccgtgaaccctcagttgtatgctttcagtactcgtgttaatatgtttctatggcaactctgaggtcagtggtttagaaatgagataccagtgttaatgaaaagtgtgtgctctttgcttttgcatggcttggcttagtatccaaggtatattagggccacttgaaagcatgaagaccagttatatagggaacaggtttctctcagtggcacattttgctttttctgagccccaaatacattgcctgggcatgaacattgttaccgtaaattgcacatggtcatggactgaattatgtgactttaaaggatgtaactgcccaacatttgcagattctgggtggtctatgtgaccatttgtctcgtatccaaaaaccccggggctattggaacccttccaacactttttcctttgtcatagacaagtttatatataacttaccaagatgttggctgtcctggtgtattgccagacagctctcttttggttcccattccaaatgtgctgctgtccttctttgcatttcacaatatcaaagaaaccaccacccttcttcctaacagcattttatgccttttattccacattaaatgggaattgtgcctacttaggagtgcccctccaattaattacatgtgtccaagaataatccaagctagagacacaaggtgggaaaacatttcaaaaaaaaaaagtcctcttaaggccagtaatttatctgaaaaggtattttatcacaccttgacaccttatatatgagcctattaggagctgcaggtggtttcatagggtaaaatccaagaaaagagaaggatgtgtggggtttctattagaagataattttgttctcattttaccttttcttttatgatccttctctgctagaacaggttaattctccaaatttgttttgttttgttttgttattttttagggaactcttttgcaaaagcaatggtcggatgtaaataacatttaaagtatagtgcacataacttccccggactgttccaatctgataatttgtaaatgctttagagtttttttaattaacacttgtgttgctaaattctatttatgtaagtctgctaaagttttttagcccacttaaaacttaagacaaccatttaaaataatggatgggttactatgagcaatttcgctttcagaacccccttgttttagtatatgaaaaagcctaatgcgcattaatgaggttgaagagactatgagaaatatgtatagtgtatattttaaaacagctttgcttgtattgtgaagatttaaaaacaaacttgagatttttaacgtaactattaacacagttttaacataagttatcccactgggtttaagagcatcttgaatgtataatcctttttgtaacccaggttggtttctacttttaccagtcacccaaacatatttatgtttttagttttatgtactcatttccctttgttttcctcaaacagcatgatttttttgcacatgtagaaattttttaaaagaaagaaattagtacatcattttctctggattttcttcacttccctcttcctttctactaactccttccttaaaggccatatcactccatttgcattatttgtgcaaatgccagggttggtttttatttttatttttgctatttacctaaaaaaagaaaatgcttcagtcaattgcttttttatttaaaaaaaaaaagaaaaaaagctgtaaccttatcatttctgagtagaccattgagcgatgaatgcacacctgtagtagcccaggaccagctgtggtggctaaagggaatatgttaattaagcaagaggttcttttctaaaagtggtatctgttatccacaatgtattttagttattcccacaagtcaggggtccagataaaatgagggttatcagctaactgatatgctatcattgaggttcatcaatgaatttgtacatttctagttccctttggtgaagggaaaaatgatgattttgcaagacctagattttggcttggtttcttgcctccttttttggcagccttcatcttctcatctcccaaaccccctgagcccgtagggttttcatagtggacaaagaacttgtggtcttttaaaactgggactgatacttttttgagagagtatcgtgtcgaaagtgtgatgttctaccactttaccaataactaattttaaatacacattgtcctctcgatttttggaccaaacagacgctcacagtggaggcttatcaagggttgcattggggaagaagcctctccctctctgtcagcaccagctggtaaaggtgactgtacagatgtgcattttccttttggtataaatggtccacagcactaactggtaaggcttattgtacagtatattgtcagtattcttctggttcagcataccttatagttcatatataacctgtattaattgtatagattgtgcattaaaagctgttaccaagttgtcagaacataagagcgaaaacaaggtcatatgtaatattttgtttgtaagtatcctttgtatcatagcaaaggaaatgtttaaaaaaatcaactgtaataaagtaattttagtacacag

SEQ ID NO: 11084 - DNA, 6081 bp, Homo sapiens
agtgttggtgttcactcactatatgtctttaagaaaattaaaactatggaaaatttgtctagcatatcagaagttgtaaatgctatatctggtatccagaggctggctgtaaaaagttccttggggtcactctatctcacattttttttggttagcattttaaaaatgcaaagccacatactttgaaatatattattccaaattgagctcccttccctttgcacatattttttcctccccttattgaagtcagctctaaccccaaattctagtatccaaaagtatttttatttgtataatgctatctgaaaaatgtgtttatattatattttcagagctgcaattcttattcgccatttcaatacctagagatagagagtcttgtatttgaagccacacacactggtgtaatatgcttagtactctaggtcaaggatttgttggtaaatggaacattttagcatagtcatgatttttggttgcctagacatcaggtaaacattcagtacactaaagaaactatcctggacactccctcctgcttccaccaatttttttctcacccccttttcaaaaattgaaaactctatgagtgtctttttgagaccataaagcagactttagtaactttctatttctgtaagtactaaatgtctggcattttaaacttttgtagaatacattatgttggacactggaataatactatttattttcacctgtgaaaaatgacttcattgtacttgaaacacctcctttgcatttctccatttgtgccattcactagtggaaataaattgtattataccatgatctactggctttttaaaactgtattaaatatgcacatttttggtatagctattatcatttgtatgtatatattgtatatacatatgagtgtctgtatgtgtgtatagatggatggatgtaactcatactgtacatttccatcagggcacttaaaagttctgttatttttgtttggttttgttatttcagtcctcagttaaggcaagaatgcatgtgtttcttaagaatgagtactctgcgttgatgtttatgagaaggtggtcattagatgcagtcttttcctttttaatcccctcttagcacttctgtgagtggagaggacattaagtaaaatttggaatcataagttgcaatgcagtaaaatggtgctggggaaggagccagttagtgtttctgtgagtttgtgttgtgatgcaataagagataagtaatgcagagagaaatgaaccatggaaagtaagaacactgatggtgattcctctgcaaagatgataagaaaaagaaccaataaatcacacaatctttatgtgctttctatatgtatttcttagtagtgataccattgatcctcttactttttttactccattaatactaataattatatactttgctgaggatcaaaacagccaagaaaggaattactgctaaagcatctaagattctcctgaactgtaaaatcaacaggaaatggccactgggagagaaggatttggtattgggtgaggggctttctccctttacctgcctcttcttgcttgctaatagtaagttctttgtgcaccttccaccacttctgagccactactattcaagtagagatttgccccaacacattaactttttccttggagatttatatggtcctgcattttgtcctgtgctcacaatgtgaagtgtcttctgtattcaaatcaaaaaataatatatttaaggtatataagtgtgaatctcctataatgatggaagaagaggttctcttgtcttagatagaaaagagccttctccaagagcaatgtcaaaacttgggctgtcatctttgagctgtttaccaaaatacagaccattattgaagaaaaacaaattatctattttgttttcccccatctaacatgatagtgcccccaaccaggttgtagcattgccttttaaaagagactcactcactcttagtttttaagaactggaaatttcccatcctcagatcccttaaaggatgaagagttggctgtacacttagcggacttgcctcttgtatgcaaggactactgattgaagtctgttttgctgtgtctggttatgttgtctgcacttttatgaaatcactacaataggtctgcattggaaatgactattaatttgtaaagaagtaagttttattaaacactgtctagaaaaagaaagtgaagctgagaactcttcctttattgtgcatttatattttctgctgaattccggtagttccctttaaagtcatgttgactaatgttttcctccttgtttgtattcagatttccaaaatttcactcatacaagggaagagactccatttagcttaacggtagtctttagatcataagaaatatataaattagtatgcaccttatctgcctgttgtgggtttcttaaacttgcacttcctacccacccaaagatagatatcctttaaagaaaataaaggcagagaattaaaactggggagccatttactatgtcaccatcactgttaactgtttcccagcaatctaaactttttgaagtttcagaggtgtattttttttttgtatatatgtctgtgtgattgtattgttttgtttctaaatatacaaggaattctttaaatagagaaaaaggttaatcctcactgaaacaccaggatgcccactggatatactaatctgaacatctgtaggtagtttgtcatgaaaaagtggagagaagatgagacttttgaatgaatgaaaaagggtatcttgatacccagaattccccccaaagtacgggtaattcaacctgcacagttttctttcactcaaagtgttcagcacttgtgagtgaaaaatcatgtaattatctgtaaatatgtagctaacaaattgacctagtttctgtatttttttgtttttgtactaaagtttataggtctgtgccagctagagagaagttgctgtcattaccagttgtggtcctagcatctaaccctgaaaccatcctaggtgacatttttagaattaatacttaaatgttaaacagggggaaatgaagcttaatcatggtcaggtttgagatcttttgcagtgaaataattttatttaatataaatgatcacatgtcctcaatcatgaatgaggtagggagcctctctcccccagtggccatgtttacaaaagtgtgttttgtctataaagtgcaagtgttttaatgtttatgtaaattatgcaggtgataacatggtttggaactgtttattgggctctttaactgaattttcaaatgaaatgaactatgcttattgctggcacattgatcccatttctggaacattttcctatttccagagttacatatggtcttttggcattacccaagtgagcctccctttctctgatatgccttgtagccaaagtattaaaggctgatgaacatagacaagggaaatgcatttcttagaaatccgtgaacctcagttgtatgctttcagtactcgtgttaatatgtttctatggcaactctgaggtcagtggtttagaaatgagataccagtgttaatgaaaagtgtgtgctctttgcttttgcatggcttggcttagtatccaaggtatattagggccacttgaaagcatgaagaccagttatatagggaacaggtttctctcagtggcacattttgctttttctgagccccaaatacattgcctgggcatgaacattgttaccgtaaattgcacatggtcatggactgaattatgtgactttaaaggatgtaactgcccaacatttgcagattctgggtggtctatgtgaccatttgtctcgtatccaaaaaccccggggctattggaacccttccaacactttttcctttgtcatagacaagtttatatataacttaccaagatgttggctgtcctggtgtattgccagacagctctcttttggttcccattccaaatgtgctgctgtccttctttgcatttcacaatatcaaagaaaccaccacccttcttcctaacagcattttatgccttttattccacattaaatgggaattgtgcctacttaggagtgcccctccaattaattacatgtgtccaagaataatccaagctagagacacaaggtgggaaaacatttcaaaaaaaaaaagtcctcttaaggccagtaatttatctgaaaaggtattttatcacaccttgacaccttatatatgagcctattaggagctgcaggtggtttcatagggtaaaatccaagaaaagagaaggatgtgtggggtttctattagaagataattttgttctcattttaccttttcttttatgatccttctctgctagaacaggttaattctccaaatttgttttgttttgttttgttattttttagggaactcttttgcaaaagcaatggtcggatgtaaataacatttaaagtatagtgcacataacttccccggactgttccaatctgataatttgtaaatgctttagagtttttttaattaacacttgtgttgctaaattctatttatgtaagtctgctaaagttttttagcccacttaaaacttaagacaaccatttaaaataatggatgggttactatgagcaatttcgctttcagaacccccttgttttagtatatgaaaaagcctaatgcgcattaatgaggttgaagagactatgagaaatatgtatagtgtatattttaaaacagctttgcttgtattgtgaagatttaaaaacaaacttgagatttttaacgtaactattaacacagttttaacataagttatcccactgggtttaagagcatcttgaatgtataatcctttttgtaacccaggttggtttctacttttaccagtcacccaaacatatttatgtttttagttttatgtactcatttccctttgttttcctcaaacagcatgatttttttgcacatgtagaaattttttaaaagaaagaaattagtacatcattttctctggattttcttcacttccctcttcctttctactaactccttccttaaaggccatatcactccatttgcattatttgtgcaaatgccagggttggtttttatttttatttttgctatttacctaaaaaaagaaaatgcttcagtcaattgcttttttatttaaaaaaaaaaagaaaaaaagctgtaaccttatcatttctgagtagaccattgagcgatgaatgcacacctgtagtagcccaggaccagctgtggtggctaaagggaatatgttaattaagcaagaggttcttttctaaaagtggtatctgttatccacaatgtattttagttattcccacaagtcaggggtccagataaaatgagggttatcagctaactgatatgctatcattgaggttcatcaatgaatttgtacatttctagttccctttggtgaagggaaaaatgatgattttgcaagacctagattttggcttggtttcttgcctccttttttggcagccttcatcttctcatctcccaaaccccctgagcccgtagggttttcatagtggacaaagaacttgtggtcttttaaaactgggactgatacttttttgagagagtatcgtgtcgaaagtgtgatgttctaccactttaccaataactaattttaaatacacattgtcctctcgatttttggaccaaacagacgctcacagtggaggcttatcaagggttgcattggggaagaagcctctccctctctgtcagcaccagctggtaaaggtgactgtacagatgtgcattttccttttggtataaatggtccacagcactaactggtaaggcttattgtacagtatattgtcagtattcttctggttcagcataccttatagttcatatataacctgtattaattgtatagattgtgcattaaaagctgttaccaagttgtcagaacataagagcgaaaacaaggtcatatgtaatattttgtttgtaagtatcctttgtatcatagcaaaggaaatgtttaaaaaaatcaactgtaataaagtaattttagtacacag

SEQ ID NO: 11085 - DNA, 305 bp, Homo sapiens
ccagtttttttaagcaattttattcccatgaagataaactctattgagtgactattggataattactgaaccttaggcagtgtgctgaatgttggggttacaaaaatgggattaccactcagatggtaagagtgtaccatctgataaaagacataaaccctcgtccgggtgcggtggctcgcacctgtaatcccagcactttgggaggccaagtttggtggatcacctgaggtcaggagttcgagaccaacatggcgaaaccctgtctctactaaaaatgcaaaaattagctgggtgtggtggcg

SEQ ID NO: 11086 - DNA, 740 bp, Homo sapiens
tataaattgtgttggaggtgggtaggaagctgtgagtatgacttgaagaaaaatatccttttcagtgacaaatcagagtttcttacaagttattgtcctgctcccttccaagttgtcttgaagaatccttgctgctaactctggatcctgcttttcctatagtcagagggctccaaggtagaactctctaagtccctctcaatggcactctttgcctagaccaaactaatgaccaaacagtaatcaatctatcactgttgaagtcctggttttctcaaccaaattttaagtctttcccaggtatgtcagtcgagttgccatgaatcctcacctgtaggagtttctgggattcattttaaggaaactggaagaaaattaatgttttaatgtaaatgtttttaaaaccaagatcaccatagagttcacacaaaattttaggcagtgtttcaagaagcactcttatgtgttgttctttcagcccatgctccaggtcaccggtttttaggtaaacatgacatgacatgtacttgtaatatcagtgaaaggggcttttagtcgtctcagtatcttttttgcattcaggtattatagcgtttccaacaaattgagaaattacttatttggtgtaaaatgacgagagagctttagaatttaataaaatgtcaaaaatacaatttgatacccttaaaaattattcatagatctggctgctctgtactactggatgggtggaataggga

SEQ ID NO: 11087 - DNA, 305 bp, Homo sapiens; identical to SEQ ID NO: 11085

SEQ ID NO: 11088 - DNA, 739 bp, Homo sapiens
gcggagggtgcagtgagctgagatcgcaccactgcactccagcctggcggcagggcaagactctgtctcaaaaaaaaaaagaaaaagaaaagtgtgctctttcatttccaagtatttaaaatactcctgttatcatgttgttatttttagtttcacatttggcctgagcacaagctcgtttaatttcaaaacatttatatttgttgaagtttgttttggggccataaacaaaaagcccataaacaacatgcttgtggagtattccgtaggtacttgtaaaaaggatgtatattctggtgttgtttggtaaaatattctgtgtttatggatcctgttgattaatgatgttattcagactttctatattttcctcattttttgtctaatattttgctaaaagaaggatgttaaagtccccaacagtaattgtggaattttttatttcttctttcagttctatcactttttgcttcatatatttgaatgttctcttgtttggtgtatatgcatttatgattattatatcttcttcatgtattgtccctcttatcattatgaaactttcctctttgtccatgttcattttctgagctctgaagtatactttgtcttacactaatacaaggtataattgctgcatttttaaaagttaatgtttgcatggcttatctttgtccatttcttttattttcaacctgcctacatcattatatttgaagtaaattttatgtagacaaca

SEQ ID NO: 11089 - DNA, 1067 bp, Homo sapiens
ttggtccagggtcacagagctgtcaaggcaccttgcacttctaggccaggacacagaaaggggagttggggaccactacaatgagcaatgttggtcagtagttttatttgtttgttttcactttatctgattttggtgtttgactaatactggcctcccaaaatcaactgggaatttttcctccagtgccaccccctttttatttgcatgacattttgtagaattggtgttgtttctttaagtattcggtagaattttttggtgaaaccatttaagtctggaggtttctcttgtggaaggtttgaattacgtagtcattcaacttaataggtactcaaactatttcatattgggtgggttttgatagattattatttttgaggaattgttccatttcatctaagttttgtaacttaaatttgtggagttatttatttgaagtattcccttattattcccttcatgacagaaggttctatagttgtatcctttgttttattcctaatagtggttatgtgtgtcttctttatctttgttaatcttcttagatgtttataaattttattgactatttcaaagaaccagctttctgtgtcattgattttctatgtgttctgactttgatttctattctgatcattattattttctttttctacttgttttggttgtatattgctgtttgtagattcttgaggtgggagcttagattatcattagagactttattctaacataagcatttagttttataagctaaactcagcactgtttgagctccatcttacattttcctatattgtaattatattttcattcagcttaactatttctcgattccatttaagaaattatctgtgacacatgggttatttagaagtgtgctcttttggccgagcacggtggctcacgcctgtaaccccagcactttgggaggctgaggcgggcagatcatgaggtcaagagatggagaccatcctggccaacatggtgaaaccccatctctactaaaaatacaaaaattagctggcgtggtggcgggctcctgtaatcccaggtactcggaa

SEQ ID NO: 11090 - DNA, 9477 bp, Homo sapiens
gatggccctgctgtggcaccagtgaccaacgggaacacaacggtgccacccctgaacgatgatctggacatctttggaccgatgatttctaatcccttacctgcaactgtcatgcccccagctcaggtatgtgataagaatatggttttatatggtcactgcttatttcctttttgaaaagtttcaaaatttcaattttggaagaattgtttctgagcagtaactgatttaaaagtctcctgttctttaggctagagtttagcaaactaagccagcagcttgtttttgcaaataaagttttattggcacacagccactcccactggtttaggtactgtatgtggctgctttcctgctacaaaagcagagttaaatattaaaaacagagaatgtatagcccacaaaacctaaaatattcactgtctttaaagttctaacccttgctttagggaaacaacagtatttagaatgaacaagtggaaaaaccctgactacctcaactttcctgagatcaacaaggtcacttacttcagagcttttaaaactgtggctgtttgtaaatattgactgcagaagttctagcaaatttagtactgtctttttaaaataaaggcaaaatgaaggtaaattatgttttaagttagccttaaaatctaccttgcttttttttttaagtgattttttaaaaatctagaacagtaataataatgatcgggatattttaataaaagtattaatggtgaagaaattttgaattgccttcttaacattacatggaatttttgtaatgtgaactgtatgaactttcaggaaacaaactactcttaagcatacaacattaagattctatcttaagtttatactttacaaataaacaagcagtttgtgcagcataatttttgagataaaatatttccttttccatagaaaaactgagtcaaatctgaattgttctggtagacagttttaataagaaaaagtcaatgtcttataaggctaggaacatatttctgttgcacatatttattgttattatgatagtcattatatagttaccattagaatggaacaagtagatttcttaggaatgattaaatggatctttatcaaaattgtctgcagcagtagtgtttattttcagcaaaatagcttattttatggctttgccccttcttcccctcctgtaacacacataaaaaagagaatattgttactgttatttcaattaagattaattaccttacaaattggtacaggcataggtgtacatgtgacaaaattgtctaatattgtgtctttggaaagaagcatttaggatatttgacaaccagaatgtgaaaagccatttatttttagtctagcattgtagtgcggctgttatacctgctagacttatttagcactgtcactggggtctgacagttgctttgcaactgcttaagagagttagatcccacctctgaggtttcagtgtacttcacgtgttctgttctgtattaaagcagcaagtagaacaatgcagacttcgtttaattcttaagcacaagtagtgccatgacaaggagtgtagcctctggctttaagaggggtggcagctggccttcagactttaggcattctgagcattacctggtaggacatagggttaatttttaaaatcatatctaatacttcttttggaacactgttatgttgagcactggttagactgtacaagttatgttgagccctgtaaaatatttggtgaacagtagtatctttcgtctaaacttcatgtagagattaaaatccagacatatttggccaggtatggtggttcatgcctgtaatcccagcactttgggaggctgaggtgggtggatcacctgaggccaggagttcaacaccagcctggccaacatggtgaaaccccatctctccttaaaatacaaaaattagctgggcgtggtggcgtgcgcctgtaatcccagttactcgggaggctgaggcaggagaattgcttgaacccgggaggcagaggttgcagtgagcggagatcacgccattgcactccagcctgggggacaagagtgagacttcgtctggaaaaaaaaaaaaatccagacatattttcaaaataatgcctttgaaaatgggggatggtgctgaaactacagattctatgcatatattgctaccatgtaatttagtcattttggtgggtttttaatatgtgaagttgagctcaaactagttgtggacaccaagattttgaattcttctgaaccctgtattctttcactccttgtgttattttctgagtatatacaaattctagtacaatattttctaacttatgaatatgaaatagattgattttaccatctgccttacctgtctggggtctagtctttcttaaaggggttagttagaaatacttagctgacaggagtgtacctgtgttttgggggctggagaggaacagttccagagtcttcattgttgacatggagaaacccctttcctgttctttcatatacatatacatatacatatacatatacatatacatatacatatacatatacatataccaacagtacctagacatacacaagggctaagtcctgttttttcttggttaagcccttgggtcccagaaggccagagagccttcgattagatgctctgcagcttcctgaagtgtaaaatgagaggcagaagttgtttcccttttatcctggggtcgtagtgctggcgagtggagcaccagaaagtaagtggacatttgagtgcttactagtcctgctgattggtttggctgtttttagactgtgtccttgttgaggtagatatttcatattatgatgtttacagtatgtgaatattaggctgctctactatgagagtggaatcatagcttcccaacattttgggttttcttatagttgtctcttatccacagggaatagaccccagggttttcagcagacttttaggttgaacagatactaagtgtgataaaaagatcacttagtgatgtagttgctttgttttataaacaatattaacaataaacaccaagtacttaatccaaccattgtgcagaacacttttgtgatcattaagcttatcccaagtttataggagagagactgaaaggagaagtaaagtaacatgtctgagtgtaccacagaaagtcatgggggcaggctctagtcctggcagacaggctccagcccatgctcttagctctatgatctgctgctgcttcattggtagcttagatatattttattcaggggtattgtgatatttagtattccatgatatctaatttcttacatatttgaatttttggaaaattaagcggctttttgtcgcttacaattcttgcttagtcataagattcaaaatactgtgtagtttataagtacaatgtttggatggtaacttattgcatggtgttctaggaggacattaaatgtttgaatttaatttccacttgcaactcaccttattctgtagtttgagaaggatcagccagcttttactagtcttcatagaattctttgaaactctcttcatattcaaaacaagtccatataacatgtgaatgtgatttaatgtttagtgactacggagatgattaaggttagcagttgtgattgtataatagtgtgtgcaagatatgagattgagaatattttatattaaatatctacatgtttatttgtatttgtgttcatttgcccccttgtccaaaagtgaagggcaggatatgttcagacaatagatggtcaaagttttgctgtaccttcatttctggatagattagaagcagtctaatattgtagttaaaactgattagatgtataaaaatcctatgatacaggttttgaaaagataaaaccttttaagtagccattgcaaatcctcttacagtctgttgtagttgtagaaatgttctttattccaaaggataccagtttcttgaagcagtagttgctatggagtggtggtcctctcatctctaactattgttgagccccaggatttgatgagcaaaaacttggtgtcaccttaggtagtaaatgcaacttactgtgaaaatgcttcagtctacctacattaacagattcaaattaagaagtactgtcttgattgtagatgtttttatatgggcttgggcttgtaagtgatcctcttgaatggcaccattttaccttctacaattgtttgattcctatctaattttataactttatttggattttaagtaatggataagctgcgctttactatgcagaatttgatagcttattttggtgtttgtctcaggggacaccctctgcaccagcagctgcaaccctgtctacagtaacatctggggatctagatttattcactgagcaaactacaaaatcagaagaagtggcaaagaaacaactttccaaagactccatcttatctctgtatggcacaggaaccattcaacagcaaagtactcctggtaatgaattttgatatctgctttcagtgacattactagaagtacatcctttgtaattatataataagatcaattatatatcttttattgttccatgtagtgagtgcttttgttgttgcagtttatacaactatgaagccgaaatgaatgagcattagaattaaaaaattaagaggcatgtacaggattcacagaactttatttggaattaacaagctgttcatagatcactaaatgttgtttcacaagcttatagaacatggattatctttgatgaattattgaaacgatttgcatgaagtttatgactgcgtacagtgtattttctctgcaggtaaacagtcttgagttaccacatggattaaaaaaaatctatgaatttttttgtaatcataacaaaatattagcataagccttattgtttacagagttttaatctttcacaccatttcctttaaaataatgagctgcatttcacatgtgagctaaaattgttgggcagcccactacacctattgaagcgagatatagtcagctctcacttccctgtttcgtactgggggaccagtggtacaaatcagcaataaaacagtgtatgatgtcatgctacatagtttggtcttcacagtggaagatattttgtgtggctgttgcatatgatttacatttcttaattaaatttactcaggttaataactgatttgtctgcatcctagaaacaaccagctctcagggtttaggtgtgggttggtctgagtagtaggagcagccaaactggaattaaaatgtttgctgtgagtagttcagaaaggcaatttttctgtgattatagagatgagtgcaactacacgtgatagctctgtcttcattcattttctttttgtggtgcaggtgtatttatgggacccacaaatataccatttacctcacaagcaccagctgcatttcagggctttccatcgatgggcgtgcctgtgcctgcagctcctggccttataggaaatgtgatgggacagagtccaagcatgatggtgggcatgcccatgcccaatgggtttatgggaaatgcacaaactggtgtgatgccacttcctcagaacgttgttggcccccaaggaggaatggtgggacaaatgggtgcaccccagagtaagtttggcctgccgcaagctcagcagccccagtggagcctctcacaggtaggggtcatttactttctagcttctcccaaatcaaaccagatttattttctaaatcttttttttttttttttttttttttttttaagtctagtgatctggcagaaagaattcaatagggataatatgttatagggtcaaaagtatctataaatattatgaagttgtatcagatagacaaatgatgtgttattatcgctattttagagtattctgtaaaaaaaaggttaaacatctttcatttcaaattgtaatgtaactgtaacgtgaacaccactaatggccagaaattatctcaggcatcatgagactccctctctgtcacctctgagattagcactaagctttatccagcttgctggtgggacatttttacagtccacttagacaacttagcttcactaataattttaggatcttttattagaaaataaaaatctagcctcatattctcaaagcactattttatgagggatctaaggctatttttcaggtcggatgattactgccccatggctctgtaaaaattctttttgttgagaaacctttgtaaagttgtattttctttttacataccctataatgacttttatgtttaaaaagagtacaaaaagattcaattcccataaggtgtgaaccagacatcccctcatattataaaatcctatttctacctaagttagagctgagatagaacatttctatttcaggtgctgtgttctgacttttctctagctgcacagacaaaggctcttagagaggttcatgctcccactcttcttccttttacacttcccattgatgttcctccagcattttggcaatcttggtttctgtttggtcacttgttttacctttagagcattcagggaatagtctagagtgatttctaacattagcacaatcactatatatcacagttaattttgctaccaccatttacaagaatataggtaaaacattggtctctacccgctgggaatctaaaaaattgtatgtgctaagtgtcagtcacatggtcaacatgctgaagcacacccagctcaggttaaggtgctagatgaaccaggaaggagttaatactggctcttacttccagataatgcagaagggtgatgctgttctccagcactccatcagtgcaatctactggccaatgacaaggtggttaaaatgtcctttagtaggtatgaagacgtgatctgcttcttcagacacttatgcctgattagtgatgtagtttatgttagtgtctttgaaactgtaaataagtcaagtcaaatgtattaaattaagaacacagtctaactctgagtgtaagttttaaacccactcactatatggtaaatcttgcctttccttctcttatcaccaattttggaagtaagagaatcacagggttaagatgcttatatatatatatatttgactccagtcttgaagaaaaatacatgtaatcttatgctttattgcatacaatgaaaataaattttagatgtttatgttgttagatcagcgagagaaataaatgctttatgaccactttaaaaatatttaggaagtatataagattttaatagagaataatatctatcatacaaagtttataggataattttagactattttacttcctaaaattttcttactccttagtagttaaagcacaatatcctagtgtaggtgaaagttagttagagtagcggactcattaaaatcccaagattgctttggtatttttttttaagtaagttgtggttaatctttggggaaactgtatctagaaagtagataaagaagggaacaaagtagctatttgctttaagaaatatttgtatggtactctgtttttattccagtgcttggactagttgtcacattaatgaaaaaatgaccaactgtgtggctaaagaaacaagaattaaaagtgaagtaagcctcttgaactaagccttttatatgtttcacagatgaatcagcagatggctggcatgagtatcagtagtgcaacccctactgcaggttttggccagccctccagcacaacagcaggatggtctggaagctcatcaggtcagactctcagcacacaactgtggaaatgaaaactgcaatacaagtttcatccagaactaccacctgacattccttgctgaaacgcatctagttcccctgtttattcatatgcatattttttttctttttacccatttgttcatattaagaatgatctgattgaccgtgttggtctgtactgattcaatttgatgtggtgaaaagcaggttgataaatcattttatgtcaagggcagctttgctcatatttcccatgatttcatgtactgcattatttgagaagctgctcaacttgcaaaatcagttttcctctcaataaaattatagctctaatgtttgcatataagggaagtagttatcatgttagtaatacctctaatagtataaaccccaccccaaaattagccagtaatcctgtaggaaggtactgtatgatcaaatgtttaatcatataaatagaatgtaaatgtctcactgagcactgttttctagtgtatcaaaatgctcttatttcatcattcacttcactgtgctgttgttatgatgtgcttaacagggaacgtgattagtgaaaggaagataaacgtggatgttactccaaaacttcgtttaatgaatgcttaaagaattcaaattttatctgcctctcttgtaatttggatctcttcttaatgtacatagtgctaacatgaagacctttttctgcactatatgcaaacagggtaactaactaaaacaaagccactttcaatcttcaatccttgaaggtatatctaggtttatgacagtaattgtgtttacattttatggtgcctagtattgacaaaatgttatttccctacattaaacatgactccatagaccttttcatttgtgggtttttatttcctatgatgtatactgccactaaccttccaaaaattacttagtattgcaaagtcaggaatcatcaggaacgtttagctgacaaaatacttgtctgttttaaaaacctgttcaagtctaccaacctgttcaagtctaccaattataagggcaaattggagaaaaagaaaaaatatatactcaagagtggtatcttgcagtatcggcactgtacaaaaaaatcttccaatttagttgttgtagagaaaacatgcagaacaaatgaagacaaaacatacattttgtaccaaccatccaattagcttatgttaactgacaagctccatttaaacagatgtccatcagatgacaagaaaggctgctgtactgaagtaaaacaaacaatacctgaatgctctgtagcctaaactccaaacatcctcttccatatggatccactggctggacaaactgcaccagttgctgcttcaatttatacctcaattttcactgtgtccaggtggtactttggctcgttggctagattaaccttctctgtccgagtgtgccacacgagaacctgaaggggaaggaaatagcttgggtagcgcactcttcatggtgacactcgaggtcgggcagcacaagtgtaatgaataccttagtgcagttatttgctttcggttccagttcttcgactgttgttatctgtttgagaaagtcagattcttgcatccctggctgggatccacgacgcttaaatacagcttttggattggacaaaatgacttgaagacttacagcaaatcctttgtgaaaaataaaaaaaaaaaagagactttaaaa

SEQ ID NO: 11091 - DNA, 9496 bp, Homo sapiens
gatggccctgctgtggcaccagtgaccaacgggaacacaacggtgccacccctgaacgatgatctggacatctttggaccgatgatttctaatcccttacctgcaactgtcatgcccccagctcaggtatgtgataagaatatggttttatatggtcactgcttatttcctttttgaaaagtttcaaaatttcaattttggaagaattgtttctgagcagtaactgatttaaaagtctcctgttctttaggctagagtttagcaaactaagccagcagcttgtttttgcaaataaagttttattggcacacagccactcccactggtttaggtactgtatgtggctgctttcctgctacaaaagcagagttaaatattaaaaacagagaatgtatagcccacaaaacctaaaatattcactgtctttaaagttctaacccttgctttagggaaacaacagtatttagaatgaacaagtggaaaaaccctgactacctcaactttcctgagatcaacaaggtcacttacttcagagcttttaaaactgtggctgtttgtaaatattgactgcagaagttctagcaaatttagtactgtctttttaaaataaaggcaaaatgaaggtaaattatgttttaagttagccttaaaatctaccttgcttttttttttaagtgattttttaaaaatctagaacagtaataataatgatcgggatattttaataaaagtattaatggtgaagaaattttgaattgccttcttaacattacatggaatttttgtaatgtgaactgtatgaactttcaggaaacaaactactcttaagcatacaacattaagattctatcttaagtttatactttacaaataaacaagcagtttgtgcagcataatttttgagataaaatatttccttttccatagaaaaactgagtcaaatctgaattgttctggtagacagttttaataagaaaaagtcaatgtcttataaggctaggaacatatttctgttgcacatatttattgttattatgatagtcattatatagttaccattagaatggaacaagtagatttcttaggaatgattaaatggatctttatcaaaattgtctgcagcagtagtgtttattttcagcaaaatagcttattttatggctttgccccttcttcccctcctgtaacacacataaaaaagagaatattgttactgttatttcaattaagattaattaccttacaaattggtacaggcataggtgtacatgtgacaaaattgtctaatattgtgtctttggaaagaagcatttaggatatttgacaaccagaatgtgaaaagccatttatttttagtctagcattgtagtgcggctgttatacctgctagacttatttagcactgtcactggggtctgacagttgctttgcaactgcttaagagagttagatcccacctctgaggtttcagtgtacttcacgtgttctgttctgtattaaagcagcaagtagaacaatgcagacttcgtttaattcttaagcacaagtagtgccatgacaaggagtgtagcctctggctttaagaggggtggcagctggccttcagactttaggcattctgagcattacctggtaggacatagggttaatttttaaaatcatatctaatacttcttttggaacactgttatgttgagcactggttagactgtacaagttatgttgagccctgtaaaatatttggtgaacagtagtatctttcgtctaaacttcatgtagagattaaaatccagacatatttggccaggtatggtggttcatgcctgtaatcccagcactttgggaggctgaggtgggtggatcacctgaggccaggagttcaacaccagcctggccaacatggtgaaaccccatctctccttaaaatacaaaaattagctgggcgtggtggcgtgcgcctgtaatcccagttactcgggaggctgaggcaggagaattgcttgaacccgggaggcagaggttgcagtgagcggagatcacgccattgcactccagcctgggggacaagagtgagacttcgtctggaaaaaaaaaaaaatccagacatattttcaaaataatgcctttgaaaatgggggatggtgctgaaactacagattctatgcatatattgctaccatgtaatttagtcattttggtgggtttttaatatgtgaagttgagctcaaactagttgtggacaccaagattttgaattcttctgaaccctgtattctttcactccttgtgttattttctgagtatatacaaattctagtacaatattttctaacttatgaatatgaaatagattgattttaccatctgccttacctgtctggggtctagtctttcttaaaggggttagttagaaatacttagctgacaggagtgtacctgtgttttgggggctggagaggaacagttccagagtcttcattgttgacatggagaaacccctttcctgttctttcatatacatatacatatacatatacatatacatatacatatacatatacatatacatatacatatacatatacatataccaacagtacctagacatacacaagggctaagtcctgttttttcttggttaagcccttgggtcccagaaggccagagagccttcgattagatgctctgcagcttcctgaagtgtaaaatgagaggcagaagttgtttcccttttatcctggggtcgtagtgctggcgagtggagcaccagaaagtaagtggacatttgagtgcttactagtcctgctgattggtttggctgtttttagactgtgtccttgttgaggtagatatttcatattatgatgtttacagtatgtgaatattaggctgctctactatgagagtggaatcatagcttcccaacattttgggttttcttatagttgtctcttatccacagggaatagaccccagggttttcagcagacttttaggttgaacagatactaagtgtgataaaaagatcacttagtgatgtagttgctttgttttataaacaatattaacaataaacaccaagtacttaatccaaccattgtgcagaacacttttgtgatcattaagcttatcccaagtttataggagagagactgaaaggagaagtaaagtaacatgtctgagtgtaccacagaaagtcatgggggcaggctctagtcctggcagacaggctccagcccatgctcttagctctatgatctgctgctgcttcattggtagcttagatatattttattcaggggtattgtgatatttagtattccatgatatctaatttcttacatatttgaatttttggaaaattaagcggctttttgtcgcttacaattcttgcttagtcataagattcaaaatactgtgtagtttataagtacaatgtttggatggtaacttattgcatggtgttctaggaggacattaaatgtttgaatttaatttccacttgcaactcaccttattctgtagtttgagaaggatcagccagcttttactagtcttcatagaattctttgaaactctcttcatattcaaaacaagtccatataacatgtgaatgtgatttaatgtttagtgactacggagatgattaaggttagcagttgtgattgtataatagtgtgtgcaagatatgagattgagaatattttatattaaatatctacatgtttatttgtatttgtgttcatttgcccccttgtccaaaagtgaagggcaggatatgttcagacaatagatggtcaaagttttgctgtaccttcatttctggatagattagaagcagtctaatattgtagttaaaactgattagatgtataaaaatcctatgatacaggttttgaaaagataaaaccttttaagtagccattgcaaatcctcttacagtctgttgtagttgtagaaatgttctttattccaaaggataccagtttcttgaagcagtagttgctatggagtggtggtcctctcatctctaactattgttgagccccaggatttgatgagcaaaaacttggtgtcaccttaggtagtaaatgcaacttactgtgaaaatgcttcagtctacctacattaacagattcaaattaagaagtactgtcttgattgtagatgtttttatatgggcttgggcttgtaagtgatcctcttgaatggcaccattttaccttctacaattgtttgattcctatctaattttataactttatttggattttaagtaatggataagctgcgctttactatgcagaatttgatagcttattttggtgtttgtctcaggggacaccctctgcaccagcagctgcaaccctgtctacagtaacatctggggatctagatttattcactgagcaaactacaaaatcagaagaagtggcaaagaaacaactttccaaagactccatcttatctctgtatggcacaggaaccattcaacagcaaagtactcctggtaatgaattttgatatctgctttcagtgacattactagaagtacatcctttgtaattatataataagatcaattatatatcttttattgttccatgtagtgagtgcttttgttgttgcagtttatacaactatgaagccgaaatgaatgagcattagaattaaaaaattaagaggcatgtacaggattcacagaactttatttggaattaacaagctgttcatagatcactaaatgttgtttcacaagcttatagaacatggattatctttgatgaattattgaaacgatttgcatgaagtttatgactgcgtacagtgtattttctctgcaggtaaacagtcttgagttaccacatggattaaaaaaaatctatgaatttttttgtaatcataacaaaatattagcataagccttattgtttacagagttttaatctttcacaccatttcctttaaaataatgagctgcatttcacatgtgagctaaaattgttgggcagcccactacacctattgaagcgagatatagtcagctctcacttccctgtttcgtactgggggaccagtggtacaaatcagcaataaaacagtgtatgatgtcatgctacatagtttggtcttcacagtggaagatattttgtgtggctgttgcatatgatttacatttcttaattaaatttactcaggttaataactgatttgtctgcatcctagaaacaaccagctctcagggtttaggtgtgggttggtctgagtagtaggagcagccaaactggaattaaaatgtttgctgtgagtagttcagaaaggcaatttttctgtgattatagagatgagtgcaactacacgtgatagctctgtcttcattcattttctttttgtggtgcaggtgtatttatgggacccacaaatataccatttacctcacaagcaccagctgcatttcagggctttccatcgatgggcgtgcctgtgcctgcagctcctggccttataggaaatgtgatgggacagagtccaagcatgatggtgggcatgcccatgcccaatgggtttatgggaaatgcacaaactggtgtgatgccacttcctcagaacgttgttggcccccaaggaggaatggtgggacaaatgggtgcaccccagagtaagtttggcctgccgcaagctcagcagccccagtggagcctctcacaggtaggggtcatttactttctagcttctcccaaatcaaaccagatttattttctaaatctttttttttttttttttttttttttttttaagtctagtgatctggcagaaagaattcaatagggataatatgttatagggtcaaaagtatctataaatattatgaagttgtatcagatagacaaatgatgtgttattatccctattttagagtattctgtaaaaaaaaggttaaacatctttcatttcaaattgtaatgtaactgtaacgtgaacaccactaatggccagaaattatctcaggcatcatgagactccctctctgtcacctctgagattagcactaagctttatccagcttgctggtgggacatttttacagtccacttagacaacttagcttcactaataattttaggatcttttattagaaaataaaaatctagcctcatattctcaaagcactattttatgagggatctaaggctatttttcaggtcggatgattactgccccatggctctgtaaaaattctttttgttgagaaacctttgtaaagttgtattttctttttacataccctataatgacttttatgtttaaaaagagtacaaaaagattcaattcccataaggtgtgaaccagacatcccctcatattataaaatcctatttctacctaagttagagctgagatagaacatttctatttcaggtgctgtgttctgacttttctctagctgcacagacaaaggctcttagagaggttcatgctcccactcttcttccttttacacttcccattgatgttcctccagcattttggcaatcttggtttctgtttggtcacttgttttacctttagagcattcagggaatagtctagagtgatttctaacattagcacaatcactatatatcacagttaattttgctaccaccatttacaagaatataggtaaaacattggtctctacccgctgggaatctaaaaaattgtatgtgctaagtgtcagtcacatggtcaacatgctgaagcacacccagctcaggttaaggtgctagatgaaccaggaaggagttaatactggctcttacttccagataatgcagaagggtgatgctgttctccagcactccatcagtgcaatctactggccaacgacaaggtggttaaaatgtcctttagtaggtatgaagacgtgatctgcttcttcagacacttatgcctgattagtgatgtagtttatgttagtgtctttgaaactgtaaataagtcaagtcaaatgtattaaattaagaacacagtctaactctgagtgtaagttttaaacccactcactatatggtaaatcttgcctttccttctcttatcaccaattttggaagtaagagaatcacagggttaagatgcttatatatatatatatttgactccagtcttgaagaaaaatacatgtaatcttatgctttattgcatacaatgaaaataaattttagatgtttatgttgttagatcagcgagagaaataaatgctttatgaccactttaaaaatatttaggaagtatataagattttaatagagaataatatctatcatacaaagtttataggataattttagactattttacttcctaaaattttcttactccttagtagttaaagcacaatatcctagtgtaggtgaaagttagttagagtagcggactcattaaaatcccaagattgctttggtatttttttttaagtaagttgtggttaatctttggggaaactgtatctagaaagtagataaagaagggaacaaagtagctatttgctttaagaaatatttgtatggtactctgtttttattccagtgcttggactagttgtcacattaatgaaaaaatgaccaactgtgtggctaaagaaacaagaattaaaagtgaagtaagcctcttgaactaagccttttatatgtttcacagatgaatcagcagatggctggcatgagtatcagtagtgcaacccctactgcaggttttggccagccctccagcacaacagcaggatggtctggaagctcatcaggtcagactctcagcacacaactgtggaaatgaaaactgcaatacaagtttcatccagaactaccacctgacattccttgctgaaacgcatctagttcccctgtttattcatatgcatattttttttctttttacccatttgttcatattaagaatgatctgattgaccgtgttggtctgtactgattcaatttgatgtggtgaaaagcaggttgataaatcattttatgtcaagggcagctttgctcatatttcccatgatttcatgtactgcattatttgagaagctgctcaacttgcaaaatcagttttcctctcaataaaattatagctctaatgtttgcatataagggaagtagttatcatgttagtaatacctctaatagtataaaccccaccccaaaattagccagtaatcctgtaggaaggtactgtatgatcaaatgtttaatcatataaatagaatgtaaatgtctcactgagcactgttttctagtgtatcaaaatgctcttatttcatcattcacttcactgtgctgttgttatgatgtgcttaacagggaacgtgattagtgaaaggaagataaacgtggatgttactccaaaacttcgtttaatgaatgcttaaagaattcaaattttatctgcctctcttgtaatttggatctcttcttaatgtacatagtgctaacatgaagacctttttctgcactatatgcaaacagggtaactaactaaaacaaagccactttcaatcttcaatccttgaaggtatatctaggtttatgacagtaattgtgtttacattttatggtgcctagtattgacaaaatgttatttccctacattaaacatgactccatagaccttttcatttgtgggtttttatttcctatgatgtatactgccactaaccttccaaaaattacttagtattgcaaagtcaggaatcatcaggaacgtttagctgacaaaatacttgtctgttttaaaaacctgttcaagtctaccaacctgttcaagtctaccaattataagggcaaattggagaaaaagaaaaaatatatactcaagagtggtatcttgcagtatcggcactgtacaaaaaaatcttccaatttagttgttgtagagaaaacatgcagaacaaatgaagacaaaacatacattttgtaccaaccatccaattagcttatgttaactgacaagctccatttaaacagatgtccatcagatgacaagaaaggctgctgtactgaagtaaaacaaacaatacctgaatgctctgtagcctaaactccaaacatcctcttccatatggatccactggctggacaaactgcaccagttgctgcttcaatttatacctcaattttcactgtgtccaggtggtactttggctcgttggctagattaaccttctctgtccgagtgtgccacacgagaacctgaaggggaaggaaatagcttgggtagcgcactcttcatggtgacactcgaggtcgggcagcacaagtgtaatgaataccttagtgcagttatttgctttcggttccagttcttcgactgttgttatctgtttgagaaagtcagattcttgcatccctggctgggatccacgacgcttaaatacagcttttggattggacaaaatgacttgaagacttacagcaaatcctttgtgaaaaataaaaaaaaaaaagagactttaaaa

SEQ ID NO: 11092 - DNA, 8925 bp, Homo sapiens
aggcctccctggaggtggacggtttcagtccacacatactgggaccccagggagacactcaccagcatccgagcctgccatgtttcagaggcaggtcgccgccggactccgacgcggccgggaaggcgacggtgtcctggaaggaccgatccacgcagacccgacactggggcgcggacgcacgaaccaaagcgcggggaaggaggcgtgaaagaaggacggacgttaaaagagcttctcgccgctgattggtcatcagaggagcacttcctttcacaggacgtgaaacgggggcggtttgggaagtttagagaccattctccgccgaccaaaacccctcaaaggattatcagacacgcgggtcggacggtccacatcagccggcagcccgggcgggtcccggggtgcgagcagcgcacttccggtgagctatttcgttttgtatccctccgccgacgtcaacgggaaagtagtgcggaccgctctctcggtggtccggggtggtacagccacgtgacaacgccaggccccgccttccccctcttttggttacagacgtgagggctctttggagacgtaaacatctccgagtggcgagggtgggcggggctgggcttgggaaagggcggggtggcttgcttgaggtgtggaaagaccagaagaaggtgaggtcaagagagtgcagaatgaggcattccaatggtgggtgggccctgacctgagagagtggcgcggggaggggtgaaagcgcggcgatcctggaacgccagcgggcgttgcggcctatgcgcgaggggcggggcgattaggtcatagagcggctcccagcgttccctgcggcgtaggaggcggtccagactataaaagcggctgccggaaagcggccggcacctcattcatttctaccggtctctagtagtgcagcttcggctggtgtcatcggtgtccttcctccgctgccgcccccgcaaggcttcgccgtcatcgaggccatttccagcgacttgtcgcacgcttttctatatacttcgttccccgccaaccgcaaccattgacgccatgtcgggttattcgagtgaccgagaccgcggccgggaccgagggtgagtttgggagccgagctgtcaggcctggcgggtggggggatgggagggcgggtcagggtggcggccggcgggggctttgcggcttggacttggcctttccgggctatcttgggacttcctttcccgaaggcttgcgccattttgatattcacgtcacagtgattggaagagatttgacggtgtagtgtcttcaagcttgctttttgtgtggggattggggagctgtcggggcggctgccatttggtagctgttgagggagttgagagggagcgtattgtgcggatgaaagcgggacgcttcgaggcagacgaaggaacatctgttaggtgcggcgtttcgggaggtgtttttggggtggccgggcattctgtgggagcgaggggaccacttccaaagccctggtgctgttggggtaggagggcggccggcatcagccatgtggctgagtcgcgagtacaaaatgccggcctcggacatggcggcggcgcctttgttaccccgcccggcggaggagctcaaaatggcagcgtcgagaaaatgtggcgcagagagaaatgcgagacaaagggggaagcgccgccccagcgggaacgccgcccggccgactccgcccgggccgggactcctcccccggtagtcgccggctcctccttttcttttttcctgcgttatataattttgattcgttgatccggagctctaccgcggcgttcccccagctgggtttgctagcagaagtgtttctgagaaaacccttgttctgttatcgctgactgtactgtttaggttcttaccactaaagctgtttggttccaaaacggccatatgagtaacatcgtcgtgatgctcttcggttcatgtagccttgttattgctgatagtgaattgctaggctggtggggaagattacagtaaccacaagaagtggtgtgtgccagaatcccaaattctggcatgtgggtgacaagtttccgacatgataaatccccggcttccgacatgataaatcccaggctgtttacatgacctaagtaatgtgtacttgggactacgggaaatgttaactgtggctgttgagagagagagagattttcacgaaggacagtgctaggtttacctctcgaagtctgttttcagtggtttttagcttgtgccaatggatgacaaatctatacagaaacctgggtatagccatttgaaaatgtgaataacgttttttttcattccaggtttggtgcacctcgatttggaggaagtagggcagggcccttatctggaaagaagtttggaaaccctggggagaaattagttaaaaagaagtggaatcttgatgagctgcctaaatttgagaagaatttttatcaagagcaccctgatttggctaggcgcacagcagtgagtaaattcatgtggcttcatcaggctgtaactcgatcgtggattctagtaaatgaaattctgacaggtgttttgcaaataactcaattttggtagagttacatgttctgacttcataattgggaaaggtgtgactcacttttggatataggtggctttgggatttttacttaaattaggttgagtataacaataaattttttttttcataatagggtgttcataggtgggtccagattaaaatgaaggctactttaaactagttactaaattatgaagttaggggcttatcaattacgtatttagctaggggtggttgtcatgaattttaagactgttataatttgttttgcagcaagaggtggaaacatacagaagaagcaaggaaattacagttagaggtcacaactgcccgaagccagttctaaatttttatgaagccaatttccctggtaagtgctacttttcagttctacctacccgtgtttttgtttccacctaccccctctttttcttggcatcactaatttttactaaatatctgttactaattatagcaaatgtcatggatgttattgcaagacagaatttcactgaacccactgctattcaagctcagggatggccagttgctctaagtggattggatatggttggagtggcacagactggatctgggaaaacattgtctgtaagtttgggagaactcttgagttgatctgatatatgcaagaaaatgtaatggtaatttaaaaacgagtattttaatgtgatttctgtttgtccccactttcaccctaaatagtatttgcttcctgccattgtccacatcaatcatcagccattcctagagagaggcgatgggcctattgtaagtatatatttttaactttttattagaagcataatgtgtagattttagactacatagctaaagatgtaatcatttgtggtggttttatatagaggttagctcaccctattcagctggagctgttttgggtattggacaacacatgaagaaaggatctgctagtataataagttagcagtttaaaactagtatccaggtttgtgctgaaagctgtttctctttccttagtgtttggtgctggcaccaactcgggaactggcccaacaggtgcagcaagtagctgctgaatattgtagagcatgtcgcttgaagtctacttgtatctacggtggtgctcctaagggaccacaaatacgtgatttggagagaggtatgtaatgaaaagggttttatttgtcattggtgctaaatatcctaggtattgtagttacacttacgtatttaattaaaggtgtggaaatctgtattgcaacacctggaagactgattgactttttagagtgtggaaaaaccaatctgagaagaacaacctaccttgtccttgatgaagcagatagaatgcttgatatgggctttgaaccccaaataaggaagattgtggatcaaataagagtaagtgtcctttgaaatatgtgatcaaactgaattgtgttttcactcttaagagtctgatactaatttttccccccaaaatccattagcctgataggcaaactctaatgtggagtgcgacttggccaaaagaagtaagacagcttgctgaagatttcctgaaagactatattcatataaacattggtgcacttgaactgagtgcaaaccacaacattcttcagattgtggatgtgtgtcatgacgtagaaaaggatgaaaagtaagttttattaactctgttatatttgcttcctaacaactttgctgtaaaattgagggatcattgtttggtgagttgttttaggttatttcagttggtgtgatttcatttagttagcctactaatcctgaaaatttcttgaatccttcaaataatggctgtcaccatttatagctttcctatagaaggaattcatgtgtcccctggttgacttaaggaccaagggtcgaactgctcgataagtggattagcaggcgtttcctctttgacttccagccatgtaaattgaacttaatgttttgctgaccataaatgtgtggccctagcaatggtcttttaaaactcaggatttttcctttctctctcctattattagacttattcgtctaatggaagagatcatgagtgagaaggagaataaaaccattgtttttgtggaaaccaaaagaagatgtgatgagcttaccagaaaaatgaggagagatgggtatgtgtgagctcctccattgaagcagattgattaaaacagcttaggaaagggcaaacttggatcacgagcagtggatttttttcatatctgatagtgaatttaactttttcatttctggcgaaattaaagagatctgtgaccaaaagtggtcaagcactggagtctgaggttttcaatgtgagtttaataacacaacttgtcttttaacttaggtggcctgccatgggtatccatggtgacaagagtcaacaagagcgtgactgggttctaaatggtaaatatttcaaatgaagtatttttcccccttacttaacctagctagaattctgctcagataattgatcatgtatatgccttcctttgtagaattcaaacatggaaaagctcctattctgattgctacagatgtggcctccagagggctaggttagtacaaactcgcattcatggcttggtttcccagaagatctccatttaacttttttaaagaaagtttattgctttctttaacctgcattttttctaagttttttttcacataaaggtgctgtctttgtggcaaggcctaggcatgacaatcggaggactcgagggggatggaggactagtgatcggctggctgcttccagtcgattagagaggtgaaaaagctgaacgtgtgccagtaatcttcaaaaggcagaacatatcacctctgccccgtaaactgttctctccgagggaaaaaatggaagttatcctcacagttcactgccgtggtatttcttctgtcccatgctttgcatgactgccatggtacagccttgtttcaaactgttcactgtgatctgtgggtctttgagtttcagtgagtttgctgaaatgtcgaagaagtagttccaaacttcaatgttcaatgaaatttttgttcaagtttgaaatggagagagcagctttaaaaggtactaagccttttacaaattggtgagtactggcacatgagatctagagcaggagcaacttctcacacatagtaagtgggaaaagaaagtgctttgaaagttcctccctcacctacacagtagtcgtcatgtcgagacctgccagagagagacacattctcaagtgaatcctggcttcttggaagcgcttgcctagacgagacacagtgcataaaaacaacttttgggggacaggtatgttttcttgcagctgcggttgtaaggtcttggcaagacaagcagtgtggccagaattttgaacttctgatgaatgtgtaatgcaaaggaccttgtacatttttttgtttcaaggtcctcaaaatgagcacatgaagaggttgctgtgaaactttaagtggccctactgcgcagaagcattcagatgtcacttgatgatctgtaagggaacttgctgatttgggaatgtgcttagggaacacacattccttttgacagggtctgtcactgggtgggtgatgaattatacagatgacatgtgcttttttttcttttttcaacctcaatggtattcctacaggaaatggataaccattttaactgtattttttgcagcccgtaccttcttgggaatacaattgtctaactttttatttttggtctggctgttgtggtgtgcaaaactccgtacattgctattttgccacactgcaacaccttacagatgtggaagatgtgaaatttgtcatcaattatgactaccctaactcctcagaggattatattcatcgaattggaagaactgctcgcagtaccaaaacaggcacagcatacactttctttacacctaataacataaagcaagtgagcgaccttatctctgtgcttcgtgaagctaatcaagcaattaatcccaagttgcttcagttggtcgaagacagaggttcaggtaaggatgactgataggaaatgttggtagttacgagtcacatcgttgtctacaaatccatttaaatggtattggagggtgagtaaaaccttgaatgtgaaaacttaagctgaaaaattgtaaaaacatttcacgcctaccatgaatagatctgtttctttctgtccacaatgatttgtgtcatagacataattgatcaatttgcaattgttttcttgacaggtcgttccaggggtagaggaggcatgaaggatgaccgtcgggacagatactctgcgggcaaaaggggtggatttaatacctttagagacagggaaaattatgacagaggttactctagcctgcttaaaagagattttggggcaaaaactcagaatggtgtttacagtgctgcaaattacaccaatgggagctttggaagtaattttgtgtctgctggtatacagaccagttttaggactggtaatccaacagggacttaccagaatggttatgatagcactcagcaatacggaagtaatgttccaaatatgcacaatggtatgaaccaacaggcatatgcatatcctgctactgcagctgcacctatgattggttatccaatgccaacaggatattcccaataagactttagaagtatatgtaaatgtctgtttttcataattgctctttatattgtgtgttatctgacaagatagttatttaagaaacatgggaattgcagaaatgactgcagtgcagcagtaattatggtgcactttttcgctatttaagttggatatttctctacattcctgaaacaatttttaggttttttttgtactagaaaatgcaggcagtgttttcacaaaagtaaatgtacagtgatttgaaatacaataaatgaaggcaatgcatggccttccaataaaaaatatttgaagactgaattaagtggaaattgtactttattttatataatgtcatgtaaaactttgcttaagatggtctggttttttttttgtttttgtttggttttttttttccatgaaaacaaatgactgttcctttttatttaatttgggaggcagggggaatcagaaggcccttctttataatgagctattcatattgcaggagtcagaatgaattgatacaggtgaatttttagttacaggctaaattgcataaaagctttgtcagcttccagcatcaggggagtcatttaatagcctttttccttatttgctagtatggttaaatgagaaaatagtaaaatagatacaaagtcatctatatagtgtgagaacgtgggtgactttttcaaagtttataatttaaaaagctccaaataactggctttttcaagagacttatactcatgctcttggctatactgtgaattactgaaatgttgaacaaacctgtgaaagacatacattagccctttaagatggccaggagctaagcttgagtctcctttactgaatttcgttcttagtgcaggttacttgtagattctagtcttcacaggctccctggggctcttaactagtcacactgggagtcatgaatgtctttccaataattcagggaattctagagatcctcaaactgtaaggtctattcatactcaacacaaggaaaaaacctcattaaaattaatgactaatcaggaggcaacgtaaccaaaagcacagtgaatgaaagttttcatggtaggttcaacatgggtttattgctagaaagatccaggggatagctttaggtttaacttcggctcaccaacgtaactttctaatcatttatttcagtaatagctagaagtgggtctgaatgttttcccagagtctgatacgtgtttttttttgccagaagagaggtcttcaggagacttcatttaaattctgattattaaactgaggctttaattgatgttaatgccttatgtcaaatgtaaagttagaatttgctagggctgggatagggagtgatatttctaggacttagacattgaaaactaattcagcctgtagtaacctggatggttttcaatggcatggttagtcaaattcatggttttaaacttagaagcagctttcgggggagagggtaggttggagcatttattacatattttactgtttaatgtcttaaccgtgggccttttaatttgtaaacactgaaatgattgttgggctgtggaaaacatttacctatttaccttggaagttttaaaagacagtccactttttagcatgtgtgttgtgtccagcctgtggtcgtcttaactaataaatgtgatttttctcccca

SEQ ID NO: 11093 - DNA, 622 bp, Homo sapiens
tggcttgttgggatccgttgagtgatgggagagtgtgctctttaacttcggagagagatgcgctctcgtgtagccgtcagggcctgccataaggtctgcaggtgcctgttgtctgggtttgggggtcgagtagatgcggggcagccggagctgttgacggaaaggagtagccccaaaggagggcatgtgaagtcgcacgcggagctcgaggggaacggcgagcacccagaagcccccgggtctggagagggaagcgaggcgctgttagagatctgtcagagaaggcatttcctaagtggaagcaagcagcagcttagccgggattctcttctgagtgggtgccaccccggcttcggacccttgggcgtagagttgcggaagaacctggccgcagaatggtggacctcggtggtggtgttcagggagcaggtattcccggtggacgccctccaccacaaaccaggccctttgctacccggggacagtgccttcaggttagtttctgcagaaactctacgcgaaatcttgcaagacaaagagctgagtaaggaacagctagtagcatttcttgagaacgtattaaaaacttctgggaaactacgggagaaccttcttcacggta

SEQ ID NO: 11094 - DNA, 7873 bp, Homo sapiens
tcccggtcgagatgttggtgattggggacgacagcgccttcactgtcctgaagaagccacgccggcgggtgctgtgcggcaccgtgcttatacacaaggtgggcttccaccggggaccgtggagactggccagccctttccagccttcccttgcctggcagcacccagtaactggacctttccagcccttccccaagaagctagttctttttctccagtgttccctgatctcagaaggccccgccatcccctcagctacctaagcccagatacaggcattttcccagactcgtccccttttcttctccacacccaatcagttgcccggtcctggtgcttctcctcccaaatgtacaacacacatccttctcagaccccgccctcctgctttgccttggttcaggggtcatctactcatgcctgatggctgcagccacctcctcactgggctcccctgcctgcttcctgccttctggccttgctcatccattctccacactactgccagaggtgtctttttaaaatgtgtatctgactaggttattcatccactgaaagccttcttgggtgcctacaatcaatacaagccctcaccatagctccctgactccccaccttcatctcccatcatccctgccttcctcttttttttattttcttttatttattttttatttatttctttattttttgaggcagagtctcactctgttgcccaggctggaatgcagtggcgcgatcttggctcactgcagtctccgctgcccaggtttaagtgattctccttcctcagcctcccgagtagctgggattacaaggcgcctgccaccacgcccggctaatttttgtatttttagtagagatgtggtttcaccatgttggccaggctggcctcgaactcctgacctcaagtgatctgcccgcctcggcctcccaaagtgctgggatgacgagcgtgagccaccgcgcccagccatccctgccttcctcttatggtctattcacgccagctcctgtacctgccaggctatggatcatctctggctttgcttatgcagtatctgtggcctggaaaattctttccttgtccagcctccttttggcctggctaactcctaccattctacagaggcccagctctgatgtctccccacctggaaggctctccctgatctccatctccccactaccctgagctggttggcagccagtcctagtgtggactccatcactgtaattaccacctcacataaattttcaatttatgggtatctgcttccctagcctctccccaggctgtgagttcttgaaggtggagactgtgacttagtcgccttttttccttttcagcatatactagatgcttggtaaaaattgggtggatggatggatggatagatgggtaaagtgacccaaaatagcaaggctatgggagagagaactctggaactctagagttgggaaactggccacccactggctgtgtgacattggacaagtcaccgcccctctctgggtccatttccccatttgtaaagtctcttctgactccaacagactggaattcttgaagattcctggcaggtacactgtgaatgaggggagtttgctcttctgccctaaatgtgatgggccaggttgagtgtgaaaatcctgaggttcccccttcccaacaagaaattcatcccctgcctgtcttctaccccacatggtacagtgataccctcccccctggggcttttacctctttgtggctgcaggtggcaggtgctctggctgaggctggtgtggggctggaggagatcgcaaagcaggtgaacgtggtcaccaaggccatgggtgagtgctggcctgggagctggggaagagagtggggaaggttggacagccctggggcgaggagcaggttcctgttggctgcctagcggtgctccccaggttattccccaggggtctagggagtgtatccctgggggagctcctggggactggtggccttgggtaccatggctgaggtggagagtctggcagcctttctcagagaagagggtacctgtgggcagggcctctgagatgctgctgccacccttcctgatgcccagtgctaagagtggaacagtcatcccttcatgccttgtttctcataggtaccctgggggtgagcttatcctcctgcagcgtccctggttccaaacccaccttcgagctctcagccgacgaggtggagctgggcctgggtaagcttgtggccatccatcccagccctgcctgctccttggccctggactttgcccaccttgcatacccttagagccatcaacctggtcctctccccaggtggtcttagtatttttacctggtcatttgaggcccagcctgggccaacctgcctgatttctacctgctttgctgtctatacccacagctttggccatgtggagctctgtgcactgcccacctcctagcctttgcctgccattcccaggtcctcctgtccctgccagaatacacccttctttcaacggctattcaaagatcacctggctgcaaagctttctttcctcgcctgtgcttcctccttaactatctctagttaaagctatctccaccaccaggccacaagctcccagagaacagagatcgtgtttttcattattctgtccatttccatcccccactcccgcccacttactgtgtgagtccagcactgtgtgagtccttgataaaaacgatgagcaaatccccaggccttgagtgggtcagcagtgaccacatctatccgcagggatccacggggaagctggtgtgcgccggataaaggtaggtggtccctctggcacaggccgccctaaggccaaggccccccagatgcagctcattcctggctccctctgacagatggcaaccgccgatgagattgtgaaactcatgctcgaccacatgacaaacaccaccaacgcgtcccatgtgcctgtgcagcccggtgggtagcctctcgcccgcgtctcccaacccctcctacacctctggggaggagacgcccagagggtctcacctggggtgtcatgtctacccgcaggctcctcagttgtgatgatggtcaacaacctgggtggcctgtcattcctggaactgggcatcatagccgacgctaccgtccgctccctgggtgagccatgcactgggaaggggatcctacagccctttggaaagggctgagggagggtcttgtgatggcagagaacacggactgtgcgtcagataagcctgagttaaatcgtctctctgccacctaattgccggataccttgagcctctgtttgttttcttgtctgcaaattgggggtaataataatggtacctgctttataccgttgttttgaggattaagtgagattaaacatatgtaagacactcaacacagcgcccagcacctggcacgaactgagtaaatgagacctgtaattactcatcttccccgacgtaggggacacctccagggaacgtggtcatttgtggggttattgagggatgcctgccaggaggaaatcaggacatctccctcccgacctcagagccccagcttccaaggtccttgcttttctgttgttttctttccctgatgcccatttttcccttttggactgccacactctggtattgcagagggccgcggggtgaagattgcccgtgccctggtgggcaccttcatgtcagcactggagatgcctggcatttctctcaccctcctgctggtggatgagcctctcctgaaactgataggtgagacttggaacctggggtcacccaagccagggctccttgtaactggaaggagccagggagacttggagaccccgtcagggctgaccgtgacaatcagggctctggagcctgtgaagaaggctcttcctgggcttctccagccttctccagctctcactggactagaaggagttggtattaggatcctcctcagagaggcctgaccctttcccagggaccctctctccatacccctgtatacagtaggcactcagtccatgcttgtcgaggtggactcccttcctccagggctgctgagaaagccaggccaccagggtcaggatgggagggtccaagccctgctgaatccctggctggacagccgtgtctaagagagttatcttgctgcccttagatgctgaaaccactgcagcagcctggcctaacgtggctgcagtctccattactgggcggaagcggagccgggtagcccctgccgagccccaggaggcccctgattccactgctgcaggaggtaccaacccctgcctttggggaagggacaggcttcccaaaggatgcaggagtatacggtggggcgggtaggggccctggcacccacacctcccaccatagtcaagtgtggttgtgagaagggcctggtgggcctgttcttcagcatcctccctttctaggctcagcctcgaagcggatggcgctggtgctggaacgggtgtgcagcactctcctgggcctggaggaacacctgaatgccctggaccgggctgctggtgacggcgactgtggcaccacccacagccgtgcggccagaggttggtgccagggactttgccaagtgaggtcattcacaaaaccttagccccccttccacttgtttccctgaaggcagggaccttcctttttttttttttttttttaagaaggaatctcactctgtcgctaggctggagtatgcaatggtgtgatctcggctcactgcagtctccgccccccgggttcaagtgattttcctgcctcagcctcctgactagctgagataacaggcatgcgccaccacgcctggctaattgttgtgtttttagtggagacggggtctcgccatgttggccaggctggtctctaactccccacctcaagccatccgctcgccttggcctcccaaagtgctgagattacaggcatgagccaccacacccggccgacagggaccttcttaacaccacaaatgtatgaggttgttatcttagaattaaatgaaatccttcacagtgaataacttacaactcaaggcgaacttattctgttgtccttatttttctcagtttacccagaccagtgaaaagctcttaactgtccagcatcattcattcgagaaaaaggtatttggtgcctgccgtggggcaggcactgctctcagctgtggatacagtagtgaacagagcagacagaaatcactgccctcatggcttatgttctaggtggaagacagtcaaccagataaatcagtaaaacacagaggatgttagcacaaagggctaaggagaaaaaaaccaagccagggagcagagtacagagcgtcaagtggagggcttcggggcaggcctcacctccccaggcccctttcggttacgcagcccagcccctctccagactgcacactggatgtggaaagggatcttgggaagccttcattccacttccctgtcggccttttccagccttcattggtgctggctggaagtctggcagatggagggaggatctctgaattcctccccatctctctctgcctgcagcaatccaggagtggctgaaggagggcccaccccctgccagccctgcccagctgctctccaagttgtctgttctgctcctggagaagatgggaggctcatctggggcggtgggtgcctgggggctgaagggctgacagggaggtggctgggctggctggggtccaggccagcaccacatgctcagcgttgtcatcttccccagctctatggcctgttcctgactgcggctgcacagcccctgaaggccaagaccagcctcccagcctggtctgctgccatggatgccggcctggaagccatgcagaagtgagccagagccctgtgcatcagaccaggggtgggctgggggaggtgtttggtgacatctgcgccctgccaggccctagcccaaccctcagagtgattcccttggttccctatagtgagcctctttcactctctttccctgccaggtatggcaaggctgctccaggggacaggactatggtttgtactcaggctgtggcctcagacctttctccttttggccctgtaagtctaaagagcaccctcggttgcagggcccgtgctcagccccctttccttcaccttgtccagctggattctctgtgggcagcggggcaggagctccaagcctggaagagcccaggagctgatctgttacaagtcctgaccaaagcagtcaaggtgagtgaggctgggcccagccacctggggagacaggcttctagccagcagactcctgtctccatgtgaccctgagcaagttaataaccttcctggaccgcagtttccttctctgtacaatggagatgagcacctatctcagaaggtggttatgtggctaaggaaatatatagagccccgcacactgcctgggatgtgacagggcctcagtgaatggtgacccttttccctgctggaagtagatgagaagtgactttccatttggtgacagagcagagggtgctggcagagccagggcaagggcgtgcagggccaggctgcacggcagagacgttctgcccatggcaggaaggaggcggcctggtgatctgcccttgaacctgctcccacaccccatcccccagagtgccgaagctgcagccgaggccaccaagaatatggaagctggagccggaagagccagttatatcagctcagcacggctggagcagccagaccccggggcggtggcagctgctgccatcctccgggccatcttggaggtcttgcagagctagggtgtgtgactgcctcccttggcctcagctcctctcactgctgtgctgaggtggcctttgtcacttccttctgccttccaaccctcaccttcccccggcctggccccattggcccaccctctaagttgagcaggaaatcctccaccaagcttccagaactacagacagcacccagagtgagctggagtgggtccccatgcctctccagcatgccctttccctttgcaggagggtggagtccctgggtcatgccctcccctgccagctctgggcttcagagataaggcattttccttgtgcagcctttacctggcaatcctaatttggttttaagactccctgtgaaatgctttccgcaccttaaccccagtgagcgtgaaaaagaaagttaataaactataatacatggaagcaagaaagacactgcctcctctgagggaccttttcccaagcatgtaaacaagggggcccacagccctggctgcaggcatcatgacccatcttctaccaggcagatctttattacctgaacccctaaggcagtgtctcctcacctgggctgcttccacctcagcccccgacccatcccctttccagtacacacacctgatgcatgtgagaatggtagaggggcttttctcagcattgaattaataattcagtggctcctcgggagtcgaatgggcatttgggacaccagaaggaaaagaaatcatcatagtctaaggttcagttgtagatcaaaaaatgcagccaggccgggcacggtggctcacacctgcaatcccagcactttgggaggccaaggcaggcggatcccttacactcaggagttcaagaccagtctgggcaacatggtaaaaccctgtctctaccaaaaaatacaaaattagccaggcatagtagtgtgtgcctatagtcctaacttgggaggctgagttgggaggatggcttgggcccaggaggtcgaggctgcggtgagccataagcatgccactatactccagcctgggcaacaaagcgagaccctgtctcaaaaaaaaaaaa

SEQ ID NO: 11095 - DNA, 8091 bp, Homo sapiens
ggcctggcccgggagcaggcccgggctgaaggcatcccggtggagatggtggtgattggggacgacagcgccttcactgtcctgaagaaggcaggccggcgggggctgtgcggcacggtgcttatacacaaggtgggcttccaccggggacgtggagactggccagccctttccagccttcccttgcctggcagcacccagtaactggacctttccagcccttccccaagaagctagttctttttctccagtgttccctgatctcagaaggccccgccatcccctcagctacctaagcccagatacaggcattttcccagactcgtccccttttcttctccacacccaatcagttgcccggtcctggtgcttctcctcccaaatgtacaacacacatccttctcagaccccgccctcctgctttgccttggttcaggggtcatctactcatgcctgatggctgcagccacctcctcactgggctcccctgcctgcttcctgccttctggccttgctcatccattctccacactactgccagaggtgtctttttaaaatgtgtatctgactaggttattcatccactgaaagccttcttgggtgcctacaatcaatacaagccctcaccatagctccctgactccccaccttcatctcccatcatccctgccttcctcttttttttattttcttttatttattttttatttatttatttattttttgaggcagagtctcactctgttgcccaggctggaatgcagtggcgcgatcttggctcactgcagtctccgctgcccaggtttaagtgattctccttcctcagcctcccgagtagctgggattacaaggcgcctgccaccacgcccggctaatttttgtatttttagtagagatgtggtttcaccatgttggccaggctggcctcgaactcctgacctcaagtgatctgcccgcctcggcctcccaaagtgctgggatgacgagcgtgagcccccgcgcccagccatccctgccttcctctttttttttttttttttttttttttttttttttttttttgagacggagtctcgctctgtcgcccaggccggactgcggactgcagtggcgcaatctcggctcactgcaagctccgcttcccgggttcacgccattctcctgcctcagcctcccgagtagctgggactacaggcgcccgccaccgcgcccggctaattttttgtatttttagtagagacggggtttcaccttgttagccaggatggtctcgatctcctgacctcatgatccacccgcctcggcctcccaaagtgctgggattacaggcgtgagccaccgcgcccggcccctgccttcctcttatggtctcttcacgccagctcctgtacctgccaggctatggatcatctctggctttgcttatgcagtatctgtggcctggaaaattctttccttgtccagcctccttttggcctggctaactcctaccattctacagaggcccagctctgatgtctccccacctggaaggctctccctgatctccatctccccactaccctgagctggttggcagccagtcctagtgtggactccatcactgtaattaccacctcacataaattttcaatttatgggtatctgcttccctagcctctccccaggctgtgagttcttgaaggtggagactgtgacttagtcgccttttttccttttcagcatatactagatgcttggtaaaaattgggtggatggatggatggatagatgggtaaagtgacccaaaatagcaaggctatgggagagagaactctggaactctagagttgggaaactggccacccactggctgtgtgacattggacaagtcaccgcccctctctgggtccatttccccatttgtaaagtctcttctgactccaacagactggaattcttgaagattcctggcaggtacactgtgaatgaggggagtttgctcttctgccctaaatgtgatgggccaggttgagtgtgaaaatcctgaggttcccccttcccaacaagaaattcatcccctgcctgtcttctaccccacatggtacagtgataccctcccccctggggcttttacctctttgtggctgcaggtggcaggtgctctggctgaggctggtgtggggctggaggagatcgcaaagcaggtgaacgtggtcgccaaggccatgggtgagtgctggcctgggagctggggaagagagtggggaaggttggacagccctggggcgaggagcaggttcctgttggctgcctagcggtgctccccaggttattccccaggggtctagggagtgtatccctgggggagctcctggggactggtggccttgggtaccatggctgaggtggagagtctggcagcctttctcagagaagagggtacctgtgggcagggcctctgagatgctgctgccacccttcctgatgcccagtgctaagagtggaacagtcatcccttcatgccttgtttctcataggtaccctgggggtgagcttatcctcctgcagcgtccctggttccaaacccaccttcgagctctcagccgacgaggtggagctgggcctgggtaagcttgtggccatccatcccagccctgcctgctccttggccctggactttgcccaccttgcatacccttagagccatcaacctggtcctctccccaggtggtcttagtatttttacctggtcatttgaggcccagcctggccaacctgcctgatttctacctgctttgctgtctatacccacagctttggccatgtggagctctgtgcactgcccacctcctagcctttgcctgccattcccaggtcctcctgtccctgccagaatacacccttctttcaacggctgttcaaagatcacctggctgcaaagctttctttcctcgcctgtgcttcctccttaactatctctagttaaagctatctccaccaccaggccacaagctcccagagaacagagatcgtgtttttcattattctgtccatttccatcccccactcccgcccacttactgtgtgagtccagcactgtgtgagtccttgataaaaacgatgagcaaatccccaggccttgagtgggtcagcagtgaccacatctatccgcagggatccacggggaagctggtgtgcgccggataaaggtaggtggtccctctggcacaggccgccctaaggccaaggccccccagatgcagctcattcctggctccctctgacagatggcaaccgccgatgagattgtgaaactcatgctcgaccacatgacaaacaccaccaacgcgtcccatgtgcctgtgcagcccggtgggtagcctctcgcccgcgtctcccaacccctcctaaacctctggggaggagacgcccagagggtctcacctggggtgtcatgtctacccgcaggctcctcagttgtgatgatggtcaacaacctgggtggcctgtcattcctggaactgggcatcatagccgacgctaccgtccgctccctgggtgagccatgcactgggaaggggatcctacagccctttggaaagggctgagggagggtcttgtgatggcagagaacacggactgtgcgtcagataagcctgagttaaatcgtctctctgccacctaattgccggataccttgagcctctgtttgttttcttgtctgcaaattgggggtaataataatggtacctgctttataccgttgttttgaggattaagtgagattaaacatatgtaagacactcaacacagcgcccagcacctggcacgaactgagtaaatgagacctgtaattactcatcttccccgacgtaggggacacctccagggaacgtggtcatttgtggggttattgagggatgcctgccaggaggaaatcaggacatctccctcccgacctcagagccccagcttccaaggtccttgcttttctgttgttttctttccctgatgcccatttttcccttttggactgccacactctggtattgcagagggccgcggggtgaagattgctcgtgccctggtgggcaccttcatgtcagcactggagatgcctggcatttctctcaccctcctgctggtggatgagcctctcctgaaactgataggtgagacttggaacctggggtcacccaagccagggctccttgtaactggaaggagccagggagacttggagaccccgtcagggctgaccgtgacaatcagggctctggagcctgtgaagaaggctcttcctgggcttctccagccttctccagctctcactggactagaaggagttggtattaggatcctcctcagagaggcctgaccctttcccagggaccctctctccatacccctgtatacagtaggcactcagtccatgcttgtcgaggtggactcccttcctccagggctgctgagaaagccaggccaccagggtcaggatgggagggtccaagccctgctgaatccctggctggacagccgtgtctaagagagttatcttgctgcccttagatgctgaaaccactgcagcagcctggcctaacgtggctgcagtctccattactgggcggaagcggagccgggtagcccctgccgagccccaggaggcccctgattccactgctgcaggaggtaccaacccctgcctttggggaagggacaggcttcccaaaggatgcaggagtatacggtggggcgggtaggggccctggcacccacacctcccaccatagtcaagtgtggttgtgagaagggcctggtgggcctgttcttcagcatcctccctttctaggctcagcctcgaagcggatggcgctggtgctggaacgggtgtgcagcactctcctgggcctggaggaacacctgaatgccctggaccgggctgctggtgacggcgactgtggcaccacccacagccgtgcggccagaggttggtgccagggactttgccaagtgaggtcattcacaaaaccttagccccccttccacttgtttccctgaaggcagggaccttcctttttttttttttttttttttaagaaggaatctcactctgtcgctaggctggagtatgcaatggtgtgatctcggctcactgcagtctccgccccccgggttcaagtgattttcctgcctcagcctcctgactagctgagataacaggcatgcgccaccacgcctggctaattgttgtgtttttagtggagacggggtctcgccatgttggccaggctggtctctaactccccacctcaagccatccgctcgccctggcctcccaaagtgctgagattacaggcatgagccaccacacccggccgacagggaccttcttaacaccacaaatgtatgaggttgttatcttagaattaaatgaaatccttcacagtgaataacttacaactcaaggcgaacttattctgttgtccttatttttctcagtttacccagaccagtgaaaagctcttaactgtccagcatcattcattcgagaaaaaggtatttgtgtggccgtggggcaggcactgctctcagctgtggatacagtagtgaacagagcagacagaaatcactgccctcatggcttatgttctaggtggaagacagtcaaccagataaatcagtaaaacacagaggatgttagcacaaagggctaaggagaaaaaaaccaagccagggagcagagtacagagcgtcaagtggagggcttcggggcaggcctcacctccccaggcccctttcggttacgcagcccagcccctctccagactgcacactggatgtggaaagggatcttgggaagccttcattccacttccctgtcggccttttccagccttcattggtgctggctggaagtctggcagatggagggaggatctctgaattcctccccatctctctctgcctgcagcaatccaggagtggctgaaggagggcccaccccctgccagccctgcccagctgctctccaagttgtctgtcctgctcctggagaagatgggaggctcatctggggcggtgggtgcctgggggctgaagggctgacagggaggtggctgggctggctggggtccaggccagcaccacatgctcagcgttgtcatcttccccagctctatggcctgttcctgactgcggctgcacagcccctgaaggccaagaccagcctcccagcctggtctgctgccatggatgccggcctggaagccatgcagaagtgagccagagccctgtgcatcagaccaggggtgggctgggggaggtgtttggtgacatctgcgccctgccaggccctagcccaaccctcagagtgattcccttggttccctatagtgagcctctttcactctctttccctgccaggtatggcaaggctgctccaggggacaggactatggtatgtactcaggctgtggctcagacctttctccttttggccctgtaagtctaaagagcaccctcggttgcagggcccgtgctcagccccctttccttcaccttgtccagctggattctctgtgggcagcggggcaggagctccaagcctggaagagcccaggagctgatctgttacaagtcctgaccaaagcagtcaaggtgagtgaggctgggccagcaccctggggagacaggcttctagcagtcagactcctgtctccatgtgaccctgagcaagttaataaccttcctggaccgcagtttccttctctgtacaatggagatgagcacctatctcagaaggtggttatgtggctaaggaaatatgtagagccccgcacactgcctgggatgtgacagggcctcagtgaatggtgacccttttccctgctggaagtagatgagaagtgactttccatttggtgacagagcagagggtgctggcagagccagggcaagggcgtgcagggccaggctgcacggcagagacgttctgcccatggcaggaaggaggcggcctggtgatctgcccttgaacctgctcccacaccccatcccccagagtgccgaagctgcagccgaggccaccaagaatatggaagctggagccggaagagccagttatatcagctcagcacggctggagcagccagaccccggggcggtggcagctgctgccatcctccgggccatcttggaggtcttgcagagctagggtgtgtgactgcctcccttggcctcagctcctctcactgctgtgctgaggtggcctttgtcacttccttctgccttccaaccctcaccttcccccggcctgccccattggcccaccctctaagttgagcaggaaatcctccaccaagcttccagaactacagacagcacccagagtgagctggagtgggtcccatgcctctccagcatgccctttccctttgcaggagggtggagtccctgggtcatgccctcccctgccagctctgggcttcagagataaggcattttccttgtgcagcctttacctggcaatcctaatttggttttaagactccctgtgaaatgctttccgcaccttaaccccagtgagcgtgaaaaagaaagttaataaactataatacatggaagcaagaaagacactgcctcctctgagggaccttttcccaagcatgtaaacaagggggcccacagccctggctgcaggcatcatgacccatcttctaccaggcagatctttattacctgagcccctaaggcagtgtctcctcagctgggctgcttccactgagacccccgacccatcccctttccagtacacacacctgatgcatgtaagaatggtagaggggcttttcttagcattgaattaataattcagtggctcctcgggagtcgaatgggcatttgggacaccagaaggaaaagaaatcatcatagtctaaggttcagttgtagatcaaaaaatgcactcaggccgggcacggtggctcacacctgcaatcccagcactttgggaggccaggcaggcggatccttacactcaggagttcaagaccagtctgggcaacatgtgacaaccctgtctctaccacaaaatactcaattacgcaggca

SEQ ID NO: 11096 - DNA, 3254 bp, Homo sapiens
ggcttctctacccagggtcctgtctgtcggctgcaccatacgtccctgaccacaaggcatccacgtgcacaggagtatgcgcccagcagctgggaaggaggctgacctcagacggtggcctgtggatcccagctctgtcatttcctggctgggtgacctcaacctagtcaccctttttgagtcttgttttctcagattatgaaataggaaaaatttccttcctcgtgagataagcacgtgccattagctattaaggacacgcacataaatgagctgcatgtgaatccacacatgccattccatgaagacatcaaagagggatcatgtggatctttggtgccttccggttggcccctccctaggtctgtgagggtcagacctgtcctgaggcttttacaaattggcccagaactcatttaaccacagcatcatttcattagagggctgttattagagactgaatgtttgtgtcccccccaaattcctgtgttgaaaggctcacccccactatggtagtgtcaggacgtggggcctttgggaggtgatggggttatgagggtggagccccagagagtcctcacgccctttccaccatgcgaggttatggtgagaagatggtccctgaggaagctggcccttgccacaccccacctctgccagcgccttcatcttggatgtctacagcctccagaactgtgagaaataaacacttgttgttttagccacccaggctattatatttttgttatagcagcctgaacaaagacagctttgattcttaacatatttaatgaaactcgagcttcataaaccagtgaaatgcctacccctatggagacggggagctggtcatgggacccaggtgcctggaggacatcccagtggctttgaaggctccagccagtcaagacggtcaatattagcccttctgccaacatctggcaatgtgaggctggggtggacgttggcctgatgttgccaggagtaggatgctgatgctgccagagagtaggtgggctccaaaccccaggcttctcacttgcttactaagcacagcagtctgaagcttgggacctggcagtgcgtctttggagaaggcaaaaaagccacagcagcaacacttaggagcaagacccttcccgctctccaccctatttcctcccctgaagaagagcaacagctcaagctctagcatggcacagaacgctaggttgggccaggcaagcagccatggtggggccaggtgaagcaatgtgggtctcagcaaggaacccctctgaaggtggcagtggctcccagggctgctgcacactggacaccacaactttggcatcagctgcatggtgagctgcagagtggtcagaggggctggggccctgccaagagagcaaggccagacctgcccagcgggaggcaggaaggccctgatccagcaaggagaagtagaggaagtccacagccacctctgttactcatcgctactgggacatctggggacaggctctgttcttgggagagcaggtcaccaggatttgtagggctgcctgccggtgacagacacgtaagtcacagggaaaggccgggatcccaggcctcagctgtagcagcagctggaagaggtggagccgcacggtcacaatacatgcagacacagagcagcaatacgaaacagaacagctcagagcggtcagctcctcagcagaagctgcgtgggccgccactccccctttctgcaatcaccccatgatgtctccaccccacctcacatccagatggggctggatggcagagcagatgaagcctgctctgtggcggggcagcctaactgaaatgcacacctttatgggggaagtggacggacacctcacctccctcatgtttcacaccgtggactgcacttgagtcccagctcttcaccacatccctaggagtcttaagaggaaatcagtctgatttcttcagacaggagcagcaagagcggccagagcgaggaggacctcgtgtgaatggaggacctgagaggctgacgccaaggagtgcagaagccaaagccaccaaggaaagcagacaggcagcaagcagccagagaaggcaggcccagcacccaggcaaagccaccaaggaaagcagacaggcagcaagcggccggagagggcaggcccagcacccaggcaaagccaccaaggaaagcagacaggcagcaagcggccggagagggcaggccagcacccaggcaagaagtctgggcccagcattggaagaaagtcgcctgctgaaaccagccgggagccctgggaagagcagagcttcttgaggggagcacaggatgcaccaccacggagctcttgggagcccttgctgctgctcactacccatcatgcagcaggggctggaaaaacgagcagatgcccaggagttaatgacatgatccagaattacaccaggggcgaagctgttcagacagacccccagcctgcagggtggtccccatccaagccaccaaaatccctcagggaagccccaaagtccctgagcctggtacacaccccgtctccctacatcccatcaagacctgctctgagcactcagctggtcaccaggcacccatcccactagactagcccccaggctggtaaaggagaaatcacacacccttgtcacagtcaagcccttccttggggaagaagataaggccacacttcaccccacagaaccacagtgatttgggggggaaattctgtctcccaatggacagactggggagtcccagcatttcactgggatgcgctggtttgggaccagtgctccccatcagccaccctaactccaccctcaagttacttggtttcctgctgtgccacagggtaagtcttcttgtcaaggccccagcctttcgtgggagatccttctctagacctggccctgtcccaccctggaatgtgggactggaacccatacctgtctgtcggtcaggatccccggctctgggcgcttccaagatgaagccagaaggatgtagagcaccagcagcccaaaggccaccaccagcatcccggtgctgttggcaaagaccgcctcactgggcaggctgtggtatggcctggtggtgtttttcctgaagatgacaaaacaatgtgagccctcgagagatttttccacctatttttgtctagtgggagactcgatgtcactaacagagggtgagaaaaccttcccgggtccatatgtgatctagaattaaaacaccctttctt

SEQ ID NO: 11097 - DNA, 1244 bp, Homo sapiens
ctctgatcacagtggctttatctccatgaaggaggtgaagcaggctctggtcaactgcaactggtccttgttcaatgatgagacctgcctcatgatgataaacatgtttgacaagacctaatcaggccacataaatgtctacggcttctcagccctgtggaaattcatccagcagtggaagcagctcttccagcagttatgactgggacaactcaggctccattagctacacagagctgcagcaagctctgtcccaaatgggctacaacctgagcccccagttcacccagctactggtctccagctactgcccacgctctgtcaatcctgccagacagcttgattgcttcatccaggtgtgcacccagctgcagatgccgacagaggccttccgggagaaggacacagctgtacaaggcaacattcggctcagcttcaaggacgtcgtcaccatgacagctcggatgctatgacccaacccatctgtggagagtggagtgcaccagggacctttcctggcttcctagagtgacagaagtacgtggacctctctcttcttttcctgtccctctagaagaacattctcccttgcttgatgcaacactgttccaaaagagggttgagagtcctgcatcacagccaccaaatagtgaggaccagggctgaggccacacaggtaggggcctgatgaaggagaggatgaaagctgaatgtcccgacggccatgagcagttgagtggcacagcctggcaccagacgcaggagattctggtccttgtaatggagttagtgtccagtcagctgagctccaccctgatgccagtggcgagtgttcactggcctgttaccattagcacctgtgttccctcaccaggccatcctgtcacatgagcccattttctccaaagtggaatctgaccaagcatgagagagatttgcccctgggaccagtggcttggattccatcacacccataaatccttgggtattaacttctagctgcctggggctggccctgctcagacaaatctgttccctgggcatctttggccaggctactgcctccgcagctgggatccctcacttgcctgccacgctctgctcggcttccatctccaggggacagtggtcacctctccttgccaatactttttttaatttgcatttttttcatttggggccaaaagttcagtgaaattgtaagcttcaataaaaggataaaactaaaaaaaaaaaaaaaaaat

SEQ ID NO: 11098 - DNA, 916 bp, Homo sapiens
ccccgctctgccaatcctgccatgcagcttgaccgcttcatccaggtgtgcacccagctgcaggtgctgacagaggccttccgggagaaggacacagctgtacaaggcaacattcggctcagcttcgaggacttcgtcaccatgacagcttctcggatgctatgacccaaccatctgtggagagtggagtgcaccagggacctttcctggcttcttagagtgagagaagtatgtggacatctcttcttttcctgtccctctagaagaacattctcccttgcttgatgcaacactgttccaaaagagggtggagagtcctgcatcatagccaccaaatagtgaggaccggggctgaggccacacagataggggcctgatggaggagaggatagaagttgaatgtcctgatggccatgagcagttgagtggcacagcctggcaccaggagcaggtccttgtaatggagttagtgtccagtcagctgagctccaccctgatgccagtggtgagtgttcatcggcctgttaccgttagtacctgtgttccctcaccaggccatcctgtcaaacgagcccattttctccaaagtggaatctgaccaagcatgagagagatctgtctatgggaccagtggcttggattctgccacacccataaatccttgtgtgttaacttctagctgcctggggctggccctgctcagacaaatctgctccctgggcatctttggccaggcttctgccctctgcagctgggacccctcacttgcctgccatgctctgctcggcttcagtctccaggagacagtggtcacctctccctgccaatactttttttaatttgcattttttttcatttggggccaaaagtccagtgaaattgtaagcttcaataaaaggatgaaactctggagttc

SEQ ID NO: 11099 - DNA, 3396 bp, Homo sapiens
ctcagatcacattggtatatctccatgaaggagctaaagcaggcctggtcaactgcaattggtcttcattcaatgatgagacctgcctcatgatgataagtgagtctccgccttgcccttgggcctgagctggggcagagccacctgatagtggacagtaggtgggtaggtgggtgggtggacattctgaagagaaattcattgaccagggaggactgtggggaggaagctaggttcagggtgagatcccctagactgagagctcttttcctgagatctttcttaagttctagaccctgcctagttacaggttaacttagtttcctcttctgtagaatggtactccctcccctgtaggaaacagcagggaggggtcaggtgccaagcctgcagagaaaatgcagttctggatggggtggggctaaaggtgtccagagtaggaggacggtgcaacgcttgatgtgggtgtctcaggtgcaggcatctgggcctcagggcttggttctgtgaagtcgcctactccagcctggagagaagggctgcctcaatgggtcctgagggggacccttggccttcagtcttgaagccttcctcccctcctttccctcctcaccttcagacatgtttgacaagaccaagtcaggccgcatcgatgtctacggcttctcagccctgtggaaattcatccagcagtggaagaacctcttccagcagtatgaccgggaccgctcgggctccattagctacacagagctgcagcaaggtgcgggtcatggccggggcacgatgggcaggacagagctagactcttctctttacaccctaagatacaacaaaggggtttcctcttgttaccgaatgtccacctgcactacaaaatgctgttctcagtgcaggcctgcatccctcaccccttctttgacccagctggggcactgagccaagagccagggcaaggaaacacctgggtccagaatcagggctggaccctggagtgctgggtgagacggccccagccacagggagccttaaggatggaaacttggcaccttaaggactatgagaccagtgtgtgtggcttgggtgactcctttctctccagtttctagcatgtagaatggaaagagccctgaacagggctcagaaagatgggtctgttgccacctctgctagtggacagtttctttcccaacttttgggaccctgagcactctaaaagttgcagttggggaagatgacctgaggccacagccccaggtctggttccaaactgactgtgtaaggcagaaggccacagtttgggctcaggcaggttagtaagaggttgggggaggacccaagagggagctttgccacccaggagggagaaagggctccccagagagtctagtcctttgcccaggctgtggatttcattcagactaaggaggtctgtgggcaggagtgagtgcaccacatctgcccccagtaaaagggaggggagatgacctatagtaatcacctactcttgccagcttttgtcgtggatattagtaagggtgatattaaccacaacaaaacgtatttactgaatgcttgctatttttaataggcttatgtaattcattcttcccatgtgctaggtactatttataattccacacccttcaatgaagaatcccttataatctcccttttaccggtgagaaaactgaggtttagtgtaggtaacctgcccaagggcccgcataacaaatggagagctgaggttttagcctggcctggtaagttctgaacagaggaaggaaggaagcatcccagtgaagagacaggatgctccaagagaccttggagtgacagtgactttattaaaatagcatttaccaagtgctttttctgtgccagtcactgtgctaagtgctttacatgatcacccgttttaatccttactagaacctacaagttaagtattatccccattttagagatgataagatagggatagtgaggctaagcaacttgcccagtggctgactccagagcaggtcctcatacctctgctgtactgcctctgatgtctgccccaggcaaggtggtcctgggagctcaggcttccttttggaatgcaaacgaatcagagatgattgcggatagtccgttgtcgtctctgcaatcccctgagcctcagttgaagagacaataatggagatttggagaaagagggatgagggccttccacctaaggggagcatccagacacggtccctgttgtgtttctgacatcttagacagacccttgggatttctctaccctctttgtgcttctgtgcccatcctctcgaagttccttgaactgttgtgatccagtattcctgattgatggaggtgctcatggcaggtttttgtgtgtctggtctgtgtgcccctcttctccagctctgtcccaaatgggctacaacctgagcccccagttcacccagcttctggtctcccgctactgcccacgctctgccaatcctgccatgcagcttgaccgcttcatccaggtgtgcacccagctgcaggtgctgacagaggccttccgggagaaggacacagctgtacaaggcaacattcggctcagcttcgaggacttcgtcaccatgacagcttctcggatgctatgacccaaccatctgtggagagtggagtgcaccagggacctttcctggcttcttagagtgagagaagtatgtggacatctcttcttttcctgtccctctagaagaacattctcccttgcttgatgcaacactgttccaaaagagggtggagagtcctgcatcatagccaccaaatagtgaggaccggggctgaggccacacagataggggcctgatggaggagaggatagaagttgaatgtcctgatggccatgagcagttgagtggcacagcctggcaccaggagcaggtccttgtaatggagttagtgtccagtcagctgagctccaccctgatgccagtggtgagtgttcatcggcctgttaccgttagtacctgtgttccctcaccaggccatcctgtcaaacgagcccattttctccaaagtggaatctgaccaagcatgagagagatctgtctatgggaccagtggcttggattctgccacacccataaatccttgtgtgttaacttctagctgcctggggctggccctgctcagacaaatctgctccctgggcatctttggccaggcttctgccctctgcagctgggacccctcacttgcctgccatgctctgctcggcttcagtctccaggagacagtggtcacctctccctgccaatactttttttaatttgcattttttttcatttggggccaaaagtccagtgaaattgtaagcttcaataaaaggatgaaactctggagttc

SEQ ID NO: 11100 - DNA, 187 bp, Homo sapiens
cgggtagctactaccttggaccccccccagtagtggagggcagtatggcagcgtgctaccccctggtggtggctatgggggtcctgcccctggagggccttatggaccaccagctggtagagggccctatggacacctcaatcctgggatgttcccctctggaactccaggaggaccaaatgatggt

SEQ ID NO: 11101 - DNA, 975 bp, Homo sapiens
gatctgcccacctcagcctcgcaaagtgctgggattacaggcgtgagccaccatatctgacacatttataataaaaactactgcatttaattcctgcctcaaaatacagcctgtaaatcagacagtgtcttttttttctgagacagggtctctcattctatcaaccaagctggagtgcacctcattgcaaccttcaccttctgggttcaagcgatcctcccacttcagcctcccatgtagctgctgggactaaacgagcagaccaccatgcccgcccaatttttgtatttttttttttttttttagagacagggtttcatcatgttgcccaggctggtctcaaaatcctgggttcatgcaatccctccacctcagcctcccaaaatactgggattgcaggcgtgagctatggtgccaggcccagtgtctttttaatctttacttgctctgcattttaactctacgatcaatgaattcatggttcatcttatgtttatcttataacacacttcaaaagaaaggaaatatgatgttcaacctaacagtctttaaaacagagtataagttgcccctctgatacctcaggagtagaacttcctttcttaggcctgatttcaaaactacatattcactggcttctacttctcaactgttcttaaaactgagaatttggccaggcgcggtggctcatgcctgtaatcccagcactttgggaggccaaggcggatggatcatgaggtcaggagactgagaccatcctggctaacacggtgaaaccccatctctactaaaaatacaaaaaattagccgggcgtggcagcaggcacctgtaatcccagctactcgggaggctgaggcaggagaatggcgtgaacccaggaggcggagcttgcagtgatctgagatcgcaccactgcactccagcctgggcaaaagagggagactccatctcaaaaaaaaaaaaaacaaaaaaaa

SEQ ID NO: 11102 - DNA, 1182 bp, Homo sapiens
  SITE (579): n equals a,t,g, or c
  SITE (580): n equals a,t,g, or c
  SITE (589): n equals a,t,g, or c
  SITE (590): n equals a,t,g, or c
  SITE (595): n equals a,t,g, or c
  SITE (596): n equals a,t,g, or c
  SITE (599): n equals a,t,g, or c
  SITE (600): n equals a,t,g, or c
  SITE (602): n equals a,t,g, or c
  SITE (612): n equals a,t,g, or c
  SITE (617): n equals a,t,g, or c
gcagcccgtgcaccaccagcgggtccagctacaaacccagttgccaatacagcctaaggacgagcctgcccacaactattccagttccatttggcacagccaggggcagggacagaagggccctgcaggactccgcctccccacctctgcacagatcctctctcctttcccctaatactcccatcatcctccttttagcttcttagaggaatcagcagctcagcttagcttagatttagctgatcaatcccaaagaaggatgtggctcatcctcttggccatccctggagtcgcagcacacgcttggctggtgtgggtccacagaggttctcatgggtgggcccagcagaggggcccctcaggagagggattctagggagctagactgagacaagcctggccctgactgtcgcctcctgccttctggtcctggccattcctgcccctttctctctccagagcttgggaggagtcagaacattgctctagccgctggtgatctctcctggttgccaaccctcctggccatgactgatctccccactgagatgctcaggtgattaaacgagagcccagttnngatggcccnngtganncanncntggttacaanctggncaagggtaaggggtggggacaggggcaggaaaataagttctgagcagcccggaaataatgagtggtgactgcttctcggggctttgcctgccagcagcaccactgtgctctcctggtcatggtgcacggagggccagcaggtgtggggccctgccacaccggaacagcaggccacagcagccatgctgtccctcatacgcacacgccctctatgggctgcagagtgttaccatagcatctcgtaagcctcacttcccaccggtagtaggatattgtcactcatttaacaggtttgaaagccaagctgcccagggaagggacttctcaaaggtcgcgagtccagtgagtggcagaagggggatgtaaagccccagcccctctgatggagtgtccagcgctcgtcccgtgccctccacgcccctgtgtacccagctacttgtttattcatttggtttatacgtttggtcgttcattcatttggtcagtgcacattcttttatggccacacacctgctagggcagtgaataaacggatatggaggcaaatccactggatagtttgtct

SEQ ID NO: 11103 - DNA, 9947 bp, Homo sapiens
ctcagctgtggcctgggcctgtgctccaggccagggcggcccagggtggaggtggggtggggagcgtgagtcctcagaaagtgacagcagcaggcatgtctaacattttaacaatttagttaataagcgattttataccctttcctcctccactctcctgcttttgaatcaagggcaaggttaacacaagtgacctggcttcttgctttccagatcctaaccagtacagctggggagagaactatgcaggcagctccgggctgatgagtgcatcacccgagctcggcccggcgcagcgggcgcggagtggcactgtgagtagtgggctctggccgccccgggccccaggggagcagcctatgccgcactcacctcgcctgtccctgagcgaagcctcttgtggctgtcccggctgaaaggcgcctctgcccatggcgaatcctcccatggacctggggtataactaggggcaagagaaggacactgtggcttgctttcccatctccctcattgggtgctttcgtattttggaaacattcagcaggaattacggagtctgtgtgatccggccttcttgtttgcagagagattgctaaagttcaggggtgacggggacctctccccacgccagaaggcccgtccactttggagttgaaacccgaaaccgcaggagccacccagggccctgcctaggactgcgcgctctgccgcacactgccgcgcactgtggctgatggtctgtcggttacagtctgctctcctcggggtgtcccggctcattccttggatccccagtgggtttgccctggcctgagctgggtggcactggcgggctaggagacgcaccccatgtctgccgagttggagctgctccggaagggtcccccgccaggacctgcgtcagccacgggatgcccccagcacagccccacatggcaggaaccgccccgtgtcacaggctgtcagggtcctcgaccgtgcccccccgcggggctcattccttctgtagctgtgagcagttaacctgaggtcacgcacaaagctagtcggacccctcaggacaggccgctggcattgttggcaggaagttgcttgtcatttgtagacatggggttcagtgtcagtattttcaagaccgcgacttgttgagttttggcttctcaggagggcgcctcccttttgtgtgggtcctgcagttcacaccaggccacggcctcgcacagacgcaccacactggccgcagccctggtctgcctttcccaccgccagcactaggcaggggagtgggggcgaggctctgggggcctggcagagccccaggctctcagcttttgccctgctgttgggcagaggggcttggtgtcttccagcctcagtttctgatttgccaagtgtgcataatttgccaaatgtcctggactgtaacctggagtgactgcgtggacggccacagtgcttcgggggccccgttcaggaggcgcttgttacctatttggtaccccaccagtggcacagccctgccaggcaggaggggcccccaccttactgaggatcaaactgacatgcagagagatggagtcatttatttcagtttatattgtccaaaaaagtcaaagcgaagatttgaacccatttgtcaggatagaaggagcctgcgacctggcaaggcagcaccaggcgatcccggctgtggtccgtggtagttaaggtggggctcctgccgccttctgcactggctttgggaagtcactggctttttccacgtggagcttctgcccggcatgggcttcccacctggaaggcgtcccctttgctctggaggtccctgcccacccagaggctgcttctccagccccaggggttgccagcaggggtgccccagtggagaagggcagagggccagcatgtgacctgtggggtagccaccggagggtgggaagaggcggtcagctacacagttcccctcatagcccctctggtcccagagcagcggctgctgcggtgagcgtgcagagagccgagtactgatgtgtgcgtcggctcagttcagttcacttcctcccggcataaggtagaaaaagccagcagggcccgtgagcgcgcctgtgctgggtgcaggtggccccggggtgccctgggtgcataatggcctggccctgccatagtccttcatggacagaacgtgctgggaggcccggcagccatggaggaagaagggtgcatgtggggcgtggggactccctgcccggcacggagtggaacactgcctggtgcttagtgaggacagaaccccaaacctctgtgtgcagacacggccacctggaggaccagaggtgggaacagtgtgactgcaggggtcacgggaggaggtgaaactgtaggggtgacagggaggggtgactgcagggaggtggtgatgggggagggagttactatagggatggtggaggaggggtgatgggagggtgactgcagcggtgattggggaggtgtggctgcagcggggaggtgctgggggcaggaggcgtgtggtgggagcagacgcaaccccagtgtcaaaccagggggtaagtcaaggtatccggctcaggccgccgggcagctgagggggcccagtgggggtctcgtctgtggcccagagacgtggcggaagaaggcagtacatctcccttcttagagagagagtggaagcttctgagtgtggcttgggtcgttctgaaccatggtgacgtttccaccctgccactgcctgtcttccagtttgacttgctggaaatggaccggctggagaggccactggttgacctgccgctcctcctggacccgccctcctacgtgcccgacacggtggacctcaccgatgacgctctggcccgaaaatactggctcacctgctttgaggaggccctggacggggtgagggctccgggtgccgtctagacgattccaaggccgcagccgggttaaccttccaaggctccgggggcaaagccaaggtggcgaagggggacaggccagtgttgtccagaaaccccttgatctgcgtctgagtgagggggcgattttggtttctcaggcaaaaataccgctcctggccacctggtgggtcagtgaggacgtggcgtctgcgaggcacgttgcttctaagggcagctgatagttctgctagctagcacattccttcaaaaagcaatttaggagacgtctctgctcttttgaggtgtgactgaggtgcgggaggcattgtgggaccctgactctgggggtggggtgagactcagccccagcaagctcccggcgaggccaccttgggactcctgcgtcccaccttctccaaggctgggctggtcccgtggagcaaatgccaggccctgggccacgctgcccctcaggagctcagctcggggccagggagccccggtagcaacacgcactcttcacgaagccctcggagaggccgggtcgtgccagggtttgtcctgagggaggagtcccagccctgcccaggacccggagtgagctctgagtgcccagagcccctcgtccccggcacaggatgggggctcgagtctgaggacgtgggtcttggcctcgggtttcctggggggtgagggaccaaggtcactcctgctcctgcctcccagggcaactgggaggggcgaatggcaaagggaagcctcgggtgaccgtgaactgtcaccgtcagcctttcctgttccagtagaaactgccctgaccacagcccaggcagcccccaccctgcccgagtcccccacagcaggccctgaccctgccccgggaagccccccatagctagcccccaccctgccccaaacagcccccgacagccggctcccaccctgcaccaggcctcctacagccgcccccaccctgccccagacagtcccccacggccgacccccacccttccccgagccccctgctgtcacgtggggattcgcaagcagcagggccagcgcttgactaaccccctccttctgtcgctggcaggtagtgaagcgcgcagtggcgagccagccagactctgtggatgcagccgagagggcggagaagttccggcagaagtactggaacaagcttcagaccctgaggcagcagcccttgtaagtgcccagcaccccggtgtgtggccacctcttccatccagagggcccctgcacctctgagaaagtgccgtgatgttggcattcggaccccagctcgctgggggtgggtgtgggccctggcggcacagcccccttggaccccgcctcaagcagcgtttgcactgccgggctcctgaggacgtccgtggcacagccgaggatggcagacgggcgggtgttcggcctgccctgctcagcgccctctgccgtgtctgtccccagcgcctatgggaccctgaccgtgcgcagcctgctggacaccagggagcactgtctgaacgagttcaacttcccggatccctactccaaagtaagtgcagtgtgccctggccttccgctcgctcttgtccccgtcccgctggcaccgcgtgtcctgtctctgtcccgctggctcggggcatcctgtcctgtctgaggccatgcaggtttggtagcggccccaactccagccctggcaccacaatagccagggcctctgttggcagcatctgctgaggagctgtgttacccccacagatgctggggccacttaggggtggggactgctgtgactagagaagaagggtgtgaaccccagtttggatgtgttcctgacagacacaggctgcctgcctgcaggagccaagggcctcccagcttctgtgagggtgggcgattgtggttggggactgctttcccctcatggggaggggctggaaccctggaccaccctggctccctcctaggaggctggacagtgaccagaggcctcctatcccggcaacgtgcagggccgtgcaaggtgggcctttccgggcgtccgttttgcttccccaagtctggcggccagagccctccttggccctttctgccaggaggcagcgggcagcagcggaggcatggactcctcccacctcttctgggaagggccagcgccatgcctccctcccctcacacgccgagccttgtgacagcggaagtctgggtgtcgagggttttgaggccagggctgtgggtacctgtgggggccgtgtcctccactcttgtcctgcccttcacccactgctcagtcacatgggggctgaagttgtcctgggcctcgtcctcagagccccgtgcagctgtgcgctggccactgtcccggaccgataggcttgtgcctggtggggtcccagttgggcctgagtcttcgatcctgaggggcgtggtatggaacaggctgcgcctggcaggtgtccagggtgggctgaggccacgtcttcactcaggcctggcatctggcactctccacaggtgaagcagcgggagaatggcgtggcgctgaggtgcttccccggggtcgtgcgctccctggacgcgctgggctgggaggaacggcagctggcgctggtgaaaggcctcctggcggggaatgtcttcgactggggggccaaagccgtgtctgcgtaggtgtctgcgggctcggagcaggctctgcagcctgtgggtgcctgtcctgccccaggcttgcgggcaaggaggtggagcgggtcccttgggggtcacgtggcgcttggtggcttggtggctcagggctttggggcccagggagtgcacatggcagcagcgccaggggctgggcagggcgcagcgcccttgtctgtcccctcaggttctgaggaggccccttccttaagcatgggtgccgcagaggcctaagggtgtggatttgaaaatcggggctggcattttctattgtcagaatccaaattcatgtttcctatgtgtggtaggaattaaacatttctgatgtgatgatcaaagggtgctttgcaaagcagtcccctagactggcctgtaggacacgcaggtgtctagcacctggcgccgtctcctggggctctgaatcttgaaaatgaacccccccaccatcatttaccttcactcccaaagaagctgcttccagtctctgggcctccccaggcggccgcaccacctctcgtggtccctgctttttttcatgtggggctggagggaaatgcctgggttctcagccctccctgggtcccactcgtgtctcgagacatagatgagaacgccgcctccaaccatggctgcccctctgggacacaggcccctcccgcagcctgtcaggagcattggaggagggtcctgacccatgggattggccttgtggctgggggctccccacaccgcctgcatgggtgccaagcacagggaccatactgcggctgccagtcaccgagaggcttccctggccccgtggctccgagtccaccttgagaaacagcctgtgctctctcagacctttgcttggtggccccctgagccttctgcggatcgcagcatgttaagaacgctgtatctgttctgcctgggagtgatttggggtcttcacgttgagcagctgcctctgtcccacctgggagggatttggggtcttagcagctgcctctgtcctgcctgggagtgatttggggtcttcacgttgagcagctgcccctgtcccacctgggagggatttgggatctttacattgagcagctgcctctgtcccgcctgggagggatttggggtcttcacattgagcactgtggctgaaggtttttgttctgttgtcttaattttcttttctcctcctccatgcagtgtccttgaatccgacccctactttgggtttgaagaagcaaagaggaagttacaaggtacggatggccaagtaacttggggccttgccttgtgctggggccatgcctggacgttctctgcaacagcgaatgcagttgcggtcggggtccaggcacctcccctgctcaaggctctgtcagctgggcttcgggggcggggagaacttgcttcctggagagacgaacacctgaagacgcgtctccctgacccctgacctggagcaccgggctaatcatgtgtccctctctctgtctcagaaagaccctggctcgtggattcctacagcgagtggcttcagagattaaaggtatgtggaggggcctcccacctctgctgctggggacacagcggggcccgggggggtggtcactggagggaggtgggcatgggctgcctcgggtggccctcccctcctgttagagtctcaccatcctgcgagccaagggtctcagcatcccctgccccacacttgccctcctgtcgtgactgcttcttaggtcacctgctctaggcacaaagccttgccagaagagacaggcactggcccctgcaggccaatccgtccctggcgcctctggggtcctgaagccccagtctcagcccctgcaggctggcccgtcccggtgcctctggggtcctgaagtcccggtctcagcccctgcagcccagcccagtcccggcacctctggggccctgaagcccctggtctcggcccctgcaggacagcccatccctggcatctctggggccctgaagcccccagtctcggcccctgcagggcagcgtgacgggcagcaggggtgcggactgactcgcttggatgcgcctgttcccaactgaacgtcctggttttgtcttacaggggccccctcataaatgtgccttaattttcgcagataacagtggaatagacatcattttgggagtcttcccctttgtcagggagctactccttagagggacagaggtgagtgttgaggtggtgggtggggcccttcccctgggcttctctgctctcggtggggttggcgccgctgtgggcctctggcggtggtcggggctcctccggacgcagcaggtaggtgcaggcagcagcacgggggaggcggcccagagccgtcatctgctggggtggaggctccgagccccctgggctcaggctgagggtccatgtgctgaagcccagggttgacgccaggctcctggaagggtgctcacagcaaggaggctttggggctgtgacttcacagacaggcaggtcccaggggcaggctctaaactcagctctgcccctcggctcagctccctcccaggggccacagagtggcaaggtcaggcgaggtccctgctcctcagcagcaggtggctggccaggcccgctgggcacagcaccctcacccagcccagccactcgaaggccggggtgcacgcaggctccatgctgggccagcacaggttcctaaagagcctgggccctcctcctgcaggtcatcctggcgtgcaactcaggccccgccctgaacgacgtgacccacagcgagtccctcatcgtggcagagcgtattgcgggcatggaccctgtcgtgcagtgagtgttggcgggcagtgctgggggggccttgatggggaggggcaccagctgggcagagtgggccatggggattgtcactgaactgggagctcctgggggcactgaccaccttgtatctggcagctctgcgctccaggaagagaggctgctgctggtgcagacgggctccagctccccgtgcctcgacctcaggtaaccccgcaccctgcacctgttctctccctcctgggctctgtgccctctgtgccgtgcacctgcacccaggtgcatgcgggacaccgacctcaggactgcccctgcggcctctcctgaccccaggcccggattgatctcaggaggggacagatatgccatccccgaaggtggcctggggagggtgaatggattcagggtctgaggtggttacacatgggctgggtttggggacttggggcaagaggggccaatgtccctgtggccactcagctgagaccgagggcgacctgggcagctgcccggtgtctgtcacctccgtgtcccacatagatgccaggctctgcttctgtggttctggaggtcattagtcaattgtatgtggtgctgtctgtcctcctgattgcagaggaggaaggaaccccttaaatgagcgggttctgagtgctggggccgctggtctgctctgcctggtgggattctccagtgctggcttcatctgtgccccagccccactctcaccaacaaggagggcgtgaaaatgacaaggaatccatccctagagttcacaggagatctagggcagagtttccaagctgcagctgctctggccctgtgtgagctgctgctctgaggaagccccaggctgaggcagctaccaggcggaggctgggtttggaggcctccacatcagggaattgagcggtaggggtttcagccttcacgttggtcgccgcactgtatgggaagtggggtctggggtctgcttgcccagtctcaccgtcctcttcctccccaaagccgcctggataaggggctggccgcactggtgcgggagcgtggcgcggatctggtggtcatcgagggcatgggccgtgctgtccacacaaactaccacgcagccctgcgctgcgagagcctcaagctggccgtcatcaagaacgcgtggctggccgagcggctgggcggccggctcttcagcgtcatcttcaagtacgaggtcccagccgagtgaggcgctgcagctgccggactcttctgcttgtcacttgtcaggaatgtgtttttaccaccacagggaaactgcgttcaaatcaacgtatttatatggtactgctgtgacgcggcacatacaccccagccgcacagatgcgtgtgacccagaggcgagacgcagctttgtcctgggagacgttcatattggaatctatttaactgctaaagaaccttttatatatatatatatataaatagagagatctatacaggtatgtctgacgggacgcagcaccgtgggcacgcaccaaatagagtttttaaaagaggccgga

SEQ ID NO: 11104 - DNA, 1978 bp, Homo sapiens
attaagtttgagaatacctacatcgaagcctgcctggacttcatcaaagaccatctcgtcaacacagagaccaaggtcatccaggcgaccgggggcggggcctacaagttcaaagacctcatcgaagagaagctgcggctgaagtgagtggggatctcaagggcgagaaaggaacatgtgtctgcccccgagtccctgggtgtcccagagccgcgtccctggcgctcgtgtgtcagattgcgcatggggcatggctgccccttcggaccaggcaggcttgcatggttgcacctgtctgtggcccagactctttaaggggttggcgcttccttttcagagtcgacaaggaggacgtgatgacgtgcctgattaaggggtgcaacttcgtgctcaagaacatcccccatgaggccttcgtgtaccagaaggattccgaccctgagttccggttccagaccaaccacccccacattttcccctatcttcttgtcaatatcggctctggagtctccatcgtgaaggtaagacccggcttcatgaatgaatgagtggatggtttagccatagtttgttaagccctcgctgtgtgcaggagccagggctgggcacatggatggggcccagtgggcgggaggggggtggcgaggctgtgagctcagagcctctgtgggaggggcatcagcgcccccaggcttggccatgagagtcctcccactggcggttggggtgggggcggggttcaccccagcgcagcacatggggcggggggcgggggagcctgtgtggctgagggcccactgagggcacacctgccctggctctgttgcaggtggagacggaggacaggttcgagtgggtcggcggcagctccattggaggcggcaccttctgggggcttggcgctctgctcaccaaaacgaaggtatgcggcagctgccagagaccttccaggggtctgcggagatgtctgcttccttcccccgaaggcctgcagctgggcggtgcaaaagctgcttccgggcctccctcctgactcgcgtcagtgggtctctggcctctgcggcttcactctttgcgccctgagggttgggtgtcccagcaacccagagcttctatcctggctgggtggcccgagggtcccgcttgccgcctcctgcctttggtcccacgcgatgagggcccatttaccccctgcccgcgcgtgcctcctgccatgggcttggtttctggggtcgtggggattccagcagctcctggcgcctcacccgccccctcgccgtgtcctgcagaagtttgacgagctcctgcacctggcctcgaggggccagcacagcaatgtggacatgctggtgcgggacgtctacggcggcgcccaccagactctcgggctgagcgggaacctcatcgccagcagcttcgggaagtcggccaccgccgaccaaggtgctcaccccggcctctgccgccagagagcaggatggtggggacacttggggtctcacggacaggagcttcccccaccattgctttcccacaactgctccctggagagtcggggtcttgggtgtcagccctgtaacctcttcctgccgagtcgctgcagctcaggcccactgctcagaacgtcggcagataaacgccacggtcttggttttggaagaaaaaatagtttcctgattgggttttttcctccttcaaaacaaagcttaatccgtccaggaatgattcacacatcacacgcagcctcccgcacttgggctccagttcccccactcagctctctctccccctcccctcccactcagctctctctccccctcccctcccactcagctctctctccccctcccctcctgctcgctctcatgtcgtgcacttgctgtacttggagatgagtgccttttccttcccttcctcagagttctccaaagaagacatggcgaagagcctgctgcacatgatcagcaacgacattggg

SEQ ID NO: 11105 - DNA, 2029 bp, Homo sapiens
gtgtggacactgggttcccccatggacagctctggaatccttcagggctgggggttggatgcagaaggccactaaggggacacatttctgggaacctggtgctgggcctcacatgctaggtgctgggagacgcggaccatgcgatcttgtggggctgggatttggggtccttaggggctgggcggctagccacttgtatgcgtaggggctgggctcagggcaccctaaggggccggatttccaggggtcccatcttggctgtggtggagagctggactcaggtctctcttgggggccctggggaccagagccacgatcccggtgccctgatgtccccgtctcttccccaccttcctctcccccagtgtctgcctcaggacgaggcgtgcgccgacactggcagtggcagcgccgagggcctggctgctgacggcccccacctgcacacgctgacgcagcctatcgtggtcaccgtgccgcggccgccccccagtgagcacgcagtcctcctccgcatggggccgtggggcggcagagcgggtgggaaggacgcctgggagctggacccagtctcagcgtggcacttcccacagggccgcccaagagtgtccccggccgtgcagtgcgccctgagcctcccgcgccggcccccgcggccctggaacccgcgccggtggtggcgctggtgttggcagccttcgtgctgggcgccgcgctggccgccgggctgggtctcgtctgtgcgcactcaggtaccgacgacctccgccaagccgggcccccagtctaatcccgcgcgtcgggacccggggcggccgcgatcccgcctgcggggcctgatcaaccctagctaggcctgcctccgcgatgcccgcagcagcccccaggggccgcccttagcctggcgtggcgcgcagcagcccttctgcagctcgcctctcccttccagcgccccacgcccctggcccgcccgcgagagcctcgcccagcggtccccagcccaggaggtcccagtgaggaaggtaggtatggaggtggagggagctgggtgaggtaggagatctgacagtgacgcttcctagcgcttagttcgtgccaggcactgtggtttttttgtttgtttgtttgtttgtttgtttgttttttgagacggagtttcgctcttgttgcccaggcgggagtgcaatggcgcgatctcggctcaccgcaacctctgcctcccgggttcaagcgattctcctacctcagcctcctgagtagctgggattacaggcatgcgccaccacacccggctaattttgtatttttagtagagacggggtttctccatgttggtcaggctggtctcgcacacccgacctcaggtgatcctaccgcttcggtctcccaaagtgctgagattacaggcgtgagccactgcgcccagcctccaggcactgttgtaaatgttttacgcctatgaactaacttaatccccttaacctctaggcggacactattataatccccattttagagacgagaatgatgaggcattctctgaattaagtaacttgtcaaaagtcacaatactgggtggagcttggattcgaactcaggcagtgggtcacccgcggcaggcgcgggctttgggtcgagccaggggcattaggtgaggagaggcactaggcgaggagaactcagcattcggacccggctcccactctcaccccggcatgcagaccgatggaagaggctagtggtctgctgggaagggaggtggcccgcgtagcgtcccctccctcgctgagcctcagccacccctcccagggatggtgcgcccccaacatggtccggagatacacccagctaccaattcgggaccaggaccaacaggaccggacccgcctccctggacctcggacctgatgaggccacgacccctgcgcttctctcctccccctgtccctcccacctgtgctcaaaataaacctctggactgaccggctaagttctggtgcagtcagtgagcgcgcaacgtgcggggtgg

SEQ ID NO: 11106 - DNA, 2029 bp, Homo sapiens
gtgtggacactgggttcccccatggacagctctggaatccttcagggctgggggttggatgcagaaggccactaaggggacacatttctgggaacctggtgctgggcctcacatgctaggtgctgggagacgcggaccatgcgatcttgtggggctgggatttggggtccttaggggctgggcggctagccacttgtatgcgtaggggctgggctcagggcaccctaaggggccggatttccaggggtcccatcttggctgtggtggagagctggactcaggtctctcttgggggccctggggaccagagccacgatcccggtgccctgatgtccccgtctcttccccaccttcctctcccccagtgtctgcctcaggacgaggcgtgcgccgacactggcagtggcagcgccgagggcctggctgctgacggcccccacctgcacacgctgacgcagcctatcgtggtcaccgtgccgcggccgccccccagtgagcacgcagtcctcctccgcatggggccgtggggcggcagagcgggtgggaaggacgcctgggagctggacccagtctcagcgtggcacttcccacagggccgcccaagagtgtccccggccgtgcagtgcgccctgagcctcccgcgccggcccccgcggccctggaacccgcgccggtggtggcgcttggtgttggcagccttcgtgctgggcgccgcgctggccgccgggctgggtctcgtctgtgcgcactcaggtaccgacgacctccgccaagccgggcccccagtctaatcccgcgcgtcgggacccggggcggccgcgatcccgcctgcggggcctgatcaaccctagctaggcctgcctccgcgatgcccgcagcagcccccaggggccgcccttagcctggcgtggcgcgcagcagcccttctgcagctcgcctctcccttccagcgccccacgcccctggcccgcccgcgagagcctcgcccagcggtccccagcccaggaggtcccagtgaggaaggtaggtatggaggtggagggagctgggtgaggtaggagatctgacagtgacgcttcctagcgcttagttcgtgccaggcactgtggtttttttgtttgtttgtttgtttgtttgtttgttttttgagacggagtttcgctcttgttgcccaggcgggagtgcaatggcgcgatctcggctcaccgcaacctctgcctcccgggttcaagcgattctcctacctcagcctcctgagtagctgggattacaggcatgcgccaccacacccggctaattttgtatttttagtagagacggggtttctccatgttggtcaggctggtctcgcacacccgacctcaggtgatcctaccgcttcggtctcccaaagtgctgagattacaggcgtgacgactgcgcccagcctccaggcactgttgtaaatgttttacgcctatgaactaacttaatccccttaacctctaggcggacactattataatccccattttagagacgagaatgatgaggcattctctgaattaagtaacttgtcaaaagtcacaatactgggtggagcttggattcgaactcaggcagtgggtcacccgcggcaggcgcgcatcttgggtcgagccagggcgattaggtgaggagaggcactaggcgaggagaactcagcattcggacccggctcccactctcaccccggcatgcagaccgatggaagaggctagtggtctgctgggaagggaggtggcccgcgtagcgtcccctccctcgctgagcctcagccacccctcccagggatggtgcgcccccaacatggtccggagatacacccagctaccaattcgggaccaggaccaacaggaccggacccgcctccctggacctcggacctgatgaggccacgacccctgcgcttctctcctccccctgtccctcccacctgtgctcaaaataaacctctggactgaccggctaagttctggtgcagtcagtgagcgcgcaacgtgcggggtgg

SEQ ID NO: 11107 - DNA, 2918 bp, Homo sapiens
gcgaccttacagcgcctgcctctttctgagcggcatgaagccacctcccaggcggcgagcggccccggcgcgctatctgggcgaggtgaccggtcccgcgacctggagcgctcgcgagaagcggcagctagtgcgactcctgcaggcgcggcagggccagccggagccggacgccaccgagctggcccgggagctgcggggccggagcgaggctgaggtgagatgcggttctcgggaccggagccaggctggaggcggggctggggtggggcggagagtgggcggggctgcggcaggagccagcggggcggggccaggaatgtaagcgagcgggggcgtggcgtggggctgagtggcggggcgttagtgggtgagcctgggcggggtgaggggcggggcgtggacgggaagagaagacctaggggcggggcgagcttgggagctagacgtgggcggggcataagtgaagcggaggggcggggcgatgccgggggcggggcgtgcgtgccgctgaggtttggagagtgggtgggtgagtttgaggggcaggacgagcctgggggcggggcgtgggcgggttaatagcaagacttaagggcggggccgttttgggagtaaggcgtgggaggggcgtgggcgggatgagggcaagctttaaaggcggggcgagcctcggggtaatgcgtgggtgaggcgagggctaaacgggcggaatgaactgggagtaagatgctgccgagtccgggcgaaaagcaacgcatgctgttggacaggatacgagcttgaagtgagagggaatagagaagaggggacgaagaagggagttgaacggggtagtagtcagcatagggttgggccctggctgcgtgaaggagccggaactggcctgggccttacaacttccttaggtagctggtcacgctctgggtggggtaggggccttggcagtcactgggactcctaacaccgggccagcaggagactaaggcgcagtagcggggcccagagcatacaagggattgggctttggcttctctgctgcagccctgagctcatagaagcctcattccgccgcctctttcctttctagatccgggtcttcctccagcagctcaagggccgcgtagcccgggaggccattcagaaagtgcatccgggtggccttcagggaccaaggcgccgggaggcacagcccccagcccccatagaggtgaggcagatgaacagggtgaggctgtccagggcaggtccctggtgggtaggtgggagttgcgggggataacctgattaggggatccccaggaggagcagggcttggggggccattgcaggctgatccctgggctgaccctgtacctctggcttcactcaggtctggacggatctggctgagaagataacagggccactggaagaagccctggcagtggctttctcgcaggtaccgccattcccccaggcaggtcagggtgtcccagaggacagggtcacatgggccaaatcatgtgaacctgggtcctgggcccttttgccagctctgtggactccgtcagtcactggacacctcgagcctcagtgtccctggctctgaggccatctcttgtctgaggagcatcttagggtggcagggaggatgggggaatgtgtagacggtgagaagacttcccagctcctcttcctccctgattgttctgcctgccaggtgctcaccatcgcggccacggaaccggtcaccctcctgcactccaagccccccaagcccacgcaggcccgtggaaagcctttgctcctgagcgcccctggaggacaggaagaccccgcccctgaaatacctagctctgcccctgctgcacctagctccgcacccaggactcctgaccctgcccctgagaaaccttctgagtcgtcggctggtccctccactgaagaagactttgctgtggactttgagaagatctacaagtacttgtcctctgtctcccgaagtggccgcagccccgagctctcagcagctggtgagaagggtgagggagggggcaggagcagagggatcaagggtccctggcagcaggcaggggtgtccccttacccctctcctccatccatcactagagtccgctgtggtcctcgacctgctcatgtcacttccagaggagctgccactcctgccctgcacagccctggttgagcatatgacggagacgtacctacgcctgacagccccccagcccattcccgctggagggagcctggggcctgcagcagaaggggatggggctggctccaaggcaccagaggagacccccccagccaccgagaaggccgagcacagcgaactgaaatcgccttggcaagcagctgggatctgtcccctgaacccgttcctggtgcccctggagcttctgggtcgggcagccacccctgccaggtgaggggcatggcgggcaggaggccacaccaggccccccgccctgcccctcggttctgctcggctggccctggctctttctgaggatcccgtcatgggggaaggtccttgagatgatgctcagctgtggggcgggcctctaagatgccccatactttgggggtctcagaaatggaacccccgttgtacaggggttgggtgggggttgcaggactccactcacaagcctcctgatgtcaaggacaggcggacagggctggcctcccccagtccccaagccccactgtgccttgttgtctgctggggggccatagctggcactgcccaccgtaaaggccctcgcacattttcccccttcctgtacacctcggggccagcatcctcaccttcttcaactgaccagtcgtggttactccctgctgccaggtccttccccttcccgggggtattctgtgaccatgaataaagttatcattctctttctctttca

SEQ ID NO: 11108 - DNA, 247 bp, Homo sapiens
cgttttctctcctttgggccgcccttccccgccccgccagctcccccgttccccgcggcgcccggcccctggctgcgcagacccctcttcagcctgaagctgtccgacacagaggacgtctttcctcgccgcgcggggccgctcgaggtcccggccgacagccgcgtgttcgtgcaggtggggaccccggggacaccagggtgcggatgggggccggtggggacgggcgatccctgatggcgcctcc

SEQ ID NO: 11109 - DNA, 243 bp, Homo sapiens
cgttttctctcctttgggccgcccttccccggccgccagctcccccgttccccgcggcgcccggccctgctgcgcagacccctcttcagcctgaagctgtccgacacagaggacgtctttcctcgccgcgcggggccgctcgaggtcccggccgacagccgcgtgttcgtgcaggtggggaccccggggacaccaggggcggatgggggccggtggggacgggcgatccctgatggcgcctcc

SEQ ID NO: 11110 - DNA, 18385 bp, Homo sapiens
cgcggagacccgccccagaggctcaagaaaacccgcgggagcctcgcccggacccaggaactcgtgctcggggccaaccggctgggccgcgatcgcgtttcgtccggggccgcggcggccgtggggaatcggctgcagcgaatcggtggcgcgcggcgcctgagcgcgctgcagtcacccgggagccgggtccaggtcgggttgggggtcggggatcggggatcgggggtccggttgggtcgggttgggctccaggtctggttgggtcgggtccaggtcgggtaggagtccggtcggggtccgggtacaggtcggggtccgggcctggatcgggggcgggtccgcgtgcggctcctctagccccgaacccgtgttccccgtaagctgttggtttctaaggggcggaggaatggcgactggagccacctctcaccgctcagggagccgggagggccggcagctcccgcgggccgagtttcccgccttgggtgcgaggacgcgtggggccgcgctgtgcccggggaacactcaccagcatctctagcctccacctccctctcgcgccagtggcactcccggttgagacaactgagaatgttccctgggcacagtggcccgggttgagaagccctgcagtggctggtagcgttggggtccgagcggaggagcgaactctgggtggaaaccggcaggcactggaggggaaggaggcgggacagggttgggtgggaccagggttgaggggtgtggggtctcggggcgctcaccgaggggcttcctgagcttgtgtggattatttccgtgccccaagctgagccctgtgtccatgtcacaggtcgtcttcccgtgacgcccagatctgtcctgcaggatggagccagcaccctcagaggttcgactcgccgtccgggaagccattcatgccctctcgtcttcggaggatggcggccacatcttctgcaccctggagtccctgaagcggtatctcggtgagatggagcctccagcgctcccgagggagaaggaggagtttgcctcggcccacttctcgcctgtcctcagatgtcttgccagcaggctgagcccagcctggctggagctgctgccccatggccgcctggaggagctgtgggccagcttcttcctggagggcccggcggaccaagccttcctggtgttgatggagaccatcgagggtgctgcggggtgagtgggctgggcccatcctggggttgccggtagcctcagaagtgatgagagtggcttgaaggactggaccaagagcctctctagtccctgtgaggggctagagagagagcctgctcctggctgaacccctgaacagaagaagcggtctgtgtctgtctcctttgcgacgggaggcacctgctgtgtctcacaaagtcccccacttgctccccgtccggctgtgtcagagagggatggggtgggagtgttcacatcccaggcggcagaggcagcccgtcagctggggacgttccaggttttccagggaagcacagctgtcatcactgacacgtgtcccatgtggactcccagccccagccggctcccaggctcagcctcagatcacactgcagtccttgccgggacactgcatcttgagaagctgggttttcagaggttgctgtgatcaaagcaagcactgagttatccgcgtcagcagcaggggaggggtgtccagtgagactccaggttggggaagccgctcagggccccgagagctctcacacagtaatcgcagttatttaggaatggattaacagattttcccatccggcttgtggttttggacttcacgctggttatgttgttggggctgcccgtgtaatccgggctgctggttccttgtggcaggaagggggccccgaggatgggggttggcggctctgcccaacacgcccgtatcttcagccccagcttccggctgatgaagatggcgcggctgctggccagattcctgcgcgagggccggctggcagtgctgatggaggcgcagtgtcggcagcagacgcagcccggcttcatcctgctccgggagacgctgctgggcaaggtggtggccctgcccgatcacctgggcaaccgcctgcagcaggagaacttggccgagttcttcccccagaactacttccgcctgctcggcgaggaggtcgtccgggtgctgcaggcggttgtggactctctccaaggtgaggccctgcctcggggaccccctttgccacccgtcttcttgggtcctcgtcccctgccaccctctggtgcctcacggcctctggagactttggagtctctggttgatgccgtcaggcaggtggggatgtccctgtcccgcacagtagtgaccggcagggctcatccgctgtgggctgaagtccgctgccctccacgcgggcttctcttgtccctgcagtcccttgggtttccagggcccaactgtgctgtggtggccaggtgggggatctcgaggttctcaggtctggaggcagacgctggcggtgccctggagagggggtgctgtgggaacggccttgcccgctgctgggctgcagggccccgtgagcgcccatgctcgctctgttttccctggggcgccagatggcggctgccgcgagtgtgcgtttcactagcgagaaggaggctgggccgggggcctgcacagcacccggagcgtctgcctctccctgcagggtgaccccttccttctcttgcctttcccgagctccaggcgacagctcagacgcaggtcgagcacctgggtccggactccaccctccacatgctgccccgacctcgttctgaaactccctccctcgctcaggggcaccctggggtcctggagcagctcggcgccccctcagagcccaggaggaagccgggcccctcgagtccctgcgtggggcctgtgtggcccaagccccctcgcctcacctgggggttcctgcagcaacctcctgagcccctcctgtcttttccgaacgtagccctaggcttgcagctgctgctgtgcatgggcccatgtattaaggaggctttgggaacatctcggacacatgtggaatgcggctttttcacgtgttcggggttggctggggccgtcctggtccccacgcggctctgtgctttccgctgccccgcgtcccagctcttctgtggggctggtacagcccggcccctcccggttccccacgttccctggagtgcgctccttccctgtgggcggccgtggtggtggtgctgctccagggtctcatgcccggctcagggcccaggcctaccctgcgtggctgacccaacttggccgggccctatcgatgctttctctccttcctcggcaacatcataccggtcccgacctcctacaccatcgtgacgattaagtgggctaagatgggtgaaggtttgaaaggattgtgatttgcttgtcaggttccacgcactcctgttcagatttgctgggtaggctgatgggcaccagccgttgttttgagtgagttttgctgtcggttggagtccgcctgaccgagagcagctctccccacacctagatgttcttttgtgccttcccgccggcttcctcatcaggcctccctttctgtcccaggtggcctggattcctccgtgtccttcgtgtctcaggtccttgggaaagcctgtgtccacgggaggcagcgtgagtagagcagtgccttcctgcccatcctgccccgaccctcacagcccatcagccttctgcagaaggccgagaatccctcctgaccctggccctctgcagggtccccttgcccggtcctgtcctgggcccgtgggatctggggctcagctgtgcttactggggagctgtgggactgtccttgctggacccacacagccccagacaccaggtgggtgcagctccccaggctcaggtcctccgtctgtcccctcagaggagatcctgggcgtgctggtaccccggctggcagcgctcacccagggcagctacctgcaccagcgcgtctgctggcgcctggtggagcaagtgccggaccgggccatggaggctgtgctgaccgggctggtggaggccgcactggggtaagcagccaggctgtcctccagctgcactggcttctggggtctggacccccagaggctgccattccttcacgctacttctcctgggcgccgtgctgcagctggcacccccatgtaggtgccacagggtgtgggtggtgccctctcagttcccgcacgtgctgatggtgacctctgtatcagagggtccctttctcttatgaaatagcatcgatgctgtgaacagcccacaccgtaaaggcgcctgtaccttgggccgtccacccgtcctgcgcctgtggtccccctcgcacacgtgtgcaccatgtccaggctctgacatggtgatgggcggtgactcacttccccacgtctttgtgcaggagaatcaaggttgcatttctggaagcaggactgccggccatttacccccacaaaccctgccagctcacctgcctcagatgtctcccctcccttcaacgtgtgcaaggacatacctgtctctgcccaaagtatttcctcctcttttttttttttttttctttttgagatggagtcttgctctgtcacccaggctggactgcaacggtgcaatcggctcactgcaacctccgtctcctgggttcaagtgattctcctgcctcagcctcctgagtagctaggactacaggcgcccgccaccacacccggctaatttttgtatttttagtatagacggggttttgccatgttggccaggctggtgttgaactcctggcctcaagcaatccacccacctcggcttcccaaagtgttgggattataggcgtgagcccctgcacccggctgactttgcattcttgattctgggtgagggtgtgtgtgtgtttaaggcatttgtattcttttctctgtgaactatataatcatgtaatcacattctattttatagtttgttttggtgttgttgttgggggggattgtttttagagacaggatcttgctctgtctcccaggctgcagtgcagtggtgtgattatagctcactgcagcctcgacctcctgggctccagcgatcttcccacctcagcctcctgagtagcgggaacacaggtgcgcgctatcatacccagctaatttttaaattttttgtagcgacggggctcactttgttgcccggctggtctcaaactcctggccttaagtgatcctcctgccttggcctcccaaatgtttttttaaccgttatttctttgtgtggaattttaagtgataagtgagggagaaatccagccatatctgtttccacactggctggatagacttgtggggctctttctggagacccataacctctcaccgggaggactctttcagtctggaccaggggcctacaggctacttggacaaaatttggcccgctgcatgtttttgtaaataaaatttttttggcactgtcaaaggaggccttcgagggtggacccgcctccgcccgggctgaggtgcagggaaggaggctgtcgggggtggacccgcctccgcccgggctgcggtgcacgcgctctctgggttgtggcatttatgccccagagaagggaggatgaaggcccagctcaggcagtcggaggatggaaccagaggctcgtggctaggaattggcaggccgggagtcaggccgccgtctgtgggcatcggagttcacgctctcgctcctccctgtctccaggccggcttgcagctctggcccctgactctgtcttgcaggcctgaggtcctttcgagactgctggggaacctggtggtgaagaacaagaaggcccagtttgtgatgacccagaagcttctgttcttacagtcccggctcacggtgaggacgccacggagggtgcaggctgctggctgccccatcacagcaagaatggctgcaaaacatggggtcggagcggtgtctgctgcctgggagaccctgcctgtgatttggcagtggctggcaggagttggcgaggcggtgggtgcctccctgccctgatgacaggccctgctgtgacggctctgagtgagggcttctcatgtgtcaatcttctagactcccgagaagccacccgccctagctgcgttctgtgccaggggcctgagggggtggggtggggtgggtgggggataggtgaggacacagaggaggtcgtgcatttccgggacttatgactcccgtccccatggcctggagcccggagggggtgagccaggtcccctgagcccagagtgggtgagccgggtcccctgactcccggccacatcttgcttcaccctcctcctttgctcacacgagaacttaagatggcgaggccctgccccagcacggcagcagctgcatcctacgtttttatatggaaccgttttatcacgttcagttcaaaggaatagaggcgggtgggtcgcttgagcccagggggcagcttctgcgggaggggaggggtcccgcattccaggaggcagtggccgcccccatgcttgtccgtctgctgccctcagtctggtcccagtcctggcatggctcttggccttgggagccccgggctggccaggcggcggcctcagcccagtggacaggcatgtgcttttattgcagacgcccatgctgcagagcctgctgggccatctggccatggacagccagcggcgcccgctcctgctgcaggtacgtgcctcctggctctccgtccctgcgaggccctgggagaagagccgtgcggggctcaccttttgggcggcagggtgaggctggctgggctggggcggagctccctcagagtggctgtgggcctggcggggacagactggccccgagccccacacagtcgtgggccatgccacctgcaggtgctgaaggagctgttggagacgtggggcagcagcagtgccatccgccacactcccctgccgcagcagcgccacgtcagcaaggctgtcctcatctgcctggcgcaactcggggagccggaactgcgggacagccgggatggtgagcgggtggtttgggctccccccggcctcgggcgccccgaggtgctcagggggcctgtccggtgcttgcagaactgctggccagcatgatggcgggcgtgaagtgccgcctggacagtagcctgccccccgtgcgacgcctgggcatgatcgtggcagaggtcgttagtgcccggatccaccccgaggggcctcccctgaaattccaggtgagcgggccgtcccctccgcgtccccgtgtggctggcccgggtctcccgagcggctgcctctccagccccagggtcaccgcctcttcccggggtccagacttgcggagcgtccgtgtggacttctcgcagggctgaggctggaagctgtggcaggttctcagccctgagctcctggggccacacagggtcgggtgagcacagggcccccagaaggattgcctggacacgttcacagactctctctagacgggggcccgagggaggctggggttaagggggccaccccctgcagtttgtccggccggggctgcagggcagccaggtcgctctgggtcggtggccgtgggtgtcagcctctctgctgccggctgcctggccatggaggagccctgtctgccttcaggctgtggaggtgacggcctgtcctcttatctgctgagaacctgggatctctctggggcattggccttgggggaggcccagctccttcgagaggggccacggcccctcagctttgagcactcccagtgctacccttggcctgaggtggaatcttagaaagtcgcttttaaaaagacacctggctatccagggcccagccactgagtgagaccgggctgcgagggaggccacagtggggagtggctcccgtggctccgtctcggggaggggcgctgcagcctggcggatgccgctgagcctgctcccctgctgtagtacgaagaggatgaactgagcctcgagctgctggccttggcctccccccagcctgcgggtgacggcgcctcggaggcggggtgagggtctctgccccccgggaccccaccgcgtgcacatcttactgctctggattccgctgccgggatgggaggggggaaaccctttctttctgtcctgtgagtcctgagaccagaggctcgaggggcccctaaaggatttttgttccttgtttccttaaagcacgtccctcgttccagccacggcagagccccctgcagagacccccgcagagatcgtggatggcggcgtcccccaagcacagctggcgggctctgactcggacctggacaggtaggggctctgccaccccagtgggcagcgtgcaggaggccgggaggcgaacccctcacactccaagctgcggccccgtggggggctccctgcctgctccgtgcttcttctctttcgtcctcatgtgagggcccgcagctcccagctccaccgtaggcgcaggggccgaggcgtgagctccgcatcttggggaggagagaggggctggctctgccgttgggcacttcctgtcacaggccatgggctgctcatgtctgctttgctctcccacagcgatgatgagtttgtcccctacgacatgtcgggggacagagagctgaagagcagcaaggctcctgcctacgtccgggactgcgtggaaggtgggcacgggcccctggagggccttgctgggctgggcatgggtcccgctcacagcctggttctgcctcaaggggccaccgggaagccctgggcccggggtgccgcccgtgctgctggctctcatgggttcagggtcagggctgaggctgaccgaggcctctctgggttctgtgcagccctgaccacgtctgaggacatagagcgctgggaggcagccctgcgggcccttgagggcctggtctacaggagccccacagccactcgggaggtgagtggggggcgggagtgggtggggaggcccaagatggtagctccctcaatgccatctgtgtcctggccactgagggtgacatatggctcccgtgtgtgacagggctgctgcctctcccggggggcctgcggcctggggcctctgctggggtgggtggctccggccctgtgagcctcggtgaggcctcggcgggcagctgggtccgacaggtttcccagccctaacccctgcgtgcaggtgagcgtggagctggccaaggtgcttctgcatctggaggagaagacctgtgtggtgggatttgcagggctgcgccagagagccctggtggccgtcacggtcacagacccggccccggtgagttcccgcacccgtggccctggccagtgcaggcacagcgggaagcactgggagctgcggtgcctgagtctcggtcctgtgctggagctggctgtgaggtgcccggaggtcgccccgggtggccctcaggtcccggaccacagcagcctctcccctgtgtcctcaggtggccgactatctgacctcacagttctatgccctcaactacagcctccggcagcgcatggacatcctggatgtaagtgcctcctgggcctcagtccccctggtctggcccaagctgccctaaggtggggctgccaaaacctgggtctccttgttgctgggccccaagggctcgtgcaggcctgtccactgccttcgtgagtgtgtgacccggcaggactcagcagtgggggagtcagggctcccggggcagagagttttgtttgtttaaaataacagctttactgatataattcacacgccataaaattcaccgctttagggtaaaatgtgtgctgcgcaggtgagggaatattatttagcaatgaaaaagaaaaatttgaatcccagcactggaaggctgaggcgggaggatcgctggagcccaggagttcgagacccgcttgggcaccacaatgagactccatctttattagccaagtgtggtggtgggcgactgtggtcccagttactcgggaggctggggtgggaggatccctcgaacccaggaggtggaggccgcagtggagctgtttgcaccaccgcactcccgtgtgggtgagagagggagacactgtctcaaagataattcgactctgatacgcactgccacacgatgagccttgagaacatttagttaaagcagccccagggcctgtatatcgttcgatttcacttaagcgagccgtccggaggagctagttcacggagagcggacggggctgccggggcttggggaggggatgtggagtgagggtttcacggggacagtttcagcttgggaaggcaaaagagttctggcgagggcggaggtgatggttgcccatcatgaacgtacttattaatgccacggaactgtacacttaaagatggggaaaacgggctgggcgcggcggctcatgcctgtcatcccagtgctgtgggagaccaaagtgggaggattgctcaagcccaggagtttgagatcaacctggtcaacatagcaagaccctgtcatctccaccagaagaaaattagctgggagtggggcgcctgtggtccctgctactcttgaggctgaggcaggaggatggcttgagcccagaggttgaggctgtcgtgagccgtgatggcaccactgccctgcagcctgggcaatagagcaagactctgtctctttaaaaaaaaaaaaaaaaaaaaaaagcagccggccacggcggctcacacctgtaatcccagcactttgggaggctaagccgggcggatcatgaggtcaggagttcaagaccagcctcgccaacatggtgaaaccctgtttctactaaaaacacaaaaaattagctgggcatggtggtgcatgcctgtagtcccagttacgtgggaggctgaggcaggagaattgcttggacctgggaggcggaggttgtggtgagtcaagatggcgccactgcactccagactgggcgacagagcgagactccatctcaaaaaaaaaaaaaaaaaaaaaagggaggggaggggttaacgtggtaaatcttgtatatattttaccacaataaagcaaaaaagactgagaacatgagaacaactcaccgtaactggtcttttttttttttttttttttttttgagacagagtctcgctctgtcgcccaggctggagtgcagtggcgcgatcttgactcactgcaagctccccctcccgggttcacgccattctcctgcctcagcctcccgagtagctgggactacaggcgcccgccaccacgcccggctaattttgtgtatttttagtagagacggggtttcactgtgttagccaggatggtctcaatctcctgacctcgtgatccgcccgcctcagccgtaactggttctaaggtgcacacttgggtggcgttcggaacatccacagtgtcacgcagccgcctctgtctagtcccagagcgtccttatcaccccagagggaaaccccatccctgtcagcagtcgccccgaccctcccagcctgggagcctccggtctggcgctggcctgttgagaaggtgtcctagagatggaggcgcacatgggtccttggtgccttctctgcaatgttctgaggtccccccgcccgtggcacgtgccgctgcagcgttgcttttgctgtgaggccgacttcctgggataagggcatgtggctctggcgtggcgggactgcgtggctttaggatgaggctgcgctcggccctgggcgtgttctcatctcctggagcacggtgcccaccttccccaccttcccgcctaccaaggcgcggttgctgtgagctacggggaagtgacttttctccttgttcccagaacacaccttctcccaggctgggcgggcccccgggcccgtttctggggctttggctgacttgactcttgggaaatgttcttccctggagcagtggcgacggccctgggcctgtctccctccaggtgctgactctggctgcccaggagctgtctaggcctgggtgcctcgggaggactccccaacctggctccccaagtcccaacaccccgtgcctgccagaggcagccgtctctcagcctggcagtgccgtggcgtctgactggcgggtggtggtggaggagcggatcagaagcaagacccagcggctctccaaggttagtggcgcctggtcagctcctcacgggcatggggaccgtgggtgggtgggaagggcggtcagacacctccaggcgctgtctgcagcgaggggcggccacattcgctggggatggtgcctttgccgggattcctgaaaggcagggtccatggtttgcaccgaggaactggattttggctgtaggagacccagactgggcttggggacatgataagtgacaggtgtcctggtggtgctctgtcctcagagcccatctaggccaggggtggtgttgctccacctgaggatgtttaggggcgtctggagatgtttttggttgtcactaggggtgggttggaggccacggaggcatcctgcagtgcccagggcggcctccccaggacgctcctccagccttgaatgtcctgcctgcaagttcgggaacgcctggtctgctgtccaggcattggccgcggagcctgagtcccgtcaccaaccccatggggcctgggagctgggcggggccggaagagtagcccggggaggcaaggcgaggctgaggtccacgctgctttgtgggatcctctcgggctaggggtgccgtgcccgctgcccaagcctgcacctccgtgatcgctgtagttgtgtctggcagggtggcccgaggcagggcccggcaggcagccccagcagattcaactccgtggccggccacttcttcttccccctccttcagcgctttgacaggtgagtgggttttccgtgggcctgtggacttgggggacagggaccctggacgtaccactgtggccaagaagttcgggctgggatctgagtgggtttgggtgtgaacagggtcgtgctttgctgtggctttttgtaagcctgtgttaaatggcagggagcgtcccgcaagattcctctgtggttgagctttgccatgaggcaccaggcatctgctccgatgctgggcttgtggcatggccggcagtgccgcccgcacgtgcccgacgccatcacctgctgggccctgctcgcctcctcctgcctcagccggcgctgcactggccccacgttcagggcgtgaggctctcgagatggcagagaagtgtggggcctgggttgtgctgcagcaggggtgggggtctcggcgttgggaactcctggcccaggtggacttgtgccagacagccctgcagggggagtaggcacccggaaatgtctgctcctacgatctcggtgcaggcaaggcggtgggcacgggaggaggggctgtgtggggctccctcggtctcccacggtggcccaggaggttggggacctggccctgaggcacccgctgcaccttgggctccatcctgtgctctaggcctctggtgaccttcgacctcttgggagaagaccagctggttctcggaaggctggcgcacaccttaggggccctgatgtgcctggctgttaacaccacggtgagccgggagaggtcgccgggcgccggcctgtgctaaccatggatcaggagcgctcctcagcctcacctgcgcccagggatgggtgtctgagggaggggctgcctgtgtgggcccccgggcagcgggagcatcccctcggctgtcaggcaggccctgtccctgctgctgcccagcagcggaagccgcccatgggtgctgggatgtggggacggcgtcgggaccccactgactgtccctctgctggtgtccaggtggctgtggccatgggcaaggccctgctggaattcgtgtgggcccttcgcttccacatcgatgcgtgagtggcctgtggggctgggccaggccaggggtgcaggcagacacaggggtcttattgtgggggccccgtggagcctcgaggtggctgacaggcagcctggcctggtacttcccaaataggaagtgtgccaggcagggccgcagcgtgggtggtctgccacactgaggggagtgggaggtctggggtgtggtccctgccgagctcagcccccgccttcttgccggcagctacgtgcgccaggggctgttgtcggccgtctcctccgtcctgctcagcctgcctgctgcgcgcctgctggaggacctgatggacgagctgctggaagcccggtcctggctggcgggtgagtgtcggcctgcggtgtgtgtgtgagatgtgtgtcggcccggggtgtgtgtgtatgtgtgtgtgtgtgtgtgagagatgtgtcggcccggggtgtgtgtgtgtgtgtgtgtgatgtgtgttggcccggggtgtgtgtgtgtgtgtgtgtgtgtgtgtgtgtgtgtgtgtgtgtgatgtgtgtcggcccggggtgtgtgtgtgtgtgtgggtgtgtgtgttgcagctcctgcaggccaggctgccatgactccttgggacccacacaggcagagtgtgcaggccggaggtgcagccaccccagcactggccgtttccctcctttggtcctgatcctagaccctgttggggtccctctgtgaccccgcccacccgcctccctgggcccctccggccggtgcagtcctggcaactttttgtttgtttgttttttagacagagtcttgctctgtcgcccaggctggagtgccgtggcacaatcttggctcactgcgacctccgcctcctgggttcaagcaattctcccgcctcagcctcctgagtagctgggattacaggtgcccaccactgcgcccagccaatttttgtatttttagtagagatgggatttcaccatgttggtcaggatggtctcaatctcctgacctcgtgatccacccgcctcagcctcccaaagtgctgggattacaggcgtgagccaccgcgcccggccagtcccagcaccttttgttgtttgctggcctttgtggtccagtggttggtttgtggggcccttaaggtggcttcatggataccgcctcggtttccacgtttgtcaggagggtcccgggtgatacgggtccttcccagggacttgtgctcagacctctgtgctggggggcgctgggggatgcttttggtgaggtcacctttcctttcccgtggggctgggctgtgtgcctcttctgccccagccatctcccctctccccacctgggcgcagtgccagcctgctgggtgtgaacgggtgtttcccatggggagtggagccaacgagtccccggggacgggctgaagagcagggcacggtaccgatggacacgggaagggcaggcccagctctgccctgtcccttcccaggacctgtgctcagggtggccgtgaatgtcttcccacggagcagctggagggtcctgggcccaaagcgtggggagtgctgtgctgggctttgcttctttcaaggggggtgaggccccccagacaccagacccttggagctgctgcccaacccctcctcagcatgctgtcgcccactcgccctgcctggaggaggagaggttcccctttggccagtggagccactgatggggctgggtgggcgggcacattccctgcagttcctggcccacctccttccccagagactcggtacctgcgacgtcatcatctgggggccttgggggcctgaagcaccaggaggagcaggggggccctgtccctcagccgatccctttccactcggctggcggggtcccgacagggtgttctcctttcacaggcacctcccacaagggtctacaggtgcctcctcaccctgcgattctagcccaatctggggaggagctgtggccagcagagcccccccaaggctccccggggccccaggctgcaggaggccttggtgagggtcccagcactgcgggcagccaagagctctggcagtgtgcggtcccagacacccaagaggcctccccacaggcgggtggcacgcccaccacccggattcctacggtcttccacctccgaccacagcccttgtctgccgtccagcaaggagcaggccctgctggtgttcccgggttccccggttgtgcgccccaccccaggcccctttcccatggctgcctgtcccgcggctcagggcagccctccatgtacagtgctgcctgcacagagcctgtggcatgcaggccccaaggccgtggggagagtccggggtcactgcagacccgagccccctttcttccatggagtcaggcctggcggggctggttcaggcagactgaagacaggaggagggagaatacgccctccacgctgcctcagctttgcttgtcactctcgtctggcagacgtggctgagaaagacccggacgaggactgcaggacgctggcactgagggccctgctgcttctgcagagactcaagaacaggctcctcccacccgcgtctccctagtccctggaggcctccccaggaccaccctcgccgacagcaaggcaggcggctgagcagcggcctggagcagcagagccaggctttgtagcgaggccaggtcttcggccgcatccggtacggagagtgcagatgcaggaaggcccggcctgccgctatttatagtgcagccagtccgctaaaaatacactgggcctgggcactgcccgccgggacatggcagcctggacgtggggctggggctgtgggcgctgctggcggggttgactcttccagtgagggcagaaccaggctggcaggaggggaggacggtgtacctgctgctcagagcccccaaggctctcctctgagagccaccaagcaggacagagcagctcttgtcccaggtccctcgggctgagcgccgtgtcaccaggagaatagtgctcacagcccaggcagggtgtgtggctcctggatgggctcgtggggcgggatgggacagggcacgggctctcagaaaataaactgctttattggaattacaggagtgttggtggccggtgggcagagcctagcagggggtgcagccgccaaggcccgggtgtcccagctgttgctcaggagccgtgggccctgcaggagtatggggaggatatgatgtgtggggagcaggggggcaggtgccccagccctccagctgcagcttcctgaggttctagaagtttctcaggctttacaatgtgtagttgggagaatacgatggaagggtgaacccgactcccttcaaaggaatgaatccaaaaatctagtggagctgccgggcacccagaggcaggtgggacagagcaaggtgcagacgggtcacaccctccgccggcccgggccgctgcgttctcgcccagctctgtcgcgtattccaacacagacatgttttttcccagcaaaaatgctggctttgccacagctgacaaaaaaattccagaagatgcctttctgcagcagcacgctggtcctggggcccaggcccctcaggggtcgtcatctgcctcttccaccacctcctcgtccagctccctggcgtcctccatgctgttgtggcggacctgctcggggacggtgcgtggcagtgggagacccagcccccggtgcacggcgtccacggcctgcgggctcacgtagtaggacatgttggccaagggaagccgccgccgcatctcctccaggaatctgtaggcctggggcagaggagcagacattactcagctttcctgaacaaccaggcacgaccctctgcctgcaggccaggcacgtgctgctgcccctggaggcgggtgggggtgcctccgcgctggaggacacggggtgcactgaggcttcccattggtgatgggggaatgtggtgatgaggggatgcggtgcccgcggaccgcacacatgccatgtgtggacactcaacaggaagcttcggtcagcatttcagctggaaatgcagagccagggccctggaaagtccctcagcagctgtgcacaggcctgctcaccgtgcgtgtgcgggcagagcctcctggggaggcagaggccccgcgttctgcactcgagtcttgcgggtggacatgcatatgtcagagtggagggcaggcagcgatatctactggtttggcttgggtattttttttttttgagatggagtctcagctatgaagatataataagcttgttggatggcccctcccatcacctggcagtggacctgcgtttaaggaaggcctcagctggggtgggcgctggtggagtgcaagccttccacacagtctcaaacgagaggctgagggcaaacatccacacctgaaaagatgctgccttacatgctgacaaaccac

SEQ ID NO: 11111 - DNA, 303 bp, Homo sapiens
tttttttttttgaaacagggtcttgctctgttgtccaggctggagtgcagtggcagtgaacatggctcactgcagcctcaacctcccgggctcaagccatcctcccacctcagcctcctgagtagctgggatcacaggctcatgacaccgtgcctggctaatttttaaattttttgtagagacagggtctcactatttttcccattcttgaacttctgggtgcaaacgattctcccacctcagcttcccagtgctggaattaccggcgtgagccaccgggcccggcctctgccagtttttctg

SEQ ID NO: 11112 - DNA, 126 bp, Homo sapiens
ccgggcgcggtggctcacgcctgtaatcccagcactttgggaggccgaggtgggcggatcacgaggtcaggagatcaagaccatcctggctaacacggtgaaaccccgtctctactaaaaaataaa

SEQ ID NO: 11113 - DNA, 9945 bp, Homo sapiens
ccaccagacaatgaggatgaagatgaagatgtcaaagctgaaagactaaaggtcaaagagctgatgggttgccagtgttgtgaggaggtaatttattctttatggctaagtcatagtaaatatgaaatgatcaattcccggtatatagaaattaatctgaaaaatatttttctttgcatatgaagcaatctgaaaaaaatctttcttggaaaaaaatacttcgtttacttacttttgaataagccagaatttcagtcataaatggatatttatttgtacagtatccccttattagccaatataatttttgtaatatggatatgaggtatgtgcagcctgtcatttcatgataagttttataactttctttttaaatacaatttttcttattagaaaccatccattatggtcagcaatttgcataaagaatatgatgacaagaaagattttcttctttcaagaaaagtaaagaaagtggcaactaaatacatctctttctgtgtgaaaaaaggctggtatttaatttttccttacataacttttctagaagagtaatttctacttttagtatgatttgattatgatttttttttctttcaattcctttaggagagatcttaggactattgggtccaaatggtgctggcaaaagcacaattattaatattctggttggtgatattgaaccaacttcaggccaggtatgatatataagagtataggatatgttgaatgtgatttatattgttaattaacataaacttttagtgacaaattcggattttatattcaatttttatgtatatttttagaattttttgtacagcctgatcaaattatgatcttttgggttatctgtaaaaataatgtgcatggtgaaattttcatagacacatgtagacacacgcatatacagtatttctgcttttgtaatgcttacatgcgtgagttatttgtctaccaacttaatggaagacagttttattagcttcaggagatatgggagcttgttttgacctgccatcagctagtcttttattataagcatgtcactgaccactttgtggatacttcacaaaactaccctgatcccatttcctgcttctctccccttgcttactttatgccagccacactaactcattgctttcctggaaaatgccaggcatactcttttctttgggtttttgcccaagatgttttctttgtttggctataccttataccctagaaatacatatactaaattcacttacctctttggctcaaatgtcaccttccagtgaagctccctgatcattagaattacatcttgctttttcatccaactctgtattaccctttctgaccaagtctctgaactctgacttagctttatatgtccttccatcatcaaacatcaaaaaggagtaaaacatctgggcgggtgcagtggctcattcctgtaatcccagcactttgggaggctgaggcaggaggatcacttgagctcaggaattcaagactagcctgggcaacgtagtgagacatcttccctcctaaaattcaaaaaagaaaaaagcaatagccaggcatggtggcacatgtttgtagtctcagttacttagtgataataataataatgacaataaaggagtacaaatctgacttgatattagtctggctgtaggaaggggttttaattaatgtacttgccacttccttcacagtgtaaattaagcaaaataataaaaattggtttgtgtttctataggtatttttaggagattattcttcagagacaagtgaagatgatgattcactgaagtgtatgggttactgtcctcagataaaccctttgtggccagatactacattgcaggaacattttgaaatttatggagctgtcaaaggaatgagtgcaagtgacatgaaagaagtcataagtcggtaaaataattgtctttagattccttttgttacttagaggaaaggtttgcatttcatatttttaaaatttcataacaagcatttctgtggacaatgatttttatagaaaatgtttattactttttcatatattctttatgatatatgaaaatatactgatagctgtaaattatgatagttataaaaaggtcattttttaatttctagttacaggataaatatacctatagatatcatgaaacttattttaattcaaagtgaaccattttatcaagatattaatttatttaaaatgatgtaaattggagacttttgcccttacctacttataataagcttcgactaagtaactattctagagaaaacaacatcagggatcacacccagttggtatttgtgtttatatatatcatggtattctcattttgtattgttcattttgcagaataacacatgcacttgatttaaaagaacatcttcagaagactgtaaagaaactacctgcaggaatcaaacgaaaggtactttcattaaacaccaaataatgcctgtatttttattgatagtttagtacctgatattgtcttgatagattccttatagtgaacctttgttaatttcccacccatctttttctttccatgtagttgtgttttgctctaagtatgctagggaatcctcagattactttgctagatgaaccatctacaggtatggatcccaaagccaaacagcacatgtggtgagtatggtacttgtgacacagtacatgatactttagaatagaacagtttcttttattataatagtttaatgttagttatatgtacatcttgattttaaatcctattcaaacgatacactagtaattaaaaattaaatagatttagagatttccttaagcttttaaaactttgcatatttttcatgaagtgttcataatattttacatattccgaaacagaaataagcatgagtcattattaagataaagagttctagtgttctgaatagtttttaagtttttttctagtcatttagcatacaaatgatcttttccataataatagtgtcttaaatttatgttgagactctttctaggacagtcatgcattgcctaatgacagagatacattctgagaaaggtgatgttgtcgttgtgcaaacataatagagtgtacttatataaatctctgggtggttatagcctactacacacctagactatatggtatagcctattactcctaggctataaatctgtagagcatgtcactgcactgaatactgtaggcagttgtaacacaatggtatttgtgtatctagatgtatctaaacacagaaaagatacattataaaagtattataatcttatggaatcactgttggaaatgtgtttcatcattgactgaaatgtcattatgcagtgcctgtaaagtactaattagttgaacaactctttttttttttttttttttgagtcagagtcttgttctgttgaccaagctggagtgcagtggtgccgtcttggcttactgcaacctctgcttcccaggctgaagcgattctcctgcctcagccttccaagtacctgggactacaggcaagagccaccaagcccggctaattttttgtatttttggtagagacagggtttcaccatgttggccaggctggtcccgaactccagacctcaggtgatccgcccccttcggcctcccaaactgctgggattacaggtgtgaggcacagtgcctggccttgaacaactctttaagcctcaacttccatgtctataaaatgtaaggtttggtttggatgcatgttacggttttcttatgattcaaagcctgttttggttataacatgaaaaggcatcaattttaaaatttatttgttgtcatacttttagcccatattaacatttgaaatcatagattttttttttccatttgacaagctttcaaaatgaagggaaaataaattagaatataaaagtcatggcctggcgcagtggctcacgcctgtaatcccagcactttgggaggctgaggcagcagaccacgaggtcaggagatcgagaccatcctggctaacacggtgaaaccccgtctctattaaaaatacaaaaaaaaattagccgggtgtggtggcaggcacctgtagtcccagctactcaggaggctgaggtaggagaatggtgtgaacctgggaggtggagcttgcagtgagccgagatcgggccacttctctccagcctgggggacagagcgagactccgtctcaaaaaaaaaaaaatcatagttgggcaggatgtaatagccatagcaattgatatttggtaagttttaattaacttaattaaccaaccggttggatttttaaaaacccatttttttttaacaaacagatgtgttcctctctttttgttttatttatgttttataggcgagcaattcgaactgcatttaaaaacagaaagcgggctgctattctgaccactcactatatggaggaggcagaggctgtctgtgatcgagtagctatcatggtgtctgggcagttaaggttgatgtctaaatagcgtgccattcaggggaagaggttgggggttggattttgaaagtcatcatttcaaaaacatggcaatagttagtaatttaaatgttaaatattttagtttttgagttagcttttgatagattgacttggaagtatgttgagttttttaaaaatatggctgtctactttgaatttgaattcacttaatatttcaataacttggaatattatttttaggcatagtacttgttatttcaaaaaattgttatatattggattaattatgtaacacaaatatgaaataaacatatgagtttctacttacataaataaataattgagtaaagaaatgtgtcagagaagaggtacatcttccttacagaacaattccaaataataatatatgtagataatacccacttcaagggaggaggcttaatctcctatcccccaagtttggacgggacttagccagtttcttgtaaaaaatgaacgacagaaggagaaaaatagtaactttacagttgagaaagctggcaaatactaccttaactaaacgatgttgtgcagatatcatgtattcactgatatgatatgatggaaaaagtactacagctgtgtaatattctctccaaaacccataacccaagtgtagtcatgagaaaaatatcagactaacccaaattgagggaccttctaacacacacctgaccagtacttctcaaaactgtcaaaatcatgaaaaagacagaaagagtaagaaactgtcacccacagttagagactaaggtgacgtgacagccaagaacactacggtatcctggatagaacctggaataaacaaaggacactaatagaaaattggtgaaatctaaataaagtatggagttcagtgacaaggaatgtaccaatgtcggtgtctcagttgtgaggaatttaccatggtaatataagatgataagattagggaaactgaaaccggataaagagtgtatggggatgctgtattttctttgtaatttttctctaaatataaaggtatatttttttaaaatgtagttatatgtgtgagagattattctttgaagctgtcattttatatctgagctttcttttaaaaaattacttcagatgtatcggaacagtacaacatctaaagagtaaatttggaaaaggctactttttggaaattaaattgaaggactggatagaaaacctagaagtagaccgccttcaaagagaaattcagtatattttcccaaatgcaagccgtcaggaaaggtaaaattttaaagaatgtggttatatttctttatagagcaaaggttataaaaagttattatattaaggattaagtgaaaaatcatcttttcattcatagaccatatatatatatatctctgtgtgtgaatatatatgtatattttttcatatatatgaaatatatgtatctgtagatagataatttatatatctctctctgtattatcaccaatactggactaatgaagtctgatggctggtgttttatatctgccttagtattagatttttcaatattcagtagtatttaaatttttttaacattcttagtagtaatgagagttgttttgcatgaaaatgttattattttaaacaattttcatccaactaaataccaaaataagttattgaatttaattttgaattttaaacatgttgaactttagctttagaacataatagtagtaatttttaatttttttccatattttatctttttttccagtttttcttctattttggcttataaaattcctaaggaagatgttcagtccctttcacaatctttttttaagctggaagaaggtaagtagtatcttctattttggcttataaaattcctaaggaagatgttcagtccctttcacaatctttttttaagctggaagaaggtaagtagttgaaaagcacttatgttgtagctctcaaattatgaaagaattttatttaaaaagtttaaaactggggactcggtttattttagaaactatggcagataagaagataaccttttattcatttaatctaagacacaggtaaacactaatgtcatagggattttgtagataaactctattgtaatgtaaaccttttacaatttttagagagcattgacacagtttatcacattgcatctatgagaagggtcagcttaattatcgagtctttgcagttagtccagcagcaagagctctgagtttcttgaatccttacttcatactggtccatagaagtagcaacactatcaagactccagtggcaaagagaattctgagtgtagcgaggggtgggcagtccccaaaattttaaggaagcttatagaatcttggcatttaaaaaataagtggtatgtaggataaatatatatatgctggtgacagttgagggagatcacctcctggaagaatcaggtattcatatgcagattattttatggcatttataaactgtgaaacaacctatatttatgtataaggtttattattaataattttcaaaataactacaggatttttatgattgttctttatgtgattactgaatacaaaaagatttcctgatactgtatatattcttgttgcagctatggattaatgggtttacttttgccaagaacactaattaattattttttggtctgtaatatatggcctgcatgatgttcattgtttattcatgtttattggccggcatggtggttcacacctataatctcagcactttgggaggctgaggcgggaggatcccttaagcccatggttcaagaccagcctgagcaacatagtgagactctgtttttacaaaatattttttaaaattacccgggtatagtggcatgtgcctgtagtcccagctaactcaggaggctgaggtgggaagattgtttgagcctgggaggtcgaggctgcagtgaaccatgattgtatacttgctgtgttgcccaggccactgtataccagcctgggcaacagagcaagaccttgtcttaaaaacaaaacaaaacaaaacaaaaggtttatggagataggaccaatatccagaatctagttcaagaagccagaataggctacagtggagttggagaatgggagataagagagcagggatcaaaagaagacatgaaaagaatcaccaggaaaaagataatggaggagaacttagaaaaagtgaaataagacaagtaacattcaacatacagtacttagggctatagaggaattataggtgtggggaagagaaaggaagtaagcgggaaaaataacatgttttggcagcttcaaatttaagtgggttgattacagagatattttaaaacattgttagccactttggtaggtattgccatttttttcagatattgataagtaaaatactatttttatattttaatagctaaacatgcttttgccattgaagaatatagcttttctcaagcaacattggaacaggtactataaagttaaatttttaaaaattattttatagaagaaagtatctgatatcgattgttttggtttatattagagagggagagatatcgtaaaccagtgacaaattggtacagaatgatcttaaacttggtataattttaatcaaccttaggttcttcacttactaattttttaaattttattttttaaattgatattattttaaattgacaaatcacactgtttattgggtacagtgatgttttgatacatgtgtgcaatatggaatgcttaaatcaagctaactttcatttgctgattttgaatatctgtttttttcattttgtaaagaaagtgagtcatgatggtggtgtttcacattagtgtatttgaaattacattgtttaagtagttatgaattattttttaaaaaacatatctattaatctaaaatagtattcatctttgcatgtaacttttgaaaataatctgtttgaataatgttaatgttaataaatctcttgatacttgttgatataactagatatagccttgtaccatttctgatttagttaaaagttctttgaggtacttgagatacagcatactgtattcatttatttcttttcacctaggtttttgtagaactcactaaagaacaagaggaggaagataatagttgtggaactttaaacagcacactttggtgggaacgaacacaagaagatagagtagtattttgaatttgtattgttcggtctgcttactgggacttctttctttttcacttaattttaactttggtttaaaaagttttttattggaatggtaactggagaaccaagaacgcacttgaaatttttctaagctccttaattgaaatgctgtggttgtgtgttttgcttttctttaaataaaacgtatgtataattaagtgaagctgcatgtttgtattgaagtatattgaactatatagtttgtatgtcatctttttcaccattcagaaacagtgcttctgaatttgtgatttaaaggaattgtaatagaatagttttatttttaagttatctttaagtttatgccatcttcttaaataagtacgtaatgttccaatctaaataaaaaactaattcataactaatgcatagaaaagatacataaagcaatgtgaaagtttcttgcttctcctttttaatttctaaaaaagccactttgaatggaagttgtcatccgtaaaagctgaagtgtaagcactaggaaatctcaatatagagatttgaggaaagttatatccactaggtggcagtcattgatcataataagtgaaatgagcccttgttctagtacatgattttaggcttaggtaattaggtatgtgaaattacatttctttaatttaaagtaaaattcagaaggttttagttattataattaaaggaagactgtgtgtagaatcttacgtaatagtctgattctttgactctgtggctagaatgacagttatctatggaggtggtagaattaagccataccttttccttcatcactcttggaacatataaattttttgtcatcttccttgcaaagggcacatttaattttgttcttgaataaaatattttattgggtatttgtttttattggtaaactttagtgaatctcttctataaaattgtaagtagatcagtgtgtagatttatttagtaacttacctcattgactttggaacatggtaggatatgaataaactctttcaagggttaaattaagaattgtaagtgcagtgcgcctatttctttttaataagaaccagaatttcatttttgatagagttaaaggcatggctaatattttcttagaaatacttccttgtacaacccatgtattggctcaaggtataaaatagtgtaaataatgctagttgacattacatttcaaccaaatgaaagtattaacttcataaaacaaatatattgagagt

SEQ ID NO: 11114 - DNA, 416 bp, Homo sapiens
ctgagtttgttaaaataccatactgtatttttgtgtaacatgtaaataggcattaatttttgagaaatagaaatgtttatccttaatgtatttttaatttgctaacattgattttttattttctttcctgaaatagcttatttcctaaaatgaaagaatttattctcagatgaataatttttatatcagctattcttatcaggtaaaagtttaattattttttatttataatatatgtaagcaattctcaatgctgctctttaagaaaaataaatatgattatattaataataagctttaagagttgaaaatttaagacaagtcattttgtatactgaagtgaattctttgttatttagtgctgataattgaataatgagtagctcatattaaaaatgatgcaaaaacctggcact

SEQ ID NO: 11115 - DNA, 139 bp, Homo sapiens
ttgaggccaggagtttgagaccagcctgggcaacatggtgaaaccctgtctctactaaaaatacaaaaatgagccgggcatggtggcgcgtgcctgtaatcccagctactcaggaggctgaggcaggagaatcgcttga

SEQ ID NO: 11116 - DNA, 1942 bp, Homo sapiens
gcaatgttgtggtctcggctgactgcaacctccacctcccagattcaagcgattctcctgtctcagcctccacagtagctgggattttttttttttttttttgtatttttagtagagatggggttttaccatgttgcccaggccggtcttgaattcctgtcctcaggtgattcatttgcctcggcctcccaaagtgctaggattacaggcgtgagccactgcacccagcccaaatgagatgtttctaaatctaaagtttcttctgcttctgcatttctgtgaatctcatttgaaatttttcagggaagggattttatcatttgttcagagatgtctttatttttattaatacccataaaacgtttgtgtatttgcttcttcctctttctccttttgatcacattttagctacttatctagaggatctctggccaagtattcccttttattgtattgataacaattcttaatggctggcctctcttgtgtacaatgagccaatattcttttttgttctatatttttgtatcttcccctttcctgaacaaagcatatttagagtctcaaagaaatcctctccacaaagacatgttcctccctctggtgtgggtagacatagggtaagagtttggatgaaacttttgtaaattgtagtgttcttggcataaatatgaattaaatctttttttatatttaaataactagttaaatatgtgcttcttactaagattaggtattttttgccaagataacaatgataaaaacattttgggggggaaattgaccttaaaattttgggataattcaagaaatgtctgcagaaaattgatttatgatcttaatttttgtgttagtcctttgaggtttttttgtttttgtttttgttctttgtaaagcgccttatctgttttggacaagtccaaagtaaatggttgggctcttatatctgttttacccttatttttcccattaagtaatggtttaagaatatatcaagcaccttaatttgttgttaagtagctagtgcttacaggattccattaaattcactttaataagcctatgaagttcttatgaaaaacccatatctgcgatatgtttgatttgtttctttgttttaattcagtgtttaaccctaggtatgctacatacccataaataagataccatggtaagagatagtatgttatagtgggaaaagcacaagtttttagatagagatcaattctgctatctacccttacattgtaacctttctgacagggctgctgcggtgcacaacttcgggagccatcacttatttttgttgtgttccagaaggtgtcattttcatagactgcagtgtgaatagtgtcctccattaataatgcaatgatggccttgctctctgagcctcagttttatctataaaatggtacctagaagagtcatgatttcttagaatcccctaaattattaaggtgaaggtagaagatgattaaagcgtgttatctcctaagctatggcttagattttccgaagctcatggttctaggcacagaaagtctccattctacactgcatttcaacctgtgttgaacaacactccagttcagcctgtattgctatgccacatagagtttgcctgaattattatagctttcttaatagttttgtttatgatccactctctccagcccattacacaggagccagctacctaaatttcctatctgagcatgtccttacatttacttccagcatactattcatttgccatagtagagtattaagattatttgattttctttttactttctcgtagtgcccaatgtgtagtttactcaacatcataatatgtaatgtttttcaactacttactgttgaatacaaagttatctcatttaattctcagtctgatgcggcagatattataatccctatctttttttttttttttttt

SEQ ID NO: 11117 - DNA, 825 bp, Homo sapiens
tctccctgatgttacagtttggtagatttcaaactggaatagctagcatgtgcttgctaaataattttatgccagccttatcctgtatcctagctgttcttaacagcaggtacaaaaatgcctgtttttcagcaaggttgaaattgggaatgtccttttgaatcagaagaaaataggccatagactcatctcccagcacaaatgggcattctatgaaatggtactggccctaggaggatttcctcaaccactctcctactcttggccttgaacctacctctgggttggatcttactattgtagctgctcactataccctcctgcatgcttagaataatgctttgaggggagcactggtaaaacacagtatttatttttttacctcctttaagaggacttggaggtaagttgcattcattcactcaagtttccctcttgctgtctaatagaagcttactttttgctatatcagcatttgttacagccaatatttaaggacaaaatttagaaaatatatcatttcctggcccatcatcaaactaatacagcttaaccttgcagctaccaacttttgtgtcaagctagatatctttatttgatatctaaggtgcaagaccaacaatatattaagagatctgtagacatgaaggcaaagctcttgtattttttttcatccaaacacctcaatttattttataaattcgttcatttttcctgttatgttttatataatatatggactaaacaaaataaaataacagtgcaaaagaggagaatatttcctcttgtgcttttcttgatgttgtgtacagaatttccttttat

SEQ ID NO: 11118 - DNA, 7695 bp, Homo sapiens
caggaatcctacggcccctgaatattttggcatcttcaacctaccgcaactgtgtcaagaatgcctctcttatttctgcattgtccactggacgttttagtcatattcagacaccagttgtttcctccactcccagacttaccacatctgagagaaacctgacatgtgggcatacctcagtgatccttaataggtagagtatatttctttgtggggttttttttgttttttgttttttgtttttttttgagacggagtctcactctgttgcccaggccagagtgcagtggtgcattctcagctcactgcaacctccacctccggggttcaagcaattctcctgcctcagcctcctaagtagctggaaagttctgggattacaggcgtgagccactgtgcctggctggtagagtctatttcaataaacatgatgcttagacaaactttccaagatattcatgcctgcaggggtatcctagaagtaggtggtattctttgcctacctgcagttaattatgtagacatctgcttgattgagtgggagactgtgactgacatccatgtatctaggcgcctgcagcaggaaaatgccaaacacagcatgcttctgatgttgtatgtgtgctttcctgcatggaggctgtcatccaaagtggagggtgcacaagacgctcagcttataaggatgggctgcatgtgttggtcattcagtcagcaaatactcagttaaatacccctgggtgcctagcactgtacttggcaaaaaggacataagggtaaacaaattgaagtcctcaaggagtttgcaatctggtgggaagatggataagaaataaagcgatgataatagaatgaattattttacagggattgagggggtaggttttagaagattgcgagttggtgatggttgctattctaatttatgcttaatgtcatgggtcattggaagtaatattgtatatgaaaagttagttccagtccattggagcagctttactcatttctcagtatagataatgaattttaatcctttaatcagtctgattacaagctaaaaattttaaaatatatttttagaatggcccccgtgcttccaagtgtcctgaagctgccagtcagatctctaacatacttcagtgcaagaaaaggcaagagaaagaccgtgaaagctgtcatcgataggtttcttcgacttcattgtggcctttgggtgaggagaaaggtgagtcttcacactgttactaaattgaaaaaggaatgtgaggccgggcgtggtggctcacgcctataatcccagcactttggcgggtggatcataaggtcaggagttcaagaccagcttggccaacatggtgaaactccatctctactaaaaatacaaaaattaggcgtggtggcaggcacctgtaattccagctactcgggaggctgaggcacataattgcttgaacccgggaggtggaggttgtagtgagccaagatcgaaccactgcactccagcctgggcgacagagcgagactccgtctcaaaaaagaaaagaaaaaaggagtgtgagcagattaaaatcaaacagaattcagaattcagccaggcactgtagctcatgcctgtaatcccagcactttgggaggccaaggcgggcagaacacttgaggtcaggcgttgtggcaggtgcctataatcccagctgcttgggaagctgaggcaggagagtcgcttgaacctggaaggcagaggctgcagtgagccaagatcacgccactgcactccagcctaggtgacacagcaagacttcatctcaaaaaatgaaaagaaagcagcttaagaccagttttgcaaaaccatttttgagatttagtaactgcccaaatcctaattccctttcattacttggaaattaaatctttaaaaatcaaaatttggttccctgtaaaaataaaatagttggtagaactttcttgatgtttgaaaggttgaaaggattctcccgttttataaacagtactaaattagtagataaatgggttggttggaactctcagctcatttctctattgaaacactgtggtgggtagtttcctacaccagtcagcagaagctcatataatccataaagcagctaaactaaaggtctaatgttctgagttttgtgaatttgagaccactggaaacatttcttcccttttgtgtgtatgtgtttttttttttttctttttttgagacaaagtgtcactctatcgcccaggctagagtgcagtggcacaatcttggctcactgtgacctctgcctcacgggttcaggccattctcctgcctcagccttccgagtagctgggattacaggcatgcaccaccatgccaggctaatttttgtatttttagtagagacgggttttcaccatgttggccaggctggtcttgaactcctgaccttaagtgatccacctgtctcggcctcccaaagtgctgggattacaggcatgggccgtgacgcctagccccaccctttggtttttataccagttatttccaggtcctcttctagccctaggtaaaatgaaatgggtgggtttccttgccttcctttccatgtccctcttactgggctctggggccctcatgttactgtaaaggacccgatcatactctccagtcataatacctagcttcagttcagggctcccgaaagtataccctgtatagaatgccctgcctcttcaaaatctaattttcagagaaaaaaaaaatctgggtagatgaattcaaactaatgtgtaaaacaaagtattttccatgacacggtttcatccagcagtccttggtatttattgttcattccctccttccatttttgaatctagagattgtctaaaaaatttcaagcattttcatagtggttccattctgtgaataatctttaaaggatactggtggtaatgagcagggcaataaattaggtgtttgtacgtcagagatccatagtaacccagtttggcctgcaaactatgaaattattacacaaatgtggagatttggctttaaatgtttgcatttaaaattgtaagcagtgagtagcaaaaatctaacctctagcattctaaaaccagaactcttaaataacctttccttatttcatcactgtccttatagaagttgatggtcacagtgatgatactaagacatgtcagaaatgcaaggcacattctcggcaaagagccatggttttgttcagttggtattgtgccataaagagcccttggcttgaaaggacccaagggctcaccgtgtggttttagccagatgttaattaagctggatggcacctaagatcccttctagtttaaacaggctatgattatagtttttataatcaatcaaattttcctttcctgtctttaaaaataaattcttcaaaatgaataatacctgtatgggtgtatatgaaagttctgggttaaatatgtgggttaaccattccttcaccactcctaataatagtcttaccatattcataattccttagaaaagtacttcctataaaaattggtcccttgtgtgtgaaaataataaatgaagcaatatatttgagaactgtgcttctcagctcttgtaatactcagcctccttaataaatattaatgttgttacctcgcctgcactccatcctcctctacattaggaaagacagtggttaagaactcttattagcctgggcaagatggtgagaccttatctctacaaaaatttaaaaagtagctgggtatggtggtgcacacttgtggtcccagctatacgagaggctgaggcaggaggatcacttgagcccaggaggtagaggctgcagtgaccgtgatcatgccactgcactccagcctgggtgacagagtgagaccctgtctcaaaatgaaacaaaaaaagaactcttattagccctcagacctctgtctgctacttctctaatcaatggtttctttttttaaagatgtaaaatagaataatagtatgttgttaaagattgctgaagagatagtaagatcatacctgttaagttagtgattataattctgtcattatcttgtactttcccagccacacacatttagttttattttctgtgagtttaatttaaataatttttttctaaaatatgatttattactaattcttttttaaactacacatgctttctccatccccctccccgccaccctcccttcccccggccattgagaatcacatctttccaagaaatagtccagcccctatggaagtctggtttttgttcttattgggtctataaaccttgagttgtgaagatacctgttgtttcatacatagtatgatgttttacatttctttgtaatatctgacaggctggctataagaaaaaattatggaaaaagacacctgcaaggaagaagcgattgagggaatttgtattctgcaataaaacccagagtaaactcttagataaaatgacgacgtccttctggaagaggcgaaactggtacgttgatgatccttatcagaagtatcatgatcgaacaaacctgaaagtatagatcagaagtttcacttgtttctcagttattggatatgtatctttgtgtacatatctttgcaaaaatggataagtacaaaacttgatgtaaattgtaccaatgaatacgtaaacatacagtgacaacattaaacttagaaaagttttaaaacttaatggatcagactttgccagatttggttagggaaacagaaatttagaatggtgcattatttttaacaaatggtattggcttaactagttgtttcagttatgctcttttagttgcaaggaatctcaagtgggacaaacataaaaagactcaaaagctacaagttagctcaagcaatgtgacattatttcaaggatatgtgccagggaattcaggaaccacctcaccaaccccatctcccactcagaaatcacctcccagcctcaggaagagtagaaattgggtggtgctcctcagcaggggaaggtggatgtttaggcttgggctctgcatgcatgtgacttgcttctttttgcattgttaactccattctctctattcaccaacttctctacacagcttttgcatacttacagtttctgttcctttgtaataactttaacttgcacctttgaggttcttttctacatgatgaccttcagctcctgctgctagtctccaattgccaagggaatttaactgggccagactacctttttatactaggtctggttgggtcattgtctagagtagggattggctgtccttaagtcaggagcccgctttgtattagcaggtttgcatgcagcaaaaaaacagttatgtgagcagtttcacttggaggttcacatggggtggcagcacacttaacatctaacacaccaggttcattgtgttcataacacttgtcatttactgtaacaacattttttcataggagagtaaatagcccttcagcatgctcattcatgaaacagaagaggctgtacaagtgaagacaagggctttttatgcaagttttgaaagataggtatttattttttctagagacaggagttttgctctgttgcccaggctggagtgcagtggtgcaatcatagctcattgaagcctcgcactcctgggctcaagtggtcctcctgcctcagcttactgagtaaggatatgtatttcttaaaagttagtttatccacttcagatttcatgttttcatttgtaaggataaacttttcccacaaattttcaacaatcattgtagaaactaagggggagaaagtaatctcagttgttttagaaacgaaaaagttaagcattgtttacttgaagtgggcagggaagcagcactgagtaaagttcaattgagtggttacagtctagggcagtggttcccaactctccgatcagaatcatctgggaagcattttcaaacagcaaagtactttgaaaaccattattaaatagaattatgcatgaattactgtttcagatcctttaatgtggtagttggtaataataagatgaaattcctctgttgttagtaaaattatgaaattgaagttctgcagcatgtcaggccaggattattagggagattcctcgaaactagtgtgtgtttattaaaaggagaaaggataacaatagaatgttctaaaaccagaagtccaagtgcgtgtctacttatgggaccaataaataaagaacagacatttgatttgaggtgaggtaaaagcctgaaacatggaatggcattctgttttgatggattttcatttcttcgcacttctgagacggcaaagccaaccacttagaagccttccacatctttgtcacctgcctggctcctgctctctgatgtacctctgggtagtgagatggaaatggtgcctgcagaagttggggagaaggatacttttgcacagcctccatgatgtctttattgcaaatatggatgacaagggtctctgttacaggggcctcagagcaccttcgtttctcctctagaccagggacaggtgtagagataaggactggcaaccagagcctcagcatccaaagatggactgaagtgggatggctgacaggcacataacttacgggaaagggaatttcatacatacgatttttgttttgtgggtaggagggcttatcatcaacactgattttataatctgacaataaatgtctttcattaaagagtttacctaaatgatgttcgattatatgtataatttataaaatatttatgtatagtttgtttattcaggtatatgtataatttattgaacacctactatgtcccagcatatctacaaaactgggtacatacatactgtctaactgctaatccacatttccagtcttacaaaggacataatgattagttaagccctaatttagatttgaggaaactgaagctgagagagggttaagtaaattacccaaagtacagctaataagacccagaatctcagtctcactccttgggatcctgtgtatttccctgagtcttctaacatatgaaaattcatatctaaatcaacaagtgactgtaatctggtactataaatactaaataaacacttcttcataacactgtaccaattcagcttttaaattttattactttgctttcctgtcctttgccaactcttaacctagttaatcctagttctgttgacattggaccaggctcagtaaataaacgaatggatttccagcctttttttcccatctgttcctgcttttagtcctctgaatctgcttcttttcttactgctgctttattttacagtgattttgtcaaacatagaatacaggactaaaaatgcaaagaaattgggtctgtgtttaattttgatgtttcaaattttgagcttccaagtctttgtggccacccaatgaagtttgagtctgcctgttcagatgtgaaaggtaagggctgcagcaggtttaagggtggcccttcaccaccctgttgtcacctgcacaggcactcccccatttgcagatgaagaaatgttcagagaagaaaaatgatggaccaaacgtctgtttgcacaattgaaactctaccagtggactattctattttcacagctacctagtttctgccgatgatttttttaaatgtgaaataaacagtgatactttcaggtttgt

SEQ ID NO: 11119 - DNA, 2804 bp, Homo sapiens
gttttttaaaagaaaaatgttaagactttattcaagatgtgtatcaggcattataacaaaacagcagaacttcaacctttggaatactgtaattttacatccctttgatgcacagtccagtatactattttattacagatcattctatagggactacagacatgaactagaggaaatgtgcacagtcaaaatccagaatatcagctctgggagtgtacactgttagaggatgaagcacatcctttgccatttcaaatactgtgccaggtggaggactaggaaggctcaaagatggtcatggttgacaagcactcttatcacaaacacatggatagcttatcacggagaacacatttcaaaggccagcaaagtgagcaagctattcacacaaagccaggagggattatgactaaactctccagtttataagcacaagtccacatctcacctcctcagaacaggtgctcaatggcaattaactaaaagttatgacatgaacattacagactttccagctagcattttgtaaacagcctgtgtctgtaagtcagcaaattaaaaacattcagttgtatcctctagacagaacaccacaccactacatgtacacttacaggctttcacattttatgtcagttcatacacaaatgtacaacttgtcagatacgtaaacacattttgccagaaatatgacagctgctttcagttgtacagtgagtgtctttaagagagaaaccgactccctagtcaacacttgaaggaaaaatagttacatttacattaagacagagtttggatacctttatatttttcaatcttgaatgagaagtaataatacagcatgtctgagaatagagcgcttcaaactttttttggcatagttaagtgcaaacttgataacctgtacttgtcacaactctccattgtaaaatggcgaaaatataggttgttcacgataggattttaaactgctgctaaaggcaatttattgtttcggcaaaaaaaaaaaaattgctaagaagctgtgtaagctttttttttttttttttttttttgcattcgtttctgataattctgggtacttccaactaacaggtaaatacattttaaagagtatattcttcttctgtctggaactactcaatgagcacaaagaaaacattttctgtcttccttaacagatttaggtattggtgggtgtggggcacagaacatgagcaaacagcttctgtttatcctctcagccacaaattcgcttttaggtatattttcctatacccttttgcaaattacaaaatcaccttcagaggaactatgggtagatgggattccaatatgcatatctggcaacaatcagcttcaaatcaaaccctttctggggtggctaagatccagctaatgtgtcatcagcaaaggcctctaatatgtgtttgcgtagtaatggaacagtttttaattgggcctgtttatagttgactgacagtaagttctatatggtatataacactaattctctagtcttctgggcatatctacgaacaaatacaatccaaatattatgagtaactgggttgtgaccactgcatgcattacactgaaagaaacaccaactcgaagcacaaatatattattcttatatttcggctcagctctcagtggggagagcagctacctcggaccacaatgccatttaaaccagattcttttcaaataaaattctcaatctaagtggaaagccccctcagagaatgccttattcccctactaagcaatccaggcttgtataaaacgtctgataaggcctgtagtgcccattgagtatgagtctgctgtttacattctgcacaggccaggaggggaacagaaggtgtgagccacaggtgctcctgggtctgaccagcaagtctaacccatgaagatctcgagctccaaaaccattctagagcccaccattttgattgttacacatgtgtttcagatgtatgttatggcatatctgaaacagcagagttctcagttttttgtgtgtttgtttttgctaagctaaacaagttttgctagagttcgctaaaacaaggtgctcagagtgtaagctcctctgtcaggaaatcggcagcactggtcacgataaaggagaaatcgtcctttgtcaagcacagaattactccttccagcagctctacatgttcccatcctcaagaaattgcaccaagagtgagctacctgcctatccctggaaaagattcagaagctcctaatccagaatccagggaggagatgagcttcctgtgactcttctcttttactgggatgttcccctgacctctcatcacactttactgtgttgtgaaatattgtttctcttagtttgtaacttgtctggtcttttgactaaacaactatctaaagaatatagaccacactcctgcagggaaagggatgtcttactggagttgtatttggaagctttataagcacatctgagacgttctctagaatcaaaatatttgtctatatttgtttttgcagttttcttacatatcagaacctctggcagcccttgcaagtccattatattaaaagccaaaagccataaatatgtacatcatagttcaaagtataagtaccaagaacaaagaaagttgtaaaaaatgctgtgtttgcatttacaggactaaaaactaagtatgcaacagataaattacaaatgtacatctcagcagcataggggtgattctcttatctttctaaaaaacacactgctgtctataatgacaatccaattgtggaaaattaccaacctc

SEQ ID NO: 11120 - DNA, 1206 bp, Homo sapiens
gtgtgagggagcaagagagaggggtgtgggagagaaaagttggaaaggagggagagagggagtgggagatgagtacaccatctgttttgctattttattcatctttccttcttatattcatcctttgggatgaaagactggggagtattgagaagaatattaaccatcaatttgtaacatacccttgatgcgttgaaagaataagccgctgctaccatagtgttatattggattgacaactatttattgacatttgctgtaccatttaggggataagcagagaagtatttgagaagaaagtattttgtaaaaactgataagaaatcttagtttgattccagtcattaacacttgagtccttaggcagagttaagataatgattataatactttagtcctcttcttgggatcaactgggcagggaaacattcttttaaaatgggagatgtgttgccaaggtactttgttacaaagttttgttgaaaaattttacaatgtaggaaaagtggtatatttttaattgtggaatttacaagacacagaactatggttatgtgtttctttgacttctgaagagtttctcaagttaataataattagacttgagaatgtaaacttcacattttacaagctaagctttagagatcaaagaatgatttaggtgaattacttgatatatccgtgttgacaacccatgaccatttatgcctatgtaagtataaatctgtgccacccaagtaaaatattataaattttatggtctattttagtcagagatttatgggtatgtttgtgtctgagttgttttctgagcataatacattgatatatcgtgagtttcctaacacatattaagttgactcacaatgtgttgttggtctgcagaactcatacatattttatatgagatgataccatcagtagacagtcttcgctctcttcatcctctatctataaattgttattaacaagaaaaattaagtttctccttttgtggccctaatatagttcaggcttaaaatcaacagcaaccatcctatatatttcttttaaatgaggaaactagagattgtacacattttatccacagagatcaaaaaaggttctgcttgctattaaccctaatggctttcagggaggaagcagcactctagcaagggaattagtattttaaaagtttctgttggggcaaaaaaaaaaaaagaa

SEQ ID NO: 11121 - DNA, 2072 bp, Homo sapiens
ctatagaaatgttttggtttcttttcctcctcctccttctccagaattggctttattaacagcaagaattcaagcagtctccctggtctctcatgcagttcaatccccgacagcctttcctgtaaatgccacctgctgtcacatgctccatccgggcctttgttgtcaggctcacttctttctacatcttcctccattgacttcagcagctccttcatgcatgccacagttttttctgaagtctttggatgcattttcataatgacaacatcaaagttcctgcttctctctgtgttaccaaatactttgttggagttgttgatctgacttgggactttgtaacattcactgaggcagacatgtattttagccatagttcaaatcctcctctctgggagctggccttgcacctctggaaaagaaccacatgttttgatcacagtggcttccaccaagagctggggaccactgacaaatggctggcccttcccccccaattctaaaggcctctgccagagctccagaagccgggcggagcctgccaacaaccattatcagcctgtccgagtagaccctatcttcttatttgaaaaaaaaccccactttctttagaaaagttagatatgtgaagatgctggtctacagggtccttttgaaaacatctaacatcttctatgggacgtttccacagttcaccacctgaaacacttggaccacacatgtttgcacatcctggactttctgtctgatacatctaggactgaacaatgggttctcccagaagttccagagggaattcctacaattctcgcttcaagatggcgctccagctgcatcacctgcaggcctgggctaggatatgtcttgactctccttatgacactgtcttggtggctcacttgggtgagtgtggggccaatccaagggaagttgcggggaagctcaaaaaggtaactcagtttttcttgggagaagagagattctgagcagattggaacgtaccatcaacagtgccttcttcctcctgagctgatatctgaatgagtccctattcacaggaagaccctggcccaccttgatgtcccactcaactgtaatccattggtcctttttgggcaatgactgagtcctctcctgaccaaggaaaggaatgcatctcaagcctctccccatcaggccttcattagccccatcccctacacccactgactctgctcccactcccgccactgtatcgcccagcgttgcttcctgcaggaaaccctgctgaggagtctagtggaggcagagatgccctgtgttgaacactccaccatgcattatgtcattttctccacacaacagccctgagaggaaggaagtgttattcccattttatagaagagaaaactgatgctcaaacaggttaaataatttctcaactattgactgaagagcatgggatacaagttctaggccattgtcggcaaagtctgtatgcttcacagcttggctgtgggatgtgctcctctgccttcaggagccaacccatcaccttggccaaccctttgaccagtgcaaacactgcatctttgtcagcctcctctgctagcacagccacccggccacctctataaccaatgccaacagctcttgcaagagcaggaaagactctccttagaccagagtgtcccatcctcagcactattggcattttgaacctgataactctttgtggtgatgaggtgttgtcctgtgcagtataggatgtttaacagcatccctagcctctagttgttctctggttgagaacaactgccctagggtactcatcctgtcagctctctctgcttttgagccaaagttcctgagaaagaaaggtctctgatgcaaagcctgtccccactatagcactttgaaacactactcttgctgggacaggcacctaaccaggctccctctcaccatctgtcttagtccagtccagctgctataaccatatccatgctggatagatgatacatgacagaaatttatttgcacacaattccggagcctggatgtacaagatcagggtgtcaggatgctcgagt

SEQ ID NO: 11122 - DNA, 2072 bp, Homo sapiens; identical to SEQ ID NO: 11121

SEQ ID NO: 11123 - DNA, 42 bp, Homo sapiens
ccagcctgggcaatagagcaagactccatctcaaaaaaacaa

SEQ ID NO: 11124 - DNA, 248 bp, Homo sapiens
ccagcattatgcttcctgtacagcctgcagaactgtgggccaattaaaccccttttctttataaattagccagtctcaggtatttctttatagccattcgagaacagcctaatacgccctccctttcatgaccccagagcctgcactcccaaatcctatgccatccaagggtgatgaccacctggataagaatgagcccttcactggaaaggactgtgtagaaacgaagcctgtactccccaacaagt

SEQ ID NO: 11125 - DNA, 248 bp, Homo sapiens; identical to SEQ ID NO: 11124

SEQ ID NO: 11126 - DNA, 1856 bp, Homo sapiens
tcgaactcctgacctcaggtgatctgcccgcctcggcctcctgaagtgctaggattacaggcatgagccaccacgcccagccagattattttttctttagtggaattcagccaattgaagcataacacatggcatgaacactctggaaaggtggctttggatctttccatttgttctctttagcgctgacttttgctttctagtccctgctagtgtgttggaatcttaccccatacagatgcaaactatgaaccaagaagtcagcatctatgcctagccaataattggttgttttctcgttcagagttcctcatgcccatggggtaaattcatatttcatccataagtgtgaccattgcagaagttctaggactgctactgtctgtatttttgtccttcagcatatcccagactaaacttactcttaaaatatgtttgtccaacctttggtttccttcctatggttgatattaagcctttcttctactcttagaagacaaaatggggagacaaaaaaggcaaccctgaaggtttttatcctttcagggtatctagcatttttctaatttagccctactgaagtttcttcagtaattaatcatctgtttttcagcctctaacctggctaatattatagcctacaattgtacttttaaagcccttttgtgactttgacatattgtgtctattgtgtatggaaaagtagcaggatcagtatgaagataatacagtatctcttaaaacaggcagccagcaaatgaactttctgcattggtcagaatttccatcatttcactgttaatgaggaaagtacagttctttagctaccatgaaagtcaaacatatcctaagccttttggaaaaagacatacatgttagaaaatctcaaatggatgagtcagcctgactgaccccacattgactccattttatatgctggccaaatcctgtttctgactttcctggcacagccctggacatgcttctgtatcataggacttgttccccagcgcctttgctacttccttcaggcacattcctaggaaagattggcagtggggtttgctctttgccagcactcctgccggtttgggggttatggatgccaggttgggctccaggcactctgctctccatttgtggaggcagggacggtaacagcacctgacaagtagggatgatcacattgtattcagaagcctggtggagctctataaacccaaatttctaacagtctccaatgtaatgccctgtaatagaagctgtccttaaccctcaatcatctgtattcagctagtataaaaatgcaaatctgctcttatgcctaaacagttaggagtagaggagacttggcttcctttggaaagtcaggatgatagcttcatcccattctggtttttgtgattaattgtgacctacaaaggggtttactactctagcaggaactttgaatttcctatatacatctctttctggttagcaggcagaggaaatatcgttgacttttggcttcctggcaaatgtctcatttgccttgtcatttgttgattccttttccctgatctctgtttggtgtgataatgtacagcaaagctgaaaaccgcagggctacatgtacacttgtaggtacctatgttgtgattgccaaaaggctcagaaagccagttttctagtgaaaatggctaacattctaagaaatgctttcactgagaaagagaacgggtcaggggaaggtggaacttaaaggaagatggagtgttcctgaattcagattcctgaattagccatttatagtttcatgggaagacaatgaaaaaaaaaaaaaagaaagaaagaaaagaaaagaaaagaaacaa

SEQ ID NO: 11127 - DNA, 293 bp, Homo sapiens
tttttttgaggcagagtctcgctctttcgcccaggctggagtgcagtggcactatctcggctcactgcaagctccgcctcctgggttcatgccattctcctgcctcagcctcccgagtagctgggactacaggcgcctgccaccacgcccggctaattttttgtatttttagtagaaacggggtttcactgtgttagccgggatggtctcagtctcctgacctcgtgatccgcctgcctcggccttccaaagtgctgggattacaggcgtgagccaccgcgcccagcccaaaa

SEQ ID NO: 11128 - DNA, 1462 bp, Homo sapiens
gagactacaggtagatttgctgaatttcatgggcaacactaggttttcattttaccttattgttctgccatttagatgtctcctcttaaaacatttttacttgcagtgatggcttccttagactcgtgtgtgattgttgctggggcagttaggtggaactaataggtgttgcttgttgattccctgctaccaagtactagttttgaaatttgagtattcattaaaaacaaatagggatttctgtgtctcactcctggaaattctgactcagtgggggtaaggattaggaatgtttaatttttgaaagccctgcaggtaattttttttctactttttaaaaattataatttttattttctttactgttcttttaagacatcctgttatagcatctgcaggtgattttgatgcccagccatgtttggggaaaaaagtttgggttctgagtgaaaatagaaaacgtaatgacatggaaaggaagtcaggggataagaaaagctctatggccagccatggtggctcacacctgtaatcccagcactttgggaggctgagatgggcagatggcttgggctcacgagtttgagaccagcctaggcaacatggcaaaaccatgttcctattcaggaacaaagaatagatcacaaattaaactctgtgggttttcataagtggaaagttggctttcgttgttctgtatttgggtgcttagtggacaggagttatctaaaagaagtaattatagttgtaatgcggaccctcaaagttgaaagtagattgaaatccattattttacaaggtggccttactatttatagtttgactgtaggtatggcagtgagagataaaattactttttctagctttgcaaaacgccaaacgtctttgaaattaagagtaaaaggggtttaaaatatgtactgctttataaagcaggaaaaccccactggaacattttgggtgtttacagaaatgggtattccatgggagagaacgtggtaacctatgttttgtcatcatttgtttaatcactgaaaatatattaacaggccaggcatggtagctcatgcctgtaatcccagcgctttggcaggctgaggtgggaggattgcttgagcccaggagtttgagatcagcttgggaaacacagtgagactccatttctacaaaaaaagaaaaaagaaaaaaaagtcacatgtggtggcacacccctgtggtcccagctactttggaggctaaggtgggaggatagctcgagccccagagatcaaggccgccgtgaactgtgatcgcaccactgcactccaggctgagcaacagatcaagactcttgtataaaaaagaaaaaaaatttttttaaaaatataaatatagattaacaaagtaacagggaatataatattttcaggttggtcatatagaggaaatactatattgtgttattcagcttaataaaatataa

SEQ ID NO: 11129 - DNA, 1462 bp, Homo sapiens; identical to SEQ ID NO: 11128

SEQ ID NO: 11130 - DNA, 636 bp, Homo sapiens
tgaatcacattcgactaaatattgtgctttttaatactcactttaaaaacaaaattaattgggcaaatgttcatatccattttaaaaaactatcctcttaaaactagattgatagtagacattaataggcttgatgttgtttataatattttgctatattttaagagcatgcttttgtatattttctgttttagtgaagcattttaaaaatgcccccctcccacaactgcaggaataaatctaacagattttgaccaaaattactctaattttgaatttcttgaaactgggtatggaaactagacattaaaaaaaatctttatttttaagcacggtttcttggtcagtagcttctgtattacgggagaacacaagaaggggccttcttgacactcaagaaatgctctttttccatctacaaataggaagacaccctttgtggtatttttgttttgtgggccctgaatgaaaacgtattatgatcagttttaaaaattgctgcccctttaatatctgaatatattcgtggctagtgaagcacatgcatctgtcagatcatgggtgagaattcacttttctttttgcgatttctccagccacaaggacaaatttagttttgcagagcagtttgacacc

SEQ ID NO: 11131 - DNA, 636 bp, Homo sapiens; identical to SEQ ID NO: 11130

SEQ ID NO: 11132 - DNA, 648 bp, Homo sapiens
cctctgcctcccaggctgaagccatcctcccacctcagcctcccaagtagctgggactacaggcatgcaccaccatgcctggctaatttttgtagagagggggtctcactttgttacccagactgggagatttttctgtacttggctgtatgctttccattgatctgctgctgttttcactattattccttcttttgtgtgggtattttcttttgatttttagaattttacttgtaaacatgctacatatacatataatttggtgccctgtttttccatttacatattatactttccatattagtacattgtctgatatttctgcataatactcaattcaacttacctgctattgtttttatcatatctctattacaaacattaggcccatttcccttttttaaaagaggaaagtttgaggttatgggcggtgttctgataaaataaataatattttgtcatgtttgttttttcattgattaggaaacattgttttgaatttaatgcctcaaatttggtgcacaataatttgaagggaaaaactgacaagtttgaaatgaacattgatattacataatttacattaaaatgatacatcttttgtaaatttgtaagaagaataaataaatgaaaacctgattacctttc

SEQ ID NO: 11133 - DNA, 648 bp, Homo sapiens; identical to SEQ ID NO: 11132

SEQ ID NO: 11134 - DNA, 6556 bp, Homo sapiens
cacacacacacacacacacacacacacacactacctctgccaaccacatacctatcattgagttctgtctactcttgtagggcctcttgaaaacacttctttccatttcttttatcaggttcttatcagttgtctaatatctggccttctaactcattgcttagctttcaccagtttctttccctgctttagatcatcttgtgcatttttgtagacaatactttcctaatatcactcatggtcttgggtgtctatggagagagtgagagagagagagattccctaaattggagacaaaaaggaaaaaaaagttgggtcacttctaggatcaaatctagttctcttttatgaaggctcaaaagttttttccctctcagaatatgctaaacttcaaatgtgatctctgaaaccatccgcaagtctgagatacgccatggttttttgggttttgctagcaattctgggcagagatcctggttgtccttcaacattctacttttctgccatattattagaattttagcttggcacatgatcacccagaatagactaatgtatttcatcaattctttataaaccactaagaaataatacctaagatagggagtctaacaggttaccactgcataaatatgggacaccaaggtttataccttcagagcaaggataaaggagaaatcttccatgaagaaagagggagcaaagtgtaggggtgggttgcccctacacacctgtgggtgtttctcgtaaggtgggacgagagatttggaaaagaaaaagacacagagacaaagtatagagaaagaaataaggggaaccggggaaccagcgttcagcatatggaggatcccgccagcctctgagttcccttagtatttattgatcatctgtgggtgtttctcaaagagggggatgtgtcagggtcacaagacaattgtggggagagggtcagcagacaaacacgtgaacaaaggtcttggcatcatagacaatgtaaaggattaagtgctgtgcttttagatatgcatacacataaacatctcagtgctttacaaagcagtattgctgcccgcaggtcccacctccagccctaaggcggtttttccctatctcagtagatggagcatacaatcgggttttataccgagacattccattgcccagggacaggcaggagacagatgccttcctcttgtctcaactgcaagaggcattccttcctcttttactaatcctcctcagcacagaccctttacgggtgtcgggctgggggacggtcaggtctttcccttcccacgaggccatatttcagactatcacatggggagaaaccttggacaatacctggctttcctaggcagaggtccctgcggccttccgcagtttttgtgtccctgggtacttgagattagggagtggtgatgactcttaaggagcatgctgccttcaagcatctgtttaacaaagcacatcctgcaccgcccttaatccattcaactctgagttgacacagcacatgtttcagagagcacggggttgggggtaaggtcacagaatctcaaggcagaagaatttttcttagtacataacaaaatggagtctcctatgtctacttctttctacacagacacagtaacaatctgatctctcttgcttttccccacagcaaagcaatttgcatgctcagccttggcactggttggaaggagggactgccagtgagaatttgaaccataaaccagtacacatgtaggcttgtaatctgaattcacacaaatggtatcatcctaaagagctcaagcagaaaatgtaattaaagtgaggttagtattgcccctagtgactggcagaagcatatgcaaatcctctatggaagaactcaacttcaattcaggcagacaacttagtatctcaattaaaaagatgtgataatgtgaaaaataggtgttacagaattgatgactacaatgtatctcccatccttgaagctcacaccctcccagctaggggtagccatgtgactgagttttgactaatgggatataaaaggaagtactggccgggtgcggtgtctcacgcctgtaatctcagcactttgggaggccaaggcgggtggatcacctgaggtcaggagttcgagaccagcctggccaagatggtgaaaccccgtctctactcaaaatacaaaaaagtagctgggcgtggtggcacacacttgtgatcccagctactcaggaggctgaggcaagagaatcgcttgaacccgggagacggaggttgcagtgagctgagattgcaccactgcactccaacctgggtgacaaagcgagaccttgtctcaaaaaaaaaaaaaaaaaaaggaagtactgtgtgtggttgcttctgggaaccttcctttcttgcagctgtagcattctgtttgcctcttctttctatttctctgttccatcctgctgcctggaagcagatgctgccgtttacacctgaacataagggttgcacagggggatggtagagtagtgggctgcaggggctgattcttggggctttgtaaaacagagacatatcagcactggcctgcacactttgagactttcacaagaaacaaattaaaaaattgtttaagccatagttacttgggttttcctattaattatagctgaatcctagctgataaaggacataaagattattaagacatgtttgtcctcaaaaaatggagagccaccccagggacagtttctattcaatgtagggagggctataatagatgaatatacaaagtgggagtctagggagaaatcgtctggtagaggagggcaaagagaaatctaggaagatgtttttaaaaatatggaatccttgaacaggacctggttttaaaggtttacttcagaattgaacatatttttttagtctagacctttaggggaaaaacttaaagctttcaggactcaaagacaagttactgttcccatggctaaattgcattccatatttatttgacaaatacttattgcaggtcgggtactgttttagccactggagatgcagtaagaaacttaattaattttttttttttttgagacagagtcttgctctgtcacccaggttggaatgcagtgacatgataacagcttgctgcagccttgacctccgtggctcaggccatactcccatctcagcttcccaagtagctaagactacaggtctgccccaccaccaccagctaatttttaaattttttgtggagactggagtctcactaagttgcccaggttggcctcaaactcctggcctcaagccatcctcccacttcggcctctcaaattgctgggattataggcatgagacaccacgcctggcccaacaaagttttaaaaatcactgtatttatgaagtttacattctagttgtggaaaccgacactaaacaaatagacatttcagtggtaagtgttacaaaggaaagagacaacagcataagggaatggaacatgaaggtaggggacacttttagaataagatgatccgagaaggctcctctgaggaagtgacatttaacctgaaaccttaatgatacgaaggatcaaaactattttaaaaattcggaagtggaggtgggggagagaagttctaggcaaagggaggaaatagaagctgatggctctccaccaggaaacagtggatgaagaatggagaagaattgtagggcccaagatcagagagatgagtagggccagatcatgtgggcaagcttttatgtattagcacgcttagaattaatattctgcttgagaactaacctgatatttgaaacagagtgaaaaagaaaatacctcccacagtatacttcatagcttcttatttagcccaagctgtcagggaaataaagtccagctatggctaagtttcacataatgcactgctttggagtttttgtctcatctgttagagtaagataagtaccacatactattataaggctatatagcataaaatgatgatgcattttctcctgtcattgataagaggatttttttaaaagtaaatttcttggtttagaatttgaaagcagtttcaaacttggataacacaattcagatctttttttaaaattattttttatttatattaaaaaaaaattttttttttgagatagggtctggctctatcacgcagactggcacacagtggcacaatcttggctcattgcaacctctgcctcccaggctgaagccatcctcccacctcagcctcccaagtagctgggactacaggcatgcaccaccatgcctggctaatttttgtagagagggggtctcactttgttacccagactgggagatttttctgtacttggctgtatgctttccattgatctgctgctgttttcactattattccttcttttgtgtgggtattttcttttgatttttagaattttacttgtaaacatgctacatatacatataatttggtgccctgtttttccatttacatattatactttccatattagtacattgtctgatatttctgcataatactcaattcaacttacctgctattgtttttatcatatctctattacaaacattaggcccatttcccttttttaaaagaggaaagtttgaggttatgggcggtgttctgataaaataaataatattttgtcatgtttgttttttcattgattaggaaacattgttttgaatttaatgcctcaaatttggtgcacaataatttgaagggaaaaactgacaagtttgaaatgaacattgatattacataatttacattaaaatgatacatcttttgtaaatttgtaagaagaataaataaatgaaaacctgattacctttcttatttgaagtttatttggggggtcagaatttgacttgcttctgtattatttcacttttcaaaagaatccgccaggaaagattaaaattcatggtcttcaaatgagaaatcaagtcttactttattcaaaagaaaatgttggaagcccatttagaaatgatttaatattgaagttcctatagtgttagttataaattcaaccttgacatttctcaaaattatacaaagaagtggtagagtagagctgggagttcattggggcttgtagattttgcaggaatttttttttttaatgtgttaaaacaaattttatttacaataacaggcagcagcgggatttggcctggggatggagcaaagtgaccccctgctgtagagcaaggtgagtgagtcacgcccttgacaacacattcttagaagtcatgctcgttaggggcaagttctgtttcttccaccaacgtcttcaagcctcagaatccttttctatcaaacggggctaataatagaatacaccatacctcagaattaagtgaggctgtgcaaaaggtgcttaattctgtgcctgaaatgtagcaacagacaataaatccatctaacaacaaattcttatgaagaaggtattacaataaattcttatgaagaagttattacaataaattcagtgacaagcaatgatggcaatggaaataaaaatggagaagcagatgtaattaagagatttgagaagtaaaattggcagttcctggtgactaaagcatgtgttaatgatagtgatagtgatatccttggaccattagttgttcagctttgaataccctccccaatttctctgcttattctttttttttttttttttagtatttattgatcattcttgggtgtttctcggagagggggatgtggcagggtcataggataatagtggagagaagatcagcagataaacacgtgaacaaaggtctctggttttcctaggcagaggtccctgcggccttccgcagtgtttgtgtccctgggtacttgagattagggagtggtgatgacttaacgagcatgctgccttcaagcatctgtttaacaaagcacatcttgcagcgcccttaatccacttaaccctgagttgacacagcacatgttgcagagagaacggggttgggggtaaggttatagattaacagcatcccaaggcggaagaatttttcttagtacagaacaatatggagtctcctatttctacttctttctacacagacacggtaacaatctgatctctctctcttttccccacatttcccccttttctattcgacaaaaccgccattgtcatcatggcccgttctcgatggtcgctggatgttttattttccagagaaccaaaccttagcactgtgcacgccacacctgagggcggattatcccaggccagcccaagtcagggcagggctggaaactaggggcttgttgcccagcgaaccgccacaacagagagcggactcgatcctgcgctccggccgggctgacctgcctgcgtccagcccccgcgccctgggcctgcctgggtctggatctgtgtccgagtctgggtctggatctgggtccgagtctgggtctggccctgcgctcagggcccgcggaggagactatggaccccgccgggcgcgcccggggccaaggggccacggcaggggggc

SEQ ID NO: 11135 - DNA, 859 bp, Homo sapiens
cttattctttttttttttttttttagtatttattgatcattcttgggtgtttctcggagagggggatgtggcagggtcataggataatagtggagagaagatcagcagataaacacgtgaacaaaggtctctggttttcctaggcagaggtccctgcggccttccgcagtgtttgtgtccctgggtacttgagattagggagtggtgatgacttaacgagcatgctgccttcaagcatctgtttaacaaagcacatcttgcagcgcccttaatccacttaaccctgagttgacacagcacatgttgcagagagaacggggttgggggtaaggttatagattaacagcatcccaaggcggaagaatttttcttagtacagaacaatatggagtctcctatttctacttctttctacacagacacggtaacaatctgatctctctctcttttccccacatttcccccttttctattcgacaaaaccgccattgtcatcatggcccgttctcgatggtcgctggatgttttattttccagagaaccaaaccttagcactgtgcacgccacacctgagggcggattatcccaggccagcccaagtcagggcagggctggaaactaggggcttgttgcccagcgaaccgccacaacagagagcggactcgatcctgcgctccggccgggctgacctgcctgcgtccagcccccgcgccctgggcctgcctgggtctggatctgtgtccgagtctgggtctggatctgggtccgagtctgggtctggccctgcgctcagggcccgcggaggagactatggaccccgccgggcgcgcccggggccaaggggccacggcaggggggc

SEQ ID NO: 11136 - DNA, 359 bp, Homo sapiens
gaagaatggagaagaattgtagggcccaagatcagagagatgagtagggccagatcatgtgggcaagcttttatgtattagcacgcttagaattaatattctgcttgagaactaacctgatatttgaaacagagtgaaaaagaaaatacctcccacagtatacttcatagcttcttatttagcccaagctgtcagggaaataaagtccagctatggctaagtttcacataatgcactgctttggagtttttgtctcatctgttagagtaagataagtaccacatactattataaggctatatagcataaaatgatgatgcattttctcctgtcattgataagaggatttttttaaaagt

SEQ ID NO: 11137 - DNA, 359 bp, Homo sapiens; identical to SEQ ID NO: 11136

SEQ ID NO: 11138 - DNA, 883 bp, Homo sapiens
gaattgtattcaaataaaatataaaaaagaaagatcacttagagtaactttttcctgcctcacttgaataatgcagagacacttcaaattcgtaacatgtttagggggtctcaaggaggatgggctatgcgttttgaatatatgcatataaaacaacaaatgacataggcctaataatttctttgcatgtgtataatcctctcttcaatgtaattcaaaggtctcttttttaatatcagtctttacattgtccctgtaatatagagctatacacctttcctcaatcttttgtgatagtaggaaaagtagcattataagaagtatttataaatttaattcactccaccagaaatgttttattttaaagttagcatgggacttgtggtatccgcaaggtcagtgtccccactgaagaagtggccttctagagtaagaagtttcagcatcaacatgggtaatggaagccatataacagaacttaagaaggaactttgtgctaagaaaatgtagacagtggttataggcatatatgtaagaaggctgtaagttaaaggcaagagagatgtagcaattaataggagatattttttctgccatcattaacaaatgtatttgtttactactccttactttttaactcatccaccttgtatccactgctacctctgccaaccctgtatctgttactgaattctgtctactcttgtagggcctcttgaaaatgaaaatatccatttgtttccatctcttttgtcaagcccttatcagttgtctaaactcttgactttccaactgatttgtcagttttccctgctctaaaccatcttatgcattttttacagattagctataaacagcattcccataatagcactctcatgtc

SEQ ID NO: 11139 - DNA, 1288 bp, Homo sapiens
tggccaggcgcggtggctcacgcctgtaatcccagcactttgggaggctgaggcgggtggatcacaaggtcaggagatcgagaccatcctagctaacacagtgaaaccccatctctgctaaaaatacaaaaaattagccgggcgtggtggcgggcacctgtagtcccagctactcgggaggctgaggcaggagaatggcatgaacccgggaggcagagcttgcagtgagccgagattgcgccactgcactccagcctgggcgacatagcaagactctgtctccaaaaaaaaaaaaaatgcaaagattagctgggccaggtgttcacctgtagtcccagctattctggaggctaaggtgggaggattgcttgaatctggagggcagcggttgcagtgagccaagatcctgacacagcactccagcctgggtgacagagtgacgtgtctctaataaataaataagcccaaatataactaaagtactttttgttttctgagacagaagtctcactctgtttgcacagtctggagttgcagtgggtgccatcttgggctcactgcaacctctgcctcccaggttcaagtgattctcgtgtctgagccacccaagcagctgggattacaggcatgtgccaccacgcccggctaatttttttgtatttcctttttagtagagacatggttttgccatgttggccagggtgctcttgaactcctggcctcaagtgatccacccactcgggctcccaaagtgctgggattacaggtgtgagccactatgcctggccaaaagtaaccattttgtttaattttttctttttcttttaattttaagttccaggatccatgtgcaggatatgcaggtttgttacatagggaaacgtgtgcctcggtggtttgctgcacctatcaacacatcacctcggtattaagtccagcatgtattagctatttttcctcatgttctcccaccccccgccacagcccctgttaaattaatttcttattctccttaatattccatacacattcagattccttctcccctacaaaaatatttgctattttgtccttgctatttctcatacttagatcattcatacactatatttattttttcattaaactattttaaaacctttggagtaaagcatttaagtatttatttaataaacccttcagacctcatgctaaagaaaacacctaagtgaacattttaaattttaataggtgcttatctatagtatcctcatttctcttaaaaaaaaaaaaaaaaaaaaaaaaaaaa

SEQ ID NO: 11140 - DNA, 1606 bp, Homo sapiens
tcaaaacaagtatggattttgaatgtgaatattttaaaagatatattgaaattacttagagtagccctggatatatgttcattatggcatttatcttgttaataagtttctacatgctcattttaatttccagtagcatgagcaagtaacttatatttcattcccgagaaactaaaagaatctgcctaaagagtatgaaaattgccattaaatctgtattgtctactttctggatggttatatcattatagttctctgctcttccacacatttttgggctgctatcagtttgtaagtaatcattatacaaactaaatttaaaaatttaaacaagataattttatattacttggatcagggaaaaaaatgcagttgctgaaggtggtttcatagctaaatataagcaattattttgctttttctacttttttggattttatcatcttttcccttttagtaatagagtaatacaggtaggaattaacttagcactgccaaattaatagtaatattagaactgtgtacacagcacagggttaaggttatatagaaaaatgtctcatccatgtttaatttggctgaccagcccagttgattagccaattttattgttttgttaaattaaaattctaaatatagttgtccattgttaaaataagtgagtagggttaaaatagagaattgataaaaataaagccttaaaaatcttttagctaaagtagcaggcttcaagtgaaattcagttttggtctcctttacaggaatagctattcagtcagacagaaccacttatcacgttttgcagtatctcctgaggaagtcagaattctgagccagcatgaagacggaatcttgtctttgatctgatttgcaaaccgtacttttattctaatcatgtgcaaggtggaggttatagcgtgggaactaaaatcttagtaagtgtggtttttattttagctattaagtagtatactttcttatagtgatttttttttcttcttagcagagttcacactataaatggtgtatggacttggcaggcaggaacataatacagtatacttcaaaagtgaaagatttaggccaggcgtggtggttcatgcctgtaatcctagcactttgggaggtcgaggtgggtggatcacgaggtcaggagttcatcaagagaagcccggccaagatgctgaaaccctatctctactaaaaatacaaaaattagccgggcatggtggcatgcacctgtaatctcggctacttgggaggctgaggcaggagaatcgcttgaacctgggaggtggaggttgcagtgagcttagattgcaccactccactgcattccagcctgggcaaaacatagcaagactccatctcaaaaaaacaaaaatgaaaacaacaacaacaaaaaaacaaacaaacaaaagatttaaccctctaggttcaggaaaaatccctgagaaagagagagcaaagcttctatactctgcctaggatttctttctctttccgggtgaaaaataggtgttgggatgatactgagttgataaaagtatttaggaaaagtggccagtgtctaaattcaagccattaaaaaaaaaaaaattaaatt

SEQ ID NO: 11141 - DNA, 1606 bp, Homo sapiens; identical to SEQ ID NO: 11140

SEQ ID NO: 11142 - DNA, 677 bp, Homo sapiens
atgtgtcgtgcccaaagacctagtggaacaattattacagaagatccatttaaaagtggttcaagtgatgttggtagagattgggatccttccagcaccgaaggaggaagtagtcctttgatatgtccagactctagtgcaagaccaagggtgaaatcttcgtatagcatggaaaatgcaaataagtggtcatgccacatgtgtacatatttgaactggccaagagcaatcagatgtacccagtgcttatcccaacgtaggaccaggagtcctacagaatctcctcagtcctcaggatctggctcaagaccagttgctttttctgttgatccttgtgaggaatacaatgatagaaataaactgaacactaggacacagcactggacttgctctgtttgcacatatgaaaactgggccaaggctaaaagatgtgttgtttgtgatcatcccagacctaataacattgaagcaatagaattggcagagactgaagaggcttcttcaataataaatgagcaagacagagctcgatggaggggaagttgcagtagtggtaatagccaaaggagatcacctcctgctacgaagcgggactctgaagtgaaaatggattttcagaggattgaattggctggtgctgtgggaagcaaggaggaacttgaagtagactttaaaaa

SEQ ID NO: 11143 - DNA, 710 bp, Homo sapiens
gaagagatgtggttttgccatgttgcccaggctggtctcgaactcttggattcaagcaatccacctacctaggcctcctgtgctgggattacaggcgtgagcacctagccactcttcaatgaattttaccttgcagttactaaacaacattcctgcaatgtttcaagttctctcagagtgaacactgtacatcattacgtttttttttttttttccttgagacagccttgctctgtcatcccaggctgaagcacagtagcacaatcataactcactgtagtcttgaactcctgtactcaaatgatactccttccttggcctcctgagtagctgggactataggcacaggcgactgcacctggctaattaaaaaaaagttttttttttggtcgggcatagtggctcgcgcctgtaatgccagctctttgggacgctgaggcaggtggatcacttgaggccaggagtttgagaccagcctggccaacacagtgaaactccgtctctactaaaaataaaaaaattggctgggcatggtgggatgcgcctgtggtcccagctactctggaggctgaggcaggagattcacttgaacctgggagtgaaggctgcagtgagccaagattgtgccactgcactccagcttgggtgacaaagtgagactgtctcaacaacaacaaaaatcgtgtttttttttttttttccttttttgt

SEQ ID NO: 11144 - DNA, 710 bp, Homo sapiens; identical to SEQ ID NO: 11143

SEQ ID NO: 11145 - DNA, 677 bp, Homo sapiens; identical to SEQ ID NO: 11142

SEQ ID NO: 11146 - DNA, 1217 bp, Homo sapiens
cttacagttaatcgtttcttaataaagaagcagaatttagaaaccacaggatagtgtacccacagatgggtgttatcaaggccagtcatgaggatggtgtcctggagtcttgtccaccctctccatacaagtctcaaaagtcatcctcctactcagtgattcacgtttagtggtttatattattaaggtttgattcaaacagagccttttctgtcctgtagataatctacatgtttgtagaattattttgaatatgtttgaggaaaatgtttaaaatctaaatatactcacataacttgattattcactcctctgaaaagatgctggataggctaccaaagttcccaagtggtagataattcagaagacttgtttgaatttggattttttttttttttggagtggggaagggtataaaggaggcttaaaatttgaatccataatatatctaattacaggagaatttacaacatctcaagtacgtaaattaagttgtcattgagtgaaaggttcacttggacctagtgctgcctcctgtttattacatagcatggcccttatgtcttgagttgaggttatcatctcaatgaggcttaagctcctagagtacaggaccattttgttgattgtctttcttcatagcttctctgcttggcaaagagatgggagggggccagatactgactacctggggtaggcacattatgtgttaaagcaagacagaggccagagaggggcaggtagacctgcatagcagcagcctcagcagctgtcttggtaaaggagagagagagacatggggccagtaattccggggtgctcagaagttttaggagggaatgagcctcagggaggagtgagcacctaaatgaacgcagtaaaccttcatggaccaacagtgattgaggatttgtgggcagccagagggagtctgactgaagtttacttggaaagaaagggcttgctaagaaaaaagggagtaaaaatgatgatagggaagtgtctaatgtatgtgcacatataagtaatacaaaagttttgagctcttccaagtataccatttatatacaaacaaataggtttattcattcattaaactactttggaagcgtcagtggatatatttgaaagtggtaatcctgaatctcttttaaactattatatgattcataatggttctcaggaattaataaatgattactgtgtttagctctgta

SEQ ID NO: 11147 - DNA, 230 bp, Homo sapiens
ccacgtgggcattgcctgggcccagacctacgccacggactaatgctgttgggcccaggccagtccttgttgctggcctccaaggcaaatagtgcttcaccctgacctctcactccaggacagcctctaagggatttgatctgctcatcttcagttgaatgccctcactccaagactggatgctggatctcatagaaaattcacagccagacaatcttctaatctggagt

SEQ ID NO: 11148 - DNA, 362 bp, Homo sapiens
gggcgcacagaggagttcaggcaatgacactggacatgtcatcagccctgggcaacttcaggcgcagtgttgggaaaagaatagacaaggtcccaaggtcaattccagcgcctggatcctctgatcccagcctcgctctgcaggcaagcccaagaactccaagcacaatcgccaagatgctacccaaggagggaagcaagatacctgaaggacacccaaacctcagtcattctaattcttgggaccacacaagaagactgaaaggtattattttttcaaattaatttgaagtgtcagcagaaaacattttgtttcattaaagacagcaggcctcaagaaaaaataaatcaatgaacaaataa

SEQ ID NO: 11149 - DNA, 1960 bp, Homo sapiens
caagctttctgaaatgcgtaagttatgatacatttgaaaagtgtaacatcactgatgctccttgccataaacttaggcaatatgaaacaatcttgctcttagaaccacttcaaatgattggtaaattggggtcacttatggtaattttatttataatctttaatcttgtatctacatctcttttctcctcttccttctcttacattcagtaaatctaaggcttctttgagtttctgtgccctctcttacctattggcaatgtctgtaaagacacagctcacctctttcttctcttctgggaaatattattagccattatgctttcagcccacatttgttcacttattatttccctgtgtagaccctacaaaatgggaaccagatctttttctatagttttagataaaggtagtctggcagttttctagagaaattcattattagaaatttattctaatgggaacccatttttggcttactctgttggttgctttgacctctgtttttccttgcagagctcgacttattaatatcatttaggagcactgggaaacatcattctgcatatttatcaggcaattcatacacacatccctacagttcagtgtatagagcttctctgttttggacttaaactgaaagattttaatgactggtcgtattggcccagctcctaatatgcagatgaatcattgtgtctgcactgcggagtgttggccatctttttacttctgcttttcttaagtagatgcaaatattgaggggatcctaaagaaggacaggaagagtaccagcatttttttttttctaaatctgccactaaagtccctttggattggattttagatagtcatggcatttgaataacctgcatttattaatctctggaaataagtgaaaaactagaaaaggctgaacgtacaatcaatataatgcaatactggggcctaacaaagtggataaatgatatttatcagcaggcgactgctgtttaattcacaggcacaaatgcccacattcatctgtgacactgaatcagttttcttgtgagtgttgtcttccctgaggtttctttctcttactcttctctccttgctcaaatttcagagttgtcatccacaattctgggaaaggtgatgtttcacttgcttcattcaataaagatggggtttaggggggtgacacaaggtatggctaccaatgtctaatgctggtattatatcctttatccagtatgctggggagaaagtacaatcattttgctttacttcatagctatctggttcattaaatcccatgagtcttggtaaattatgaagcaattattgattttgttgtggtcaacatcaagatatatattgattttcccaccagtcaatagtttccagaggcataatcaatattgatgtttgctgaacatgtgtgttaatgtcagtgtgggtatatgtacttagatctctacactcagatatttattttatactctttctgaacgtttttgtaaaaaactattttctcccaaagatcctattattttttggctgatttattcagttcttcctttttgctttacatttttaatctcatttattcttccccggattgataatggaaaggaaaactaaggctttggaagaagtctatttgcctttaatgaaccggttgggggtgagtcttcctgatgagattgtgattaattgcaaagtgagtattacttcttgtctccatcctgtcggttcgatagaatgacaaaaaaagttgaagactttcactctccattccagcatctaccagaccaacataactcagtaagcacatctgagaatccccctcatttactcccagtacttttttcaattatgtggaacatagacgaacaggtcaaacttggatttagacaaagttaaatgatcaactacatgatgcaatttaatgggcacaaaaataaaaaaaaaaaaaa

SEQ ID NO: 11150 - DNA, 1960 bp, Homo sapiens; identical to SEQ ID NO: 11149

SEQ ID NO: 11151 - DNA, 303 bp, Homo sapiens
gagacctctagaaatggcatcattaggccttcttctttctgagttctttccttcataagttatgtacctgataaggactttatgcatcagaaagtatggcgtagtatagaacaatacaggcagcatggcacagtggaaggaactcagggctagttgtcaagagatttgggttcttctgcgtgcttaatgctagttttatgatttggacaaatcacatcgcctacctggacatcggtgtctacatctgtgggatgatgatgatgatgacagttaagtgcttaacaataacgaactcatttaatc

SEQ ID NO: 11152 - DNA, 303 bp, Homo sapiens; identical to SEQ ID NO: 11151

SEQ ID NO: 11153 - DNA, 1484 bp, Homo sapiens
gtgaacgtggcatcctggacttttgcactgctcatattggtaaggcaagcaccacccctggcacacacacggtcaggcatgacataaaaagatgttgctaagggacattgaggtctatttcttgggacaagtaggaattttctatccctgttcattcttcatcttggccacacacatttgctctcttgctcatcccacagcgcctcccacaaggccacgctggatcctgccacagtgttaggttacatttccttccttctggctcaccagatgtggacctgactgggaaggctggaagctactgtccctggagccctactctcctggcttggtgcctccatggggaatgacagtgggcactctgcacccacatggaagggagtcccacaccttctaaggtctcctttgtaacctacctctggctccccactgtgccacatccctgtaccatggcatctgtgtcttttggacagcaccgggctttcaggatgactagtcagggttgtcttgtctggaccagatgctttgagggtgcagccttctgggaattccctctagggattttctatgatgctggcttccctgtaagtcccactccaggcccgggtactctgtccaagccccacagcagaagaggctcttcaggggcctcatttggtgtcaactcagcaagaagtgaagtttaaagcccagagcactgcagggcattgtactggtgtaggaggggtacatccagggctccaaggtgttttctgtgctgagctcatctctcatcccccagccaccacagtgctgggtcatagctgggctgttgttttcctatggcaggcccagccctgtctagctctcagttcctctgctctgcagccagggcccttggcctgaaccctacacatagcagcactcactcgggctgtaggtattcttcagtacctgctatggcctggcatttagggaactctcaagcaacagcacaagtgaggcccctgctctcccgtgctttgggtccgttgtaacagcataaaaagcttgtggagtatcttaggtgagtccactcttgcagctgggcaggcatcatagtgttcggctccctgttacagtgtcgtttcttggggacatagcagatggaaaattctggggtagttttgatttagcagttatcacatttgctgttcatggagtgtctgcaggggctaggcacccctcacgatgcttgtgtctgccagccatggtggctcatccctgtaatcccagcactttgggaggctgaggtggtagatcactcagggtcagaagttggaaaccagcctggtcaatatgacaaaaccccatgtctaccaaaaatacaaaaattagccatgggtggtggtgtgcacctgtagtcccagctactcagaaggctgaggcaggagaatctcttgaacctgggaggtggaggttgcagtgacccaagattgcaccattgaactccagcgtgggcaaca

SEQ ID NO: 11154 - DNA, 1139 bp, Homo sapiens
ctgcaactgtggcaagaccgtgtgtcctgtcagagtgggtgaccagggcctttgccagcagacgacttatggagaaatgtttgagtagatggaggaaccgatttcctctggaatccagaggtacagaaagcaagggtctggctcttttcttctgttctgagtctacactatggcccttcccagcttctaggctccaggttaaggggagtggctggtgcaaggtgggtggccagagacgaggtccccatgaagccttcagattttaacctgagatggagaggcagcttttaaacagtacctttcaccactaggcatacaggggcctccctactgactctccagacctgtgggggaggggagcggatcacctctccttgagagggtgagcctaagccgtgggcattggggtggggtacctggagcattctaggtgttcggggctattaatatttatgtattattctgacaactaagggcaggatgtgtgcttcagtgggcactgtagtttgaatacctggatgccaaaaacagaaaacaaaaaaacccacacccttgagtacacatgatgggagtgaagcagtcctgggtttgagtccccagtctctcacttcgctgtgtgactttggacaatgtattctccccatccacaaaacagagctaataacctccacctggtaacatagggatgggcactggtgcagggaatgtaaagtaacgagggacgtaggaggtactcattgctgtagaggtaaacttgacctcttttcgacccttcgtacaactgtattagtccgttttcacagtgctgataaagacatacctgagactgtgcaatttacagaaagaaggtttaatggactcacagttccatgtggctggggaggcctcacaatcaccgtggaaggcaaggagcaagtcacttaagctctttgcatggcaccatcgatgtgagctaggaaactcttccctatgaaaccatcacattcactgtcagaagaacagcacaggaaagactcgcccctgtgattcaattatctcccaatgggtccctcccatgatacatgggaattcaagatgacacatggtttggctgtgtccccacccaaggataatacaggtggaacataaatgccagcttg

SEQ ID NO: 11155 - DNA, 567 bp, Homo sapiens
gtcattcacacttcatgtatagcttcttattataagggcaaagttgagttgtaactgagatggaatgcctccctggagcctagtatgtttagtctcaccctttataggaagtttgccaacctatgggctagaatactgaggctgatgtacactcacatgtaaagggaataccttccataccacatgtagtgatatggaaaaaatctccatgacattgttactaagaggataaagcatggaagagtaccacacaatacctttctaattttagaaatagcaaatatgggccagacacagaggcttatacctgtaatcccagtactgtgggaggccaaggtggttgggtcacctgaggtcgagtgtgagaccagcctagccaacaagaggaaaacccatctctactaaaaatccaaaaattagccaggcatggtggtgcacgcctgtactcccacctacttgggaggctgaggcaggagaatcacttaaacccgggaggtggaggttggagtgagctgacattgtgtcattacattccagtctgggagacacagtctcaatctacaaaaa

SEQ ID NO: 11156 - DNA, 558 bp, Homo sapiens
gttcttggaagcagataatcgccagctgcccaatggtgtttacacaactgcagagcagcgtccgaatgcctacatcccagaagcagatgccactcttcctttgccaaaaccttatggtgctttggctccttttaaacccagtgaacctggagccaatatgaggcacataaggaaacctgttataaagccagttgaaatctgaatatgtgaacaaatccaggcctctcaaggaaaagacttcaaccaggcttccttgtacccacaggtgaaaaatgtgagcataatacttctaatattattgataagtaaggtaaccacaattagtcagcaacagagtacaacagggtttctatttacccaccaactactatacctttcatgacgttgaatgggacatagaactgtcctacatttatgtcaaagtatatatttgaatcgcttatattttctttttcactctttatattgagtacattccagaaatttgtagtaggcaaggtgctataaaaatgcactaaaaataaatctgttctcaatgaagtacggaaatggacacag

SEQ ID NO: 11157 - DNA, 230 bp, Homo sapiens
gatcaaaaatgcaactgagaaaatgatggctcttgttgctgagctgtccatgaaacaagccctaaccattgaactccaaaaggaagtcagggagaaagaagacttcatcttcacttgcaattccaggatagaaaaaggtctgccactcaataaggaaattgagaaagaatggttgaaagtccttcgagatgaagaaatgcacgccttggccatcgctgaaaagtctcagg

SEQ ID NO: 11158 - DNA, 888 bp, Homo sapiens
aaacattttaaaagtgaaatcatgagttaattttcttttatcacttggtaattgtctgaactaagtggctaactgctcaggacatagcagatgcaccatcaagctgggcacttcaagctgtcttctagaaatgaatttctgtgctttttagcactgctttttgcttgggggtgggaaagggtggtctccagtaactgctaagatgacacctatactggctgctgtccgagcagccctagtgactgtcttgggggcaatcagttgcttaatggttaatacagaagtacctgagtaatactttgcaaaaggactttccccgacctgtgctgggagtgtctccctgtaaactttgccaacctcctggttgttttatcagtgagagcatcatttaagtgaaaatataaattaaggagacagggctcataggacgcacattaaaacacctgatcattttgagcacctgctgtgtgcaaggcactgttctaggccaacagtatagatatacattgcctcccatcttttaaggctgataatgaagagaagaacatggaagaggaagttgttgggttttttttttccagtcagaaatactgaaagatttcttacagctgtctggtttcctgatacttaaattgtgaaactttaagttcactccattatcatttctaaaatttattttgaataagttccctttcgggggagatacccatgtgtagagaatggtatggaaatctgccaatggagggattagaaattttgtcagtttaaagacttggaccttttgagatttttgttgttgttgttttgtttgttcttcttttctgagatgaaggctcactctgtcgcccagcctggagtgcagtggtgcaatctcagctcactgcaatc

SEQ ID NO: 11159 - DNA, 864 bp, Homo sapiens
aaacattttaaaagtgaaatcatgagttaattttcttttatcacttggtaattgtctgaactaagtggctaactgctcaggacatagcagatgcaccatcaagctgggcacttcaagctgtcttctagaaatgaatttctgtgctttttagcactgctttttgcttgggggtgggaaagggtggtctccagtaactgctaagatgacacctatactggctgctgtccgagcagccctagtgactgtcttgggggcaatcagttgcttaatggttaatacagaagtacctgagtaatactttgcaaaaggactttccccgacctgtgctgggagtgtctccctgtaaactttgccaacctcctggttgttttatcagtgagagcatcatttaagtgaaaatataaattaaggagacagggctcataggacgcacattaaaacacctgatcattttgagcacctgctgtgtgcaaggcactgttctaggccaacagtatagatatacattgcctcccatcttttaaggctgataatgaagagaagaacatggaagaggaagttgttgggttttttttttccagtcagaaatactgaaagatttcttacagctgtctggtttcctgatacttaaattgtgaaactttaagttcactccattatcatttctaaaatttattttgaataagttccctttcgggggagatacccatgtgtagagaatggtatggaaatctgccaatggagggattagaaattttgtcagtttaaagacttggaccttttgagatttttgttgttgttgttttgtttgttcttcttttctgagatgaaggctcactctgtcgcccagcctggagtgcagtg

SEQ ID NO: 11160 - DNA, 2049 bp, Homo sapiens
agcctccctagtagctgtgattacaggcgcccgccaccatgcctggctaatttttgtatttttagtagagatgggtttcaccatgttggccagggtggtcttgaactcctgaccttaggtgagcccgcctcggcctcccaaaatgctgggattacaggtgtgagccaccgtgcctggccctgtcttgtaatttagaagagcaagtttaaatacttgggatgatgtattaaaaagcctcatccatgctgacaagagcagggcctgtagtagcctttgttgtttatccccttcatcctgttctgtacttcattttctctcattactgaattagctggcagcattccttatttgccacagagctatttcttaaaagctgtacttacactcaggatacagttttccttggtatagaactcttccatggcattgctctttcactgagctttattaaccctcaggcttccagtaccccttcttctgctctccccacttcattccctatcatcttacaaaggcttcttcaaccaggaattggcatgagctgaccgtgtatgggaagagattgtcagttaacctcattattgtaaatgctcagtgttcagaatgctgctacttaaatgacatcctatagaactgcatgaatcgggatacatttaaataatccagttaagtggctgtttcttgatggttgaggctctgcttttgggttgtagaacactgggaagaagtcttcacagctcagatagttttttagttggtctcatttcctttctacagtgccatgctgtcaggcaaagttacatattgcctgcatgcccacacctttctgtgagcatctgaaatcttgctcactcctgtgtatgagcaccagaccatactggttggaagcttctttccagtccccgctttcatccctccattggtaaaacatctggtggggaggtcttcgtgtggtctttgggcctacctgtgggcgctggtacagtgagactggagagatgggtgtgtattcattctgcctcccactgaagcaatgacgtcttcttggtgtttgggtctctgggtgcccccactcttcctgtaaatgttaacccccacggaggtgaggggaatggagaagcttatctcagagaggctctctggagagggaggaccacttctgctttccagggggaagctgtgtcacggagagcagaactgtagcccgatgctggagagaaaaggccccagaggaggcaggcaaggaagtgatacttcctccaccccaggcccctgggtcatttgcctgcagccccaccttccttaccacccaatgctgcgttttcctcggggttctttctaccctctgctgccctctgcattttcggtttgcccttaagtgaggggtggggcggggtgggagagaggagcagtctagagtcttaagggcagagcctgctttgcgaagcccaccctggccatgcctgactttttcagcaacggaaaaatgtacattttgaaattccccgtcatggaaagtgttatgaaactcttgggtagacgtttcgaaatcttttaatgttcaggctacataataatttttaaatactaactataataattcaggactattttaaaaattgttaaattccttgttaaattcttgggatagaacagtggctgtcaaacatctttttttttttttttttgagatggagtctcgctctgtcgcccaggctgtagtacaatggtgcaatctccactcactgcaacccctcctcccaggttcaagcgattctgctgcctcagcctcccgagtagctgggattacaggcatgcaccaatgcgccaccatgcccggctaatttttgtatttttagtagagacagggtttcatcatgttggccagcctggtctcgaacacctgacctcaggtgatctgcctgcctcggcctcccaaagtgctgggattacaggcatgagccacgcgcccagcctgtcaaacttatttgaccacaacccatagcaagaaacattttaccttgtgctcaaatacacatatctgtaggc

SEQ ID NO: 11161 - DNA, 2501 bp, Homo sapiens
gcccgcggacagttgccctccctggtggccccgggcaggagcgtgacgtcgaggggctgcagcggaggctggaactcaccctcccgctgcggcgcctctcggcctgccgaggagcagtccggtgcttttgccggctgagaggaagcgagagttattttaagaattcaggggttgcctttccttcgccttgggggaagggcgtaagagtcagttcccactttcctgcattctctgggcccatggtggcatcttttgcttgcggtgcattcgtaactttccaacagcctgcctgtcatgtggattagcggttgtgtttttgtatatccgagtgtgttaattatcccaaattcgcccttcttcgccagctcagaatctaggccttgcacttttctggctgtatatttaggggaccgattattgaaattccctgtttgagtttcttcatctttgagagagcatatatacctcaggggctgtttagtacacacaaagcccctagtacgtaccaagcatttcataaacgatgttactgttatttattgcagtgaattctattcatataaatgaggcttcttggttctttgcagcttggtgatgttgaagctaagactaccatgtcagatttagccatctgaccttattagtaaatctgcttaataaatacatgagggatttgctgtcccaaagcagggcccagtagtctgactttccctaaagaactagccaataaactggtgggctacagggatgttttctctgtacagccaacacctaaagccatgccctggggaataggcactgcaagaacccaggccttactaagcccttctctgtaagagtaagctttgttgggaaagggtgggatccagttagtccctccattctcatttggaggtaagcaggtaagcgctttgaggcctgaataaatttcactggatcatagagtctttggtgactgggcctctttggatgtaaatgtgtggcccttttgctgagtgaaggatagagggcagcagatgtaaggggagagaaagtaggagccaggaaccttgagttttggcctcttccatcatttaatatgctgtgatttgggataagccacttgggccatttattcagccaagatttcctttatagcagcagccagagttatattgatttgtctgcaggttgatagtctgtattaaccattacagtggaagctccatgaaaactgcttcatctgtcttgtccaaaatgatagccccagtgcctggtacatagtaggtgctcagttcgagattacttggaagaaggaatgaaggcctcctgtgagcttgccctatgcaaaactgaggacatagggagatgaagaaatagagctggtccctaaggtgtttgaagcctactggccctttctgttgtggtttctaaaacggggatttgagaggctttgttgactgtaaagttacccagcactgagttacccacatttagtgtgggtaactaaatgagagtctccactcagcaccgctcttctctacttattactggaagagaggtcctgatgtggggtggttaagatgtttcctgcaaaggtagttggcccaatccagaagacctacattattttagagtcattggtgttacaaaggtaggtcgaaactttgtaatcccgcccctgccctccaatagctttcttttagcagaaaagtggtccagcactgttcaatgactttgaaagccttttacttctatctgcaatatttgtttttagataaatcaccaaaaacatctgagattccagttggttcacatgactatgtggagttgtaacttaacaaaattaaatcatattattcatgtacaaacccatactaactttataaataaggacaccatgtatacatgcccacagcagggaacattgttataagctcactcctactgatgatctcagtgatgcatggatgagtgttaacattgaaaggccaccacaatcattagtcaggacattgatcaatgtcacattgatagcagagatagcctcagacctttactggctcttcctagtgatgatggtgaaggtgttagcacctttcatttgttcagggctctgaagtcttcctgaactctaatttcatttgaacctcttgtggctcctataggatggagagggacagatacagaaaaagattcagggggttgtctaaggtcacaggcttggttaagcggtaccattaggagtagtaggtatgttttttggctctttctacttgtccacctttggacttgtagtgtgtgctcaattacaaatgcctctcaacttatgatgaggctgtgtcccaataaacccaatcgtaagttgaaaatactgaaagtagaagatgcatttaatacacttaacctactaaacattatagattagcctaacctaccttaaacatggtcgaaacactcacattagcctactgttggacaaaatcatctgacacaaagcccatttgataataaagtgttga

SEQ ID NO: 11162 - DNA, 441 bp, Homo sapiens
gtgaaggtgttagcacctttcatttgttcagggctctgaagtcttcctgaactctaatttcatttgaacctcttgtggctcctataggatggagagggacagatacagaaaaagattcagggggttgtctaaggtcacaggcttggttaagcggtaccattaggagtagtaggtatgttttttggctctttctacttgtccacctttggacttgtagtgtgtgctcaattacaaatgcctctcaacttatgatgaggctgtgtcccaataaacccaatcgtaagttgaaaatactgaaagtagaagatgcatttaatacacttaacctactaaacattatagattagcctaacctaccttaaacatggtcgaaacactcacattagcctactgttggacaaaatcatctgacacaaagcccatttgataataaagtgttga

SEQ ID NO: 11163 - DNA, 2047 bp, Homo sapiens
agcctccctagtagctgtgattacaggcgcccgccaccatgcctggctaatttttgtatttttagtagagatgggtttcaccatgttggccagggtggtcttgaactcctgaccttaggtgagcccgcctcggcctcccaaaatgctgggattacaggtgtgagccaccgtgcctggccctgtcttgtaatttagaagagcaagtttaaatacttgggatgatgtattaaaaagcctcatccatgctgacaagagcagggcctgtagtagcctttgttgtttatccccttcatcctgttctgtacttcattttctctcattactgaattagctggcagcattccttatttgccacagagctatttcttaaaagctgtacttacactcaggatacagttttccttggtatagaactcttccatggcattgctctttcactgagctttattaaccctcaggcttccagtaccccttcttctgctctccccacttcattccctatcatcttacaaaggcttcttcaaccaggaattggcatgagctgaccgtgtatgggaagagattgtcagttaacctcattattgtaaatgctcagtgttcagaatgctgctacttaaatgacatcctatagaactgcatgaatcgggatacatttaaataatccagttaagtggctgtttcttgatggttgaggctctgcttttgggttgtagaacactgggaagaagtcttcacagctcagatagttttttagttggtctcatttcctttctacagtccatgcttcaggcaaagttacatattgcctgcctgcccacacctttctgtgagcatctgaaatcttgctcactcctctttattgacaccagaccatactggttggaagcttctttccagtccccgctttcctccctccattggtaaaacatctggtggggaggtcttcgtgtggtctttgggcctacccttgggcgctggtacagtgagactggagagatgggtgtgtattcattctgcctcccactgaagcaatgacgtcttcttggtgtttgggtctctgggtgcccccactcttcctgtaaatgttaacccccacggaggtgaggggaatggagaagcttatctcagagaggctctctggagagggaggaccacttctgctttccagggggaagctgtgtcacggagagcagaactgtagcccgatgctggagagaaaaggccccagaggaggcaggcaaggaagtgatacttcctccaccccaggcccctgggtcatttgcctgcagccccaccttccttaccacccaatgctgcgttttcctcggggttctttctaccctctgctgccctctgcattttcggtttgcccttaagtgaggggtggggcggggtgggagagaggagcagtctagagtcttaagggcagagcctgctttgcgaagcccaccctggccatgcctgactttttcagcaacggaaaaatgtacattttgaaattccccgtcatggaaagtgttatgaaactcttgggtagacgtttcgaaatcttttaatgttcaggctacataataatttttaaatactaactataataattcaggactattttaaaaattgttaaattccttgttaaattcttgggatagaacagtggctgtcaaacatctttttttttttttttttgagatggagtctcgctctgtcgcccaggctgtagtacaatggtgcaatctccactcactgcaacccctcctcccaggttcaagcgattctgctgcctcagcctcccgagtagctgggattacaggcatgcaccaatgcaccaccatgcccggctaatttttgtatttttagtagagacagggtttcatcatgttggccagcctggtctcgaacacctgacctcaggtgatctgcctgcctcggcctcccaaagtgctgggattacaggcatgagccacgcgcccagcctgtcaaacttatttgaccacaacccatagcaagaaacattttaccttgtgctcaaatacacatatctgtaggc

SEQ ID NO: 11164 - DNA, 1132 bp, Homo sapiens
gttgacatgagtcatactttatgcggatgaagaagctgaaactcataaaacttgtccaagatgtcaaatcagaggttcagagaagagtgattactttgagtgggtgttcaggagggattgctggaggagatggttctttgatctgggccttgtaagatgggcagaagttgagtatgtggagatggtaatggccttcagaatttatgtcttatctgtttggcctggcatacaaggcctttgacaatttggcagagtctggcttttttggtaggtctccagccagctcttcactttgtttcagccacttggaaccaagccacatcgcctgaatatgcaggtatgggtgtttcagggctctgtgccttagccaagagtgtccgttctccttcacctccctcctcctacacctccctcctctttctcctgagctctttcttatacatccttgggcatggcctatatctgctttacatctcggggtcagaacctgacccatggcaagagctcagtaaatgataaatgaatagatggaggttgagccttggagaagacaagtaatgagaaaaaaaaatactttgttggcctcatgtccttcctgtcccttttggggcagaaaggctcattcacaagtccaggccaaagtcagcacaggcttcaatttcattggctcaggccggtacacagatggggtgcattagagcttgatgatttaaagggttgggtgaaatgcctgactgtggggagagctgagggagctgtggctggcattgcacaaagcttcctttatttcactccacagccacccccggcgttaaataatctatagattcttatgcaggtctgcctaatggaaagatcattgccccagcctcctccttggaaaataggcctttcttttcatttttccctccctcttccatttaagaaagttcaaggagagaatgtctctcctgttctcctctcttgacttaatctcctatgcagtttcagaatctgcccagtgggagttaggagctgggaagcagataactggagctggatcagcagtgtaattaaatgatactttgtactggtaatagggcctttcatctgaaagcttgacattcgtttggtgcaaaaaaaaaaaaaaaag

SEQ ID NO: 11165 - DNA, 378 bp, Homo sapiens
taataagtaaataaaccaacatgccagttgtgcagttcaggaaatggatccttcagggagcgttctcaggggaactgcttccctcctggccctagattcccaggggaagagaaacaggttttactaggctgcatgacaaagagaaagagataatgggagacttttcccttacaaaagcatctttacccagaacctggacttcacgccattaaagtaaaaaaaaaaaccaacccatctttacgcagaccgagacgaagttttttgttttgtttttaaatgtgttcctcatctgtttacaagacctgctggaaaaggtggctgttgctttctttgcctctggtttggtagccccagccagagaggaatgaaggatctagt

SEQ ID NO: 11166 - DNA, 1420 bp, Homo sapiens
gatagaatcatcactgcataggagccaggaaatttagtttccagtcccaggtagtccttagctgtataatcggaaaaagttactttgcctctttgggcctcaatttctactaattctatgatgacacagttggacttagaaattttaggatgctaaggactgacttaataaagctttcctggtatctcagacattttttaaaaggctgtatatgagtttgtgtatatgtgtatgtgcacatgcatttctggaaaggcttcccctccaaccattaaatatataattaatgttataaattgtgttgtttataattgagaaataaataccacacttgacaatgtctatttccaaagaattgggtatttttgtgcttttgtttattcctggtattttcatatcatcctgttacacacgtgagcagagaatgtgtgtatcatccatatttaatttacagtcatagctagactaagttattatccaatgttattgaaagaatcagtagcacagatagaaatgaattagttcctagtatacagttttcttggcctttctcttaaccagtttgctttcttagagaaatgaactgatctgactatgattaagatcatttattgctagacagaagtaaaattagagattatccatagaacattttaatcttgtaatttatttggtgtgttgtagaacacctgacttttctcattgtatttggtaaatgtgttaaaaatgttaagtcagtgttatctggttttattttatctcttgagtcatgtttggcatgtatgtgttgggggggtgggcataggagttacacatttaagaaagccctatcttttagtagaataaattaatgcagattggcctgtcttcctgcctgcctggtcagtaacagtggactttggagattgatctagtgatgataaacctattgtatgtggcataagccagagaagtcagcttcgatagcaagtttctacattggcgtgagagagaagcatttagttaacatttcaaagtaactaagcctgttagcatccatgtattctatcagtagactttattgagtcctgtcatttgtatggtcttttattgttttttgttttcaacaaaggaaatagcacacacatacatctcaaaatggattatacctgttgtaatctcagtattttgggagatcaaggtgggaggatcacttgaggccaggaatttgaaaccagcctgggaaacatactgagatcctatgtctacaaaatttttaaaattagccaggtacagtggtatgcacctgtagtcctagctactcgggaggctgaggcaggagaatcacttgagcccaggagttcaaggcagcagtgatctgtgatcaaaccactgcactccaacttgggtgacaacatgggaccctatcttaaaaaaaaaa

SEQ ID NO: 11167 - DNA, 2548 bp, Homo sapiens
cttttggaccacaaagaagaagaagagttgactgaagaagaaagaaaagcagcttgggctgagtatgaagcagagaagaaggtagttgatgcaaaatgtgtttttgtttttgttatgttagtgatttgaaagagcaatgaagaagaaaagggtcacatttgaaacaggtaataataatatagtgggttttaggaacacattccccaattacaagaatctctttatgggttggtttcagctacctttagtggtagagtaggaggagaagacagaagaaaacagtttacacttaaagagtagtaatcccatttctgcctagtatttgttgaattgagaaatgagtgggaagccatatatttagcatcactaacctcccatcagtaccctctctgtagtaacaaacatacaggagcttagtgtttggaggttgtagtaaatgtagctttgcatgtataccatgaaatctaaattttggctgaatatcagaacacaaaaatatttcattattagacattaatgccatttgctccagcagcaactttatttaagatcattctatgtctgttttaaacatcaacccacttgagcaaaaatgtgcctgagcatgggaaaccttatcctaatacctgaatccttttcaaactcctaacttattgtaccaaacttctttaacattagtgtgatgttcagagtctcatcagaattctttgagttgcccccattctgtgggaattatcagaaaaaaaaagtacacctttaggggttaaagctttccttgtaataagatcttggtttcgggtgaaaagggtgttttgtttgtgtgtggaagagtgttaataatttcctggatctgagaatgtggattcttttctaaaccagtaggtgatgtagaatttcaagttttaaatcacaatgtgaaaagtgcataatttttttgtttttagggactgaccatgcgtttcaacataccaactgggaccaatttaccccctgtcagtttcaactctcaaactccttatattcctttcaatttgggagccctgtcagcaatgagtaatcaacagctggaggtgagttgtgaagtacaaaagtagtttgacatgaattaaaggcaatttcaagtgccttgttgttgagggttccctatgcagaaatatcacattctccaaaagattacccctgaatagacgaataaatttttgttttatttgttgaccgttttgaaccaacatgatgttgtaaaatgtggtttgttcagagcacaaaggaatcagtcggtgaattaatgtagtttgaattattttaattaagaaacaatagggctgctgactcgcttgggaaatagcaccttcttcagttataaaatagttataataaattgctatcttactgtttgaaagtaagataaatatactcattaacttctattctagtgcattatagatgcacaattaaatatataatgcccaatattatgaaataaatgatttaaagctagaatcaattgtaaattaaataggaaagactgggtttttattataccaataatgacttaattgaatctgaaacacattataaaatgtgcttatggattcttctgcattattaaattattggtgtgataaaactcaaacttttttaatcttcctaacaagactctttgagcattgatatggtttactccactttattgatactgaattttgctgttctcttcaattatttaaagagttttaaaaccgactgctctaagttggcaaatggaaggattccctatactttaacactatgctgtctttctgccttatataacttatttcttgcattcttctaggacctcattaatcaaggaagagaaaaagttgtagaagcaacaaacagtgtgacagcagtgaggattcaacctcttgaggatataatttcagctgtagtaagctaattggcaattgtcttattccaacctccaatttgtaccctccaccccctactgccatttttttaaatttttaattgttccttcttataaattgatttgcaatagtaaaatactggtaaaatggatggataatgccaaaccgtaacccagcaattttacatagatgttggcacaagagagaaatgggtaaaatgtaagaattgagaaatcaaacatggaaatgtatgcattgtttatataaacattttaattaccagttgtacaaattaaatctaaattattgtttcattccagagatagccagcccaggtacagcagtgaacaacttagtaccctgttttgcatcatgtttttcttcagaaaagaataaaggaaaaggggggtttgaaaccttgggaaatcccgaatatcttaaaataccttaattatttttcctcaattgtacagtaataaggagtaaatagaaaatttttcttttagtggaaggagaacatgaatctctcagaggcccaagtacaggcgttagcattaagtagacaagccagccaggagcttgatgttaaacgaagagaagcaatctacaatgatgtattgacaaaacaacagatggta

SEQ ID NO: 11168 - DNA, 98 bp, Homo sapiens
tgaaatcccagcactttgggaagccgaggcaggtggatcacttgaggtcaggagttcgagaccagcctggccagcttggtgaaactccatctctacta

SEQ ID NO: 11169 - DNA, 1338 bp, Homo sapiens
attttctgtgaattttgggaagaagagagttaaatggaagaaagaaaaaaaatcttgcaaatacctttaggatagtagtttttttggatacagtagacattgtttgaaatgaatgattaaagctgtacttacctttcttaaaattcactgcttgggatgggctggtaacagtttcgaggttactctcattaggcttcagtgttaagtacactataccccattttcttgggaagtgaacagcaacatctactctgttaaaatcattatacattgtgtctgctttcagatttcttccttttagtaattagtgttgtgtatgtgttagatttttttttgtctttactgaaacacaccctttggaattcctttagcgaatatgctcttttgggtggataacctaataagctttcctctttgagttttctgtttttttactcagcacagccatggaagtagggatttaattttctgtcaaactctgcatctcacaaagcaatagttactcaaaacacgactttcaagaaggttattctttttaagctttcagcagatgagctgagtagcagcaggaaagcaggtattgagaactgtcttggtttttgtactgctgttgagtagtaacattgcagctgtcttaaatcctgaatgacacagaagcttatggctggtcgtactacatagcaccttgaaagtgacagggcttttcatttctatctgatttctgtttttcaaaaataaaactccttattcttttcctatcattgtaaatattcttcagcttcctatcactaatacatagtctcggcattagagaccagttaaaataaataggctgaggaaaatcttgatagtaggagagattttggagcattcattaaaagtaaaaatagggctgggcgtggtggctcactctcccctgtattcctagcactttgggaggccgaggcaggcagattgcttgaggccaggagtttgagaccagcctgggtcttaaaaggtagatattattctcattttacagatgacgaaactggagcttgtttgaaaagtttgcccaaaattgtagcagttagcgtgaggggcctgcctctagagaccatgcaaattcaacactaagctatactggactggtctcacatagtgagaccctgtctctacaaaaaatagaaaaagtagccgggcatagtggcccacacctgtagttccagctacttgggaagctgaggcatgaggattacttgagccaaggagatcaaggatgcagtaagccatgaccatgccactgcactcgtgcctggacaacagtgcaagaccctgtctcaaaaaaaaagagaaaag

SEQ ID NO: 11170 - DNA, 841 bp, Homo sapiens
aacggggctttatttttatttagttatccacagatctaggttgtgtcctatattcatggctggagacgcttcactacaccgttcattgtactactgccagttcctcatcgtctgatacagtatctcagggttctcacagaatcttttacctgcaaaatgcagtttgcatcagttttatactctgcttgctctaagaagctgtgcacagggtgactgtgagagagacttctctttgaccttctgcgggcaccatctccctgcactttctttcccaaacaagatacttggcagctcagattctgaaaaagggattcctttcaagtgtagattaggacttcagctctgctccttaggttagttagaaataatgtggagctatttctggagtgctgagccttggtcatttatttcattcctggtggggaccccagagtcttggggatctgccggggaaagggagccttatgcaagagcgtcatccccaccatttccactggtacacagcttggagctgtgatctttctctggttacctgagcttgccgatcacaacatggaagtgcagggggaaagccgccggtgcttgtagcagtaaatggattgaaaaagcagttcctacatttactttctcctgctctcctgggagcagatcatggtttagtttcgagaagagtgcagcagctcgagaccaaagagttttgctttgcttgctcttgactgtgcagtagggaagccagcattctcagaagaccagaaaggatggcggtggggaagggagggagacaggcctgtttaaccgagaagagacaggtgccatccccagggtgaggccttcctttcag

SEQ ID NO: 11171 - DNA, 5754 bp, Homo sapiens
aagaccatcctggctaacacggtgaaaccctgtctctactaaaaatacaaaaaattagctgggtgtggtggcgggcgcctgtagtcccagctactctggaggctgaggcaggagaatcgcttgaacccaggaggcggaggttgcagtgagccgagatcgcgccactacactcagcctgggcgacagagtgagactccgtctcaaaaaaaaaaaaaaaattacttagacatggtggcacattcctttaatcccagctacttgggaggctgaggcaggagaatcgcttgaacccaggaggtggaggttacagtgagccgagatcgcaccactgtgctccacactccagcctgggcaacagagtgaaactctgtctcaaaaaaaaaaaaaaaaaaaaaaaaaaggaataaaggggatgggtttgacatctgacaaaatgctgctgctgccatccgcttctgcaaaacctcaagaatgaaatgtccttcccatggcccacacgaggccctgcacgagctgcttcatccccttccaaacctcctctcctctctcttcccctcctcactctgctcagacacacgggcctcctcactgttcctccaacacgccacgtgtggtctgccccagggcctttgcacaggccatgcctctgcctggaacacctgcccccagattctcctatggctgacttctcacacttgggtcttagtgcatgcatcacctcctcagggagggccccctgcccacccccagtgaatctagccccattcaggacagtcatctttattatgcactgattgtatactaagcccagagacttcaactgtggtttctttttcatcctcccaataaatccatccatccatccgttcactcagacatgaaattctggaccctccaattcaggatctgggccacccagtgcctagcttttttttttttttttttttttttttgccgacagagtttcattctgtcacccaggctggagtgcagtggtgcaatctcagctcactgcaacctccgcctcccgggttcaagcgattctcctgcctcagcctcccgagtagctgggattacaggtgtgccaccacgcccggctaatttttgtatttgtagtagagacggggtttcaccatattggccagactggtcttgaacacctgacctcaggtgatctgccctcctcagcctcccaaagtgctgggattactacaggcatgagccactgcacccgtcagcctacttcttgtgttcattcattcattcattcattcattcatcattcagcaaatgtctatgagcgcctactctgagccactgaaccagctgggctggccctgggggagaatcgacttcccctgcaaattcactctcatcagatccccaggctggtctaggattgtttagatgccctcacgttggggaactcattccttactaagaataaccaccaccaataccaaacagtctcaagtaccaccaatagtgctgagttctcagggtgactacagcatctgctcccaagcccagcccagcccatatggtgtgtgctgtgtcaaagaacctgggttcaaatcccatgtccttttctaacccttggacaagcccctacccattttgtgcctcggtttccctagctgtaaaatggagatagtagtgcctctcttgtgggctcagcaccaggcctgttacacagctggtgcttaataaatgtgtcctgttacttaaggtctgatatgtgtagctcctgtcgtcgccgtccatgggggtgagtggggtggggaaggggtggtttgagtttctgcacatcaggacacgaggcgcggtccatgcaaatgaaatgcaaatcccatgcaaataaatctctgggtggtgcaaggctggaggtacaaggtgcacgcatttggggggcgcctgggaaccccatgaatcgagcccaggcccggaggtgctgacccgcatccagcccggctttcagtgctcggtgtaaatgtttacacctggccggccgccaggctccacgccgccccacactaggcagccaggagggggaatgtaaactcgggctgggggccgcgggacgctcgggaggagcccagacggagtcgagtgtggtgggtgtgtacacgtgagttattaaacaccgactgtatgcagtgaggaggatgccaccaggcactcacagcaccaagtaactggtgcccgaatgggtaaagctcagggcattcctgggggcccactagcgcccctgcaccagccagaggttgaagtgaatagggtaggcagccatggaaggctccctggaggaggcaccctccaaggtgagattgcaaggggagtgagagctaggtacatgtgacttcacagcctgtaatcgccagctctttgggaggccaaagtggaaggatccttgagcccaggagtttgagaccagcctgggcacgttgtgagattcccctctctattaacaaaaacaaaaacaaaaaaaattaaaaattagccaggcatggtggctcatgcctgtagtcagtcctagctacttgggaggctgaggtgggaggatcgcttgagcctaggaggtggaggctgcagtgagctgtgatcacaccactgcactccagcctgggtgacagagcaagaccctgtctcaaaaaaaaagaaagagagagagaaagaaagaaaggaaagaaaggaagagaaaagaaagagagaagaaaaaggaaagaaagagagagagagagaggaggctgggtgcggtggctcatgcctgtaatcccagcactttgggaggccaaggtgggcggatcacttgagttcaggagcttgagaccagcatagctaacagggagaaaccctgtctctattaaaaatacaaaaattagccagtcatgctggcaggtgcctgtaatcccagctactcagggggctgaggccggagaatcgcttgaacccgggaggcagaggttgcagtgagctgagattgcgccactgcactccagcctgagggacaagagtgagactccatctccaaaagaaaaaaagaaaaagagaaagaaaggggagtgggagtggggagggagggaagaagtgttctccatgcaaggacctatctgtgcaaaagcccagagctgggactccatgtccagggcagctctggtccattgctgcccacttctgggcctgcttatccatctggatgggaaacaggctcagagaggggcagagtcaatggaggacaccagcatgtagggaacagtgtcagccccagattcctgcctccagactgtcctaaacaccaccctccccgcgcctttgtcccacactgccacctgccgggaatgacctctcctcctttcactcttccccctggctcctcagctgcagccgctccggcctccttgctgttcctgggatacgccacactcagtctggcctcggggcctttgcactggctgtgtcccctgcctgtgatgccattctcctctgcctggccaactcctacgtttattcaagtctggaccttgtcatcggctcctcaggaaggcactccgggacccccagatgggggcggttccctgtgactcctggcacggaggccaaccccttccttgttcaatggttccttgagggaccattcccatgtgattatcgaccattcggcaggcgttcaaagtcaaaggccccacactgagtcctggcccagcgccctgtgcccgttggctgctggagggacagacggggcgtgcggctgaccatcccgtgcccgcaggctgaggatgcagcgctggaaggcggcggccttggcctcagtgctctgcagctccgtgctgtccatctggatgtgtcgagagggcctgcttctcagccaccgcctcggacctgcgctggtccccctgcaccgcctgcctcgaaccctggacgcccggattgcccgcctggcccagtgtaagctcctcctctgtgtggggtcagatacccccaacgtaaggggtagaatttcaggcagtggagtgggaggtggggggggtgtcataggttttttaaagatagggccagccagcccccttgcagggaggcagggacagacatcctaaaagattattcagggcaaggcatggtggcgcctgcctataatcccagcactttgggaggctgagacaggaggatctcttgagcccaggagttcatgaccagccagggcaatgtagcgagaccgccatctctacaaaaaacttcagaaattagccaggtgtagtggcgcacgcctgtagttccagctacttgggaggctgaggtgggaggatcacttgagcccaagagttcaaggctgcattgagctatgattgcaccactatactccagcctgagcaacagagcaagattctgtctcaaaacattataataataaatacattttctaaaaaaagatggggtggagggaggttgcaaattcccccaatggcctggtggagctagggtgacttctgggaactggggtctttcggctcagctgtcacaaggaattaggctctgccctgaggtcccgtgggggccagatggagattagacctgggcattcgcctggttggcccccgcggcgcagcagggggggcggtgggaggagagagaggctggatctgaggtcccagtgacctgccccaggggacagggaccaaggggaggcgggagatggagcaggagctaaaaaccggaagaaaggcccagagattcgaaggggtgaggaggggtggagagaggagagacggggctgggggcacagacacgggcaaaagtgctgctatagggacacagaaatgcccaccctgagggcaagaccctcgcccaactccccaccaatccctaatgcctgccccaccgcaggtgctgtggggtgagggtggtgcgtgggccctgacccctgtgcccacgcacatgtccatgcgtgcgcctgcgcgggcatctgaggcgtggatgccggcagggtgcgtgtgcagcgcctttgggtgtgggccacgagtacgcccatgtgcgcgtctgcgcccgcccctgccagcccacacaatcctcttttcttgtccttacaatgcacaagggtggcctccagcacgagctccacttctgtcctcccaccacttccctctctgcaagcggcgtgaagtccttcctaggactctgggacagagacccgggcgggacccccaaaatccagtgctccaggacttggggtgcggggggcaaagcacgaatggaggaatttcaggcactgcggagggtcagggcccatgggcgggtgcctgtctgccctactgcaaaaagcgagtggccactgactccccaagtccccatgttctaggctcctggtggaatttcaggctggggaccttgtgttctagcccctgtgcaagcagccagcccccgttgcagggaggcagggacagacatcctaaaagatgattcattgttgccaggtgcggtggctcacgcctgtgatcccagcactttgggaggccgaggtgggcggatcacgaggtcaggagatggagaccattctggctaacactgtgaaaccctgtctctactaaaattacaaaaaaattagccgggcgtggtggcgggcgcctgtagtcccagctactcgggaggctgaggcgggagaatggcgtgaacccgggaggcggagcttgcagtgagccgagatcgcgccactgcactccagcctgggcgacagagcgagactccgtctcaaaaaaaaaa

SEQ ID NO: 11172 - DNA, 118 bp, Homo sapiens; identical to SEQ ID NO: 6408

SEQ ID NO: 11173 - DNA, 143 bp, Homo sapiens; identical to SEQ ID NO: 5446

SEQ ID NO: 11174 - DNA, 7575 bp, Homo sapiens
gccttcctcggtcaagtcgctgcgctccgagcgtctgatccgtacctcgctggacctggagttagacctgcaggcgacaagaacctggcacagccaattgacccaggagatctcggtgctgaaggagctcaaggagcagctggaacaagccaagagccacggggagaaggagctgccacagtggttgcgtgaggacgagcgtttccgcctgctgctgaggatgctggagaagcgggtgagttctgcctcgaaggcaggggagccctgcgctctgccccagagagtcggggggcactgccccggggaagagaggccagagctcatgatgcatcctacaattcccaccacaggttccactgagggtgttccacccatccctcgttcccatcaggagagggatccaggaatccctttgcacactcaactttatgaacctttcacctggctgcaaggcccatttactgcatttgttgttgtgattttgtgtgcaagcccttattattcacacatgtactcatcatgcagttcttcatgaaatacgtagggtacccagtctgtgccacagcacgcactttaaaagagtaacaataggacactgacctgcctcgatgcctgcccaggaagtcccacagggcagcccttgccaaagggggagaagggctggtcacaccagggccttctgctaacaaggatgccctggagtacaagtcggctggcacctctgccctgctataatgagtttaagggatttaggggttgatcaaggagaaagatataacctcaaaatggtgttagcacacaaagttttatatcagctgtgcttttttttttttttttttttttttttttggagatgggttttctctctgtcgcccgggctggagtgtggtggcatgatggctcactgcaacctccacctcccaggctctaattgatcctcccaccttagcctcctgagtaactgtgttgacaggtgcataccaatatgcccggctaatttttgtattttttgtagagatggggtttcaccatgttgcccaggctggtctcgaactcctgggctcaaacattcaacctgcctcggcctcccaaagtgttgcgattacaggcatgagccagcgtgcctagcttgcactgcgctttgacaggtttgcatgcaggggaagtccctcacagcatgagaccttccaaaggtgctgggggctactgcccagtgtggaggaaggcaagggaactcctaggggagagctcgggaagagggaccatctaggttaggtagctctgcagcacgatggggagtctctgggtcagagaactccaaagcacagcagcagcttggggtctcttataggcccagggtttatctatctatggctaacaaatgttgggtacagtttcacagggtatgcaaaacaggaaggttgtatatggctttaaaagctgcttatttgagctatatttaaaacaactggaagggtaaaaatttgagtttggcaccagcaggcttttaagccaacaggtcccagactgccatgaagaaataaacaatatgggaccaatatgcaagggccaatataggaccaatataggaccaatatgaaaaatttcataaatttttcatttatgaaaaataatacctgccactctgtgatcgccacccacggcaaaaaagacttttgctagttctctgtgcacacagccagccttgctgagagcaccttacagagggtgcctacctgaactctcaggaccatcagctgaaatctcagtgctgaatacaggtggtgatgccctagggcaggaagatgacgccggacttcttaggcctggactgatatgggagcttcaaactgactctggcagttctaaagttccagaaaagtttatttctttcttatttataccctgtttacttataaacaggattataacaagaacattgaggggaaaacagaaaattggaaggcttgaaggaggagaggaaataaatatatcccaaatctaaagtagcctaattatagttagatattatgtttatctttgagcttcctggtaaccaaggcaaaaagagatcagaaaacaagtgcctatgtgccctaccttaacacttgatcttattcgaaagactgagaagtaatatgtgccctgacttaagaaaaacaaactagaaaacttgacctttcaaatagtaaaaaaaaaaaaaaattagcatctatgacttctaacaaagaaccattgatatgatggctttaggccggacgcggtggctcacgcctgtaatcccagcactttgggaggccgaggcgggcagatcacaaggtcaggagattgagaccatcctttgaatggtgaaaccccgtctctactaaagatacaaaaaattagccgggcatggtggcgggcgcctgtagtcccagctacttgggaggctgaggcaggagaatggcgtgaacccaggaggcggagcttgcagtgagccgagattgcgcccctacactccagcctgggcgacagagcgagactccgtctcaaaacaaacaaacaaaaaaaacgatggctttatttaccaaaattctgtctttgtgcaatgttttcaagtatatggtacgtggatattttagggctgtctgtggtttgttctcaaaagtgtttacatacgtttacattaggaggaaggggcatagtgttatacccaagcctcttaagaactactgcatggcttgggactgagtttccaccacttcttagtagtctgacattaaagaaatttcttactttgctggagcctaagttccctgggtaaaatagaggtaataacatctaccctcctaggtggcctgaggattagaggtagcgcacatttcaacaggcagccctcatctcctcaattcctcagatccacagttattccgtttcctggccccaaaaatctagtcactcaaacagatgatttgagcacttcccattatcgttctgaatgaagtggatcccacatggagcaagagtgagggtgccgtccctacagtagccccctctgttgtgatagcgagttctccttgcccctttctggaggccccctccactgactcagggccttgcttgctttgcccagcagatggaccgagcggagcacaagggtgagcttcagacagacaagatgatgagggcagctgccaaggatgtgcacaggctccgaggccagagctgtaaggaacccccagaagttcagtctttcaggtaagcagagggccccggcagccccccatccctttctcagccaacccacggccttagtcttctgtctgtggtcttactgctctcatcccttgctcacagagcactggctttccctgtaacagatgttcatcctccgccaagccatccctggcgatccatgagctctgcagcgctcttcccttggctgtctttatcagtccccacacaactcgagctaatttgttagatcctcttgtttaatgaatgagccacctgctccagcctttcctcgtagtgttttccttactggtaattgtggagggttggctgaatgataaataaacctaggggtgatggatgctcgctgggcctccctggctctgcctgccacctgctaggatctcagggaggtgctatcttgccatgctggacccgggtgtattctcggagggtcccgaatgccatttggcctgggcctcccatccacagaggccctagcgtttagacttctgatgtcctctcaaacaaggtacacatgtttgtgtatgtgctttaaaaaaaaaaaaattcctttgtggaatataaacatttaaaatgtatatttgtacaactatctttgggcatctcttaactttttaacaaattgagaatctgaaacaaacaaacattagaagtggcccaagggtccttttaaactgagaagcctctgactggatttgaactaagagtcatcgttcatgctaatggtcttttaaagcagtggttctcaaccaggggtgatttctccccttccccctggaacatttggcaatgagcttacgttttgggttgtcataactggaggtcaaggatacagccagcatctagagggtaagaggccaaggacgttgctaaacattctgcagcgaatgtataggacagctcccacgacaaagaattatcctgcccagaatctctgtagagcgaggttgaaaacccctgctctaaagggatggcctctcttatagggagaagatggcatttttcacccggcctcggatgaatatcccagctctctctgcagatgacgtctaatcgccagaaaagtatttcctttgttccactgaccaggctgtgaacattgactgtggctaaagttatttatgtggtgttatatgaaggtactgagtcacaagtcctctagtgctcttgttggtttgaagatgaaccgactttttagtttgggtcctactgttgttattaaaaacagaacaaaaacaaaacacacacacacacaaaaacagaaacaaaaaaaaccagcattaaaataataagattgtatagtttgtatatttaggagtgtatttttgggaaagaaaatttaaatgaactaaagcagtattgagttgctgctcttcttaaaatcgtttagattttttttggtttgtacagctccaccttttagaggtcttactgcaataagaagtaatgcctgggggacggtaatcctaataggacgtcccgcacttgtcacagtacagctaatttttcctagttaacatattttgtacaatattaaaaaaatgcacagaaaccattgggggggattcagaggtgcatccacggatcttcttgagctgtgacgtgtttttatgtggctgcccaacgtggagcgggcagtgtgataggctgggtgggctaagcagcctagtctatgtgggtgacaggccacgctggtctcagatgcccagtgaagccactaacatgagtgaggggagggctgtggggaactccattcagttttatctccatcaataaagtggcctttcaaaaagaatcttcctcttgctctctttttctttcctacccctcacttcatctgtttccctgatttttgactctcccctttccagtcatttctttcccacccatccgcagtcctggaaacatttattttttcttttgcccactgttttcatttgctcattaaattaaaatgactgctcggctcattgggaatccacatccccaagttagactggggatatgctctctgtactgtctccttctatggaattccaccccacccagagagagatgacttcacagtttgttcatatgagcatcatcccatgtcgtccccaacccagggctggtaggtgctacagcttgtgcttcatgctgctcctgtggcccctattcctacccagctcagagctttgcagggtctactgcagacaatcagaagtcagtttctaacaaatagcaacagccacaaatctcttcctccttcctctctgacattaccctgtgcaacttttctcaaagtctgttgcaccactcagcaaagcaagttgcaccagctatatcagaatcacctggggcagcctattaaaaatgcagactgttgagaccatcctggctaacacggtgaaaccctgtctctactaaaaatacaaaaaattagccggccgtggtggcgggcagctactcgggaggctgaggcaggagaatgacctgaacctgggaggcagagcttgcagtgagctgagattgtgccactgcactccagcctgggtgacagagcaagactccgtctcaaaaaaaaaaaaaaaagaaaaatgcagactggctggcgcggtggctcatgcttgtaatcccagcactttgggaggctgaggcgggcagatcaactgagatcgggggttcgagaccagcctgatcaacatggagaaacctggtctctactaaaaatacataattagctgggcgtagtggcgcatacctgtaatcccagctacttgggtggccaaggcttgaacccaggaggcggaggttgcggtgagccgagatggcgccattgactccagcctgggcaacaagagcgtaactccatctcaaaaaaataataataataaaaataaaatgcagactgtcaggtcctctctagacccactgaactatcccgcccaccctgggacggtccccagtgccagtgttttacccatgttccctctgtaagtcttatgcacaccgcaatttgagagccccactggtataaagtgagtgaaacccaggcagagacaggcaaaatggtgaggcccgcatcctattggtgagtcacacagggaacgctgaaattcatggccttctccaggctactgggaacccatgggcggtgatggagggagtggtgccaccttcacttgctgctgaggctcttccccctctccccagcatactccttacctggctgtctctcctcatgtataaggaacctatagtggtgtagaatctactcttcttccccctgtggcttccaggcccccctgtatagctgctatccagcccgatttctcaccactggcccagggcttcctcctgccccgtggcttcacgtctctgaacacatcaatctctgatgttctctctccttccattgaattccaccagacacattcagggtttacttcgtaatgtcttcatatgagtatcaatcaacaccttccccaactcaattgtactaggttgtagagcacaaggatggtctcgtgctgctctgtggcacctgtgcctacactcctctgagctttgaggaggctgctctctttgctgaccccatgatcttttctgcccttctgttaagggcattggccacagcaacggggcaaatgccccaagctggctgtaagtgacccatccctttggctcccatgattagaccaaggagaggcatggggtccagctgagccattcagaaccattccttagcattttccactcaaaggttagagatgagattttctcttcccaaggctacctctggccatggttccagcttcatgggggcaatgggattaggaaaatgaggtcaacctgcaaaggaaagcagatgcaagagatggagacagaatgggggtgtcctggggatcttggagcctgaattcattggcacaaaaggcagcagcatcctcactgtatctgcagtccatttggactcaataaaaactttgaaagtcacatgtgttatggaattccttctcagtgacacattcatctgtgctcagttgtcccagcaagggtcagcccctcatacccctgcagcatccgctgctatgaagcagagctgtaaacgccctccctgtgtataggaaaagctacatggagcaaatcctcctgcctgaagaagtgcatctcagcatcacttcagctgtcggggcatttgtggggagaaccagaccacctctgcggaaggcagcagaccctcttccagccatggatggagttgaattctctataaacggttcaccagcaaaccaccaatacattccattgtttgcctagagagaaatttaaaaataaataaatgttcacttataa

SEQ ID NO: 11175 - DNA, 141 bp, Homo sapiens; identical to SEQ ID NO: 5242

SEQ ID NO: 11176 - DNA, 159 bp, Homo sapiens; identical to SEQ ID NO: 5465

SEQ ID NO: 11177 - DNA, 267 bp, Homo sapiens; identical to SEQ ID NO: 5493

SEQ ID NO: 11178 - DNA, 98 bp, Homo sapiens; identical to SEQ ID NO: 9152

SEQ ID NO: 11179 - DNA, 153 bp, Homo sapiens; identical to SEQ ID NO: 5246

SEQ ID NO: 11180 - DNA, 5755 bp, Homo sapiens
aagaccatcctggctaacacggtgaaaccctgtctctactaaaaatacaaaaaattagctgggtgtggtggcgggcgcctgtagtcccagctactctggaggctgaggcaggagaatcgcttgaacccaggaggcggaggttgcagtgagccgagatcgcgccactacactcagcctgggcgacagagtgagactccgtctcaaaaaaaaaaaaaaaattacttagacatggtggcacattcctttaatcccagctacttgggaggctgaggcaggagaatcacttgaacccaggaggtggaggttacagtgagccgagatcgcaccactgtgctccacactccagcctgggcaacagagtgaaactctgtctcaaaaaaaaaaaaaaaaaaaaaaaaaaggaataaaggggatgggtttgacatctgacaaaatgctgctgctgccatccgcttctgcaaaacctcaagaatgaaatgtccttcccatggcccacacgaggccctgcacgagctgcttcatccccttccaaacctcctctcctctctcttcccctcctcactctgctcagacacacgggcctcctcactgttcctccaacacgccacgtgtggtctgccccagggccttggcacaggccatgcctctgcctggaacacctgcccccagattctcctatggctgacttctcacacttgggtcttagtgcatgcatcacctcctcagggagggccccctgcccacccccagtgaatctagccccattcaggacagtcatctttattatgcactgattgtatactaagcccagagacttcaactgtggtttctttttcatcctccccaataaatccatccatccatccgttcactcagacatgaaattctggaccctccaattcaggatctgggccacccagtgcctagcttttttttttttttttttttttttttgcgacagagtttcattctgtcacccaggctggagtgcagtggtgcaatctcagctcactgcaacctccgcctcccgggttcaagcgattctcctgcctcagcctcccgagtagctgggattacaggtgtgccaccacgcccggctaatttttgtatttgtagtagagacggggtttcaccatattggccagactggtcttgaacacctgacctcaggtgatctgccctcctcagcctcccaaagtgctgggattactacaggcatgagccactgcacccgtcagcctagcttctttgtgttcattcattcattcattcattcattcatcattcagcaaatgtctatgagcgcctactctgagccactgaaccagctgggctggccctgggggagaatcgacttcccctgcaaattcactctcatcagatccccaggctggtctaggatttgtttagatgccctcacgttggggaactcattccttactaagaataaccaccaccaataccaaacagtctcaagtaccaccaatagtgctgagttctcagggtgactacagcatctgctcccaagcccagcccagcccatatggtgtgtgctgtgtcaaagaacctgggttcaaatcccatgtccttttctaacccttggacaagcccctacccattttgtgcctcggtttccctagctgtaaaatggagatagtagtgcctctcttgtgggctcagcaccaggcctgttacacagctggtgcttaataaatgtgtcctgttacttaaggtctgatatgtgtagctcctgtcgtcgccgtccatgggggtgagtggggtggggaaggggtggtttgagtttctgcacatcaggacacgaggcgcggtccatgcaaatgaaatgcaaatcccatgcaaataaatctctgggtggtgcaaggctggaggtacaaggtgcacgcatttggggggcgcctgggaaccccatgaatcgagcccaggcccggaggtgctgacccgcatccagcccggctttcagtgctcggtgtaaatgtttacacctggccggccgccaggctccacgccgccccacactaggcagccaggagggggaatgtaaactcgggctgggggccgcgggacgctcgggaggagcccagacggagtcgagtgtggtgggtgtgtacacgtgagttattaaacaccgactgtatgcagtgaggaggatgccaccaggcactcacagcaccaagtaactggtgcccgaatgggtaaagctcagggcattcctgggggcccactagcgcccctgcaccagccagaggttgaagtgaatagggtaggcagccatggaaggctccctggaggaggcaccctccaaggtgagattgcaaggggagtgagagctaggtacagtgactcacgcctgtaatcccagctctttgggaggccaaagtggaaggatagcttgagcccaggagtttgagaccagcctgggcaacgttgtgagattcccctctctattaaacaaaaacaaaaacaaaaaaaattaaaaattagccaggcatggtggctcatgcctgtagtcagtcctagctacttgggaggctgaggtgggaggatcgcttgagcctaggaggtggaggctgcagtgagctgtgatcacaccactgcactccagcctgggtgacagagcaagaccctgtctcaaaaaaaaagaaagagagagagaaagaaagaaaggaaagaaaggaagagaaaagaaagagagaagaaaaaggaaagaaagagagagagagagaggaggctgggtgcggtggctcatgcctgtaatcccagcactttgggaggccaaggtgggcggatcacttgagttcaggagcttgagaccagcatagctaacagggagaaaccctgtctctattaaaaatacaaaaattagccagtcatgctggcaggtgcctgtaatcccagctactcagggggctgaggccggagaatcgcttgaacccgggaggcagaggttgcagtgagctgagattgcgccactgcactccagcctgagggacaagagtgagactccatctccaaaagaaaaaaagaaaaagagaaagaaaggggagtgggagtggggagggagggaagaagtgttctccatgcaaggacctatctgtgcaaaagcccagagctgggactccatgtccagggcagctctggtccattgctgcccacttctgggcctgcttatccatctggatgggaaacaggctcagagaggggcagagtcaatggaggacaccagcatgtagggaacagtgtcagccccagattcctgcctccagactgtcctaaacaccaccctccccgcgcctttgtcccacactgccacctgccgggaatgacctctcctcctttcactcttccccctggctcctcagctgcagccgctccggcctccttgctgttcctgggatacgccacactcagtctggcctcggggcctttgcactggctgtgtcccctgcctgtgatgccattctcctctgcctggccaactcctacgtttattcaagtctggaccttgtcatcggctcctcaggaaggcactccgggacccccagatgggggcggttccctgtgactcctggcacggaggccaaccccttccttgttcaatggttccttgagggaccattcccatgtgattatcgaccattcggcaggcgttcaaagtcaaaggccccacactgagtcctggcccagcgccctgtgcccgttggctgctggagggacagacggggcgtgcggctgaccatcccgtgcccgcaggctgaggatgcagcgctggaaggcggcggccttggcctcagtgctctgcagctccgtgctgtccatctggatgtgtcgagagggcctgcttctcagccaccgcctcggacctgcgctggtccccctgcaccgcctgcctcgaaccctggacgcccggattgcccgcctggcccagtgtaagctcctcctctgtgtggggtcagatacccccaacgtaaggggtagaatttcaggcagtggagtgggaggtggggggggtgtcataggttttttaaagatagggccagccagcccccttgcagggaggcagggacagacatcctaaaagattattcagggcaaggcatggtggcgcctgcctataatcccagcactttgggaggctgagacaggaggatctcttgagcccaggagttcatgaccagccagggcaatgtagcgagaccgccatctctacaaaaaacttcagaaattagccaggtgtagtggcgcacgcctgtagttccagctacttgggaggctgaggtgggaggatcacttgagcccaagagttcaaggctgcattgagctatgattgcaccactatactccagcctgagcaacagagcaagattctgtctcaaaacattataataataaatacattttctaaaaaaagatggggtggagggaggttgcaaattcccccaatggcctggtggagctagggtgacttctgggaactggggtctttcggctcagctgtcacaaggaattaggctctgccctgaggtcccgtgggggccagatggagattagacctgggcattcgcctggttggcccccgcggcgcagcagggggggcggtgggaggagagagaggctggatctgaggtcccagtgacctgccccaggggacagggaccaaggggaggcgggagatggagcaggagctaaaaaccggaagaaaggcccagagattcgaaggggtgaggaggggtggagagaggagagacggggctgggggcacagacacgggcaaaagtgctgctatagggacacagaaatgcccaccctgagggcaagaccctcgcccaactccccaccaatccctaatgcctgccccaccgcaggtgctgtggggtgagggtggtgcgtgggccctgacccctgtgcccacgcacatgtccatgcgtgcgcctgcgcgggcatctgaggcgtggatgccggcagggtgcgtgtgcagcgcctttgggtgtgggccacgagtacgcccatgtgcgcgtctgcgcccgcccctgccagcccacacaatcctcttttcttgtccttacaatgcacaagggtggcctccagcacgagctccacttctgtcctcccaccacttccctctctgcaagcggcgtgaagtccttcctaggactctgggacagagacccgggcgggacccccaaaatccagtgctccaggacttggggtgcggggggcaaagcacgaatggaggaatttcaggcactgcggagggtcagggcccatgggcgggtgcctgtctgccctactgcaaaaagcgagtggccactgactccccaagtccccatgttctaggctcctggtggaatttcaggctggggaccttgtgttctagcccctgtgcaagcagccagccccgttgcagggaggcagggacagacatcctaaaagatgattcattgttgccaggtgcggtggctcacgcctgtgatcccagcactttgggaggccgaggtgggcggatcacgaggtcaggagatggagaccattctggctaacactgtgaaaccctgtctctactaaaattacaaaaaaattagccgggcgtggtggcgggcgcctgtagtcccagctactcgggaggctgaggcgggagaatggcgtgaacccgggaggcggagcttgcagtgagccgagatcgcgccactgcactccagcctgggcgacagagcgagactccgtctcaaaaaaaaaa

SEQ ID NO: 11181 - DNA, 221 bp, Homo sapiens
gtcacgagatcgagaccatcctggctaacacggtgaaaccccgtctctgctaaaaatacaaaaaattagccaggcgtggtggcgggtgcctgtagtcccagctactcgggaggctgaggcaggagaatggcgtaaacctgggaggcagagcttgcagtgagcggagatcgtgccactgcactccagcctgggcgacagagtgagactctgtctcaaaaaaa

SEQ ID NO: 11182 - DNA, 136 bp, Homo sapiens; identical to SEQ ID NO: 5560

SEQ ID NO: 11183 - DNA, 150 bp, Homo sapiens; identical to SEQ ID NO: 5248

SEQ ID NO: 11184 - DNA, 126 bp, Homo sapiens
tcagctactcgggaggctgaggcaggagaatcacttgaacccgggaggcagaggttgcagtgagccaagattgtgccattgcactccagcctggtgacagagcaagactccgtctcaaacaaagaa

SEQ ID NO: 11185 - DNA, 135 bp, Homo sapiens; identical to SEQ ID NO: 5580

SEQ ID NO: 11186 - DNA, 1710 bp, Homo sapiens
aggacgttgctaaacattctgcagcgaatgtataggacagctcccacgacaaagaattatcctgcccagaatctctgtagagcgaggttgaaaacccctgctctaaagggatggcctctcttatagggagaagatggcatttttcacccggcctcggatgaatatcccagctctctctgcagatgacgtctaatcgccagaaaagtatttcctttgttccactgaccaggctgtgaacattgactgtggctaaagttatttatgtggtgttatatgaaggtactgagtcacaagtcctctagtgctcttgttggtttgaagatgaaccgactttttagtttgggtcctactgttgttattaaaaacagaacaaaaacaaaacacacacacacacaaaaacagaaacaaaaaaaaccagcattaaaataataagattgtatagtttgtatatttaggagtgtatttttgggaaagaaaatttaaatgaactaaagcagtattgagttgctgctcttcttaaaatcgtttagattttttttggtttgtacagctccaccttttagaggtcttactgcaataagaagtaatgcctgggggacggtaatcctaataggacgtcccgcacttgtcacagtacagctaatttttcctagttaacatattttgtacaatattaaaaaaatgcacagaaaccattgggggggattcagaggtgcatccacggatcttcttgagctgtgacgtgtttttatgtggctgcccaacgtggagcgggcagtgtgataggctgggtgggctaagcagcctagtctatgtgggtgacaggccacgctggtctcagatgcccagtgaagccactaacatgagtgaggggagggctgtggggaactccattcagttttatctccatcaataaagtggcctttcaaaaagaatcttcctcttgctctctttttctttcctacccctcacttcatctgtttccctgatttttgactctcccctttccagtcatttctttcccacccatccgcagtcctggaaacatttattttttcttttgcccactgttttcatttgctcattaaattaaaatgactgctcggctcattgggaatccacatccccaagttagactggggatatgctctctgtactgtctccttctatggaattccaccccacccagagagagatgacttcacagtttgttcatatgagcatcatcccatgtcgtccccaacccagggctggtaggtgctacagcttgtgcttcatgctgctcctgtggcccctattcctacccagctcagagctttgcagggtctactgcagacaatcagaagtcagtttctaacaaatagcaacagccacaaatctcttcctccttcctctctgacattaccctgtgcaacttttctcaaagtctgttgcaccactcagcaaagcaagttgcaccagctatatcagaatcacctggggcagcctattaaaaatgcagactgttgagaccatcctggctaacacggtgaaaccctgtctctactaaaaatacaaaaaattagccggccgtggtggcgggcagctactcgggaggctgaggcaggagaatgacctgaacctgggaggcagagcttgcagtgagctgagattgtgccactgcactccagcctgggtgacagagcaagactccgtctcaaaaaaaaaaaa

SEQ ID NO: 11187 - DNA, 45 bp, Homo sapiens; identical to SEQ ID NO: 7922

SEQ ID NO: 11188 - DNA, 243 bp, Homo sapiens; identical to SEQ ID NO: 7930

SEQ ID NO: 11189 - DNA, 166 bp, Homo sapiens; identical to SEQ ID NO: 5608

SEQ ID NO: 11190 - DNA, 303 bp, Homo sapiens
ggttgggggctgcggccttgcgggctgcgcgagctggaggtgcgcgtgagcgagctgggcctgggctacgcgtccgacgagacggtgctgttccgctactgcgcaggcgcctgcgaggctgccgcgcgcgtctacgacctcgggctgcgacgactgcgccagcggcggcgcctgcggcgggagcgggtgcgcgcgcagccctgctgccgcccgacggcctacgaggacgaggtgtccttcctggacgcgcacagccgctaccacacggtgcacgagctgtcggcgcgcgagtgcgcctgcgtg

SEQ ID NO: 11191 - DNA, 1119 bp, Homo sapiens
ctcctcatgtataaggaacctatagtggtgtagaatctactcttcttccccctgtggcttccaggcccccctgtatagctgctatccagcccgatttctcaccactggcccagggcttcctcctgccccgtggcttcacgtctctgaacacatcaatctctgatgttctctctccttccattgaattccaccagacacattcagggtttacttcgtaatgtcttcatatgagtatcaatcaacaccttccccaactcaattgtactaggttgtagagcacaaggatggtctcgtgctgctctgtggcacctgtgcctacactgctctgagctttgaggaggctgctctctttgctgaccccatgatcttttctgcccttctgttaagggcattggccacagcaacggggcaaatgccccaagctggctgtaagtgacccatccctttggctcccatgattagaccaaggagaggcatggggtccagctgagccattcagaaccattccttagcattttccactcaaaggttagagatgagattttctcttcccaaggctacctctggccatggttccagcttcatgggggcaatgggattaggaaaatgaggtcaacctgcaaaggaaagcagatgcaagagatggagacagaatgggggtgtcctggggatcttggagcctgaattcattggcacaaaaggcagcagcatcctcactgtatctgcagtccatttggactcaataaaaactttgaaagtcacatgtgttatggaattccttctcagtgacacattcatctgtgctcagttgtcccagcaagggtcagcccctcatacccctgcagcatccgctgctatgaagcagagctgtaaacgccctccctgtgtataggaaaagctacatggagcaaatcctcctgcctgaagaagtgcatctcagcatcacttcagctgtcggggcatttgtggggagaaccagaccacctctgcggaaggcagcagaccctcttccagccatggatggagttgaattctctataaacggttcaccagcaaaccaccaatacattccattgtttgcctagagagaaatttaaaaataaataaatgttcacttat

SEQ ID NO: 11192 - DNA, 102 bp, Homo sapiens; identical to SEQ ID NO: 7949

SEQ ID NO: 11193 - DNA, 1512 bp, Homo sapiens
ggttaatggaatcacgtggtatgtatctttttgagagaggccttttttactctgtataatatccttgagattcatccatgttgttgtgtgtttcagtagtcatttattcttattgtccggtagtattccatgctatggatgtaccacagtcgtgctctttttgttaatagaactaaagcaactctatggagctaaggtaactgggtacagctgagtagtgatttaaagtttctggagtgttttcagaaataccatctcacctctaacaaggcgatctcaagtcacttatttgggaaaacaaaattacgaagatatgatttctttcattgttgtagaaccattaaataagtcatcagattatgatttgaacccagggcacccagtcaagtgctctttccctatgcggccttagctacggggatttacatttacagttgagaagtgaaacaagaaaaatttgtttttgaaacataatagtaccatctagcctggctgaccaacccttccccagcaccaccagtggacatgcgcatgtacatacacacatacatacccacactttaggctgagggagagtcttgtctttttgaatagccttcatagtaacctctgggattcaagggtacctgatatttaagacctttattaaaccttggttcagtggttttcaaacatttttgaatatcagaaccccttttcctaatggactgtttcatagaaccccaaaatgtgtaacaggtaacagcaatagttttgaaagttcaaaatggataatctttacttgtgaggtcggacatgtgaatggtgggcatattcccatgattctaatatgctgtcagaattatgagtgacagacagttgctgacttggagcacttcagtggctcatttgtttttctctatttggttatacaacagtgagacaagcgtgatgcacatggccattgtcagggtgacttttcctgaacagcatgctgtgtagttactttgattaatcagagatgggaggacaagctccgttttgaggtcaacataatactgagctatcctagcaatacaaaattatgtgtggtggcgggcttcattgtcttaacatatggcttggaacatgtttgagtgtgcatctttttttttttaattgtcctaccttaaaaacacacacattttgcagactctctgaagccctgtggactactattagataattgttggttgggcatgctgtaatcccagaattttgggaggcagaggcgggaggattgcttgagcccaggagttcgagaccagccctggaaacatagcaagatcctacctctacaaaaaaattaaaaaattagctgggcatggtgatgcatgccagcagacccaactactccagagactgaagtaggatgatcacttgagcctgggagttcaaggctgcagcgagccctggttattctgttgcactccagcctgggtgacagaatgagaccctgtccccaccctcccccccaaaaaaaagaaaagaaaa

SEQ ID NO: 11194 - DNA, 35 bp, Homo sapiens
gggtgacagagtgagactctgtctcaaaaaaaaaa

SEQ ID NO: 11195 - DNA, 238 bp, Homo sapiens
  SITE (7): n equals a,t,g, or c
gatcacntgaggtcagagttcgagaccagcctggccaacatggtgaaaccccgtctctactaaaaatacaaaaattagctgggcatggtggcgtgtgcctgtaatcgcagctactctggaggctgaagcaggagaatcgcttaaacccaggaggcagaggttgcagtgagccgagatcgcgccactgcactccagcctgggtgacagagcaagactccatctcaaaaaaaaaaaaaaa

SEQ ID NO: 11196 - DNA, 147 bp, Homo sapiens; identical to SEQ ID NO: 7491

SEQ ID NO: 11197 - DNA, 219 bp, Homo sapiens
gagttcgagaccagcctgaccaacatggtgaaaccccatctctactaaaaatacaaaaattagccgggcgtggtggcacgtgcctgtaatcccagctactcaggaggctgaggcaggagaattgcttgagcccgggaggcggaggttgcagtgagctgagatcgcgccactgcactccaacctgggtaacagggcaagactctgtttcaaaaaaaaaaa

SEQ ID NO: 11198 - DNA, 150 bp, Homo sapiens
cctgtaatcccagctactcaggaggctgaggcaggagaattgcttgaaccttggaggcagaggttgcagtgagctgagatcatgccattgcactccagtctgggcgacagagcaagactctatctcaaaaaaaaaaaaaaaaaaaaaaaa

SEQ ID NO: 11199 - DNA, 35 bp, Homo sapiens; identical to SEQ ID NO: 11194

SEQ ID NO: 11200 - DNA, 238 bp, Homo sapiens; identical to SEQ ID NO: 11195
  SITE (7): n equals a,t,g, or c

SEQ ID NO: 11201 - DNA, 147 bp, Homo sapiens; identical to SEQ ID NO: 7491

SEQ ID NO: 11202 - DNA, 219 bp, Homo sapiens; identical to SEQ ID NO: 11197

SEQ ID NO: 11203 - DNA, 150 bp, Homo sapiens; identical to SEQ ID NO: 11198

SEQ ID NO: 11204 - DNA, 2300 bp, Homo sapiens; identical to SEQ ID NO: 8092

SEQ ID NO: 11205 - DNA, 1561 bp, Homo sapiens; identical to SEQ ID NO: 8093

SEQ ID NO: 11206 - DNA, 2296 bp, Homo sapiens; identical to SEQ ID NO: 8094

SEQ ID NO: 11207 - DNA, 299 bp, Homo sapiens; identical to SEQ ID NO: 8095

SEQ ID NO: 11208 - DNA, 415 bp, Homo sapiens; identical to SEQ ID NO: 8096

SEQ ID NO: 11209 - DNA, 415 bp, Homo sapiens; identical to SEQ ID NO: 8096

SEQ ID NO: 11210 - DNA, 300 bp, Homo sapiens; identical to SEQ ID NO: 8098

SEQ ID NO: 11211 - DNA, 2713 bp, Homo sapiens
gtctctgcctggctttggtatcagaatgatgctggcctcataaaatgagttagggaggattccctctttttctattgattggaagagtttcagaaggaatggtaccagttcctccttgtacctctggtagaattcggctgtgaatccatctggtcctggactctttttggttggtaagctattgattatttccacaatttcagctcctgttattggtctattcagagattcaacttcttcctggtttagtcttgggagagtgtatgtgtccaggaatttatccatttcgtctagattttctagtttatttgcgtagaggtgtttgtagtattctctgatggtagtttgtatttctgtggaatcagtggtgatatcccctttatcattttttattgcgtctatttgattcttctctctttttttctttattagtcttgctagcggtctatcaattttgttgaccctttcaaaaaaccagctcctggattcattgattttttgaagggttttttgtgtctctatttccttcagttctgctctgattttagttatttcttgccttctgctagcttttgaatgtgtttgctcttgcttttctagttcttttaattgtgatgttagggtgtcaattttggatctttcctgctttctcttgtgggcatttagtgctataaatttccctctacacactgctttgaatgtgtcccagagattctggtatgttgtgtctttgttctcattggtttcaaagaacatctttatttctgccttcatttcgttatgtacccagtagtcattcaggagcaggttgttcagtttccatgtagttgagcggttttgagtgagattcttaatcctgagttctagtttgattgcactgtggtctgagagatagtttgttataatttctgttcttttgcatttgctgaggagagctttacttcccagtatgtggtcaattttggaataggtgtggtgtggtgctgaaaaaaatgtatattctgttgatttggggtggagagttctgtagatgtctattaggtccccttggtgcagagccgagttcaattcctgggtatccttgttgactttctgtctcgttgatctgtctaatgttgacagtggggtgttaaagtctcccattattaatgtgtgggagtctaagtctctttgtaggtcactcaggacttgctttatgaatcttggtgctcctgtattgggtgcatatatatttaggatatttagctcttcttgttgaattgatccctttaccattatgtaatggccttctttgtctcttttgatctttgttggtttaaagtctgttttatcagagactaggattgcaacccctgcctttttttgttttccattggcttggtagatcttcctccatccttttattttgagcctatgtgtgtctctgcacgtgagatgtgtttcctgaatacagcacactgatgggtcttgactctttatccaatttgccagtctgtgtcttttaattggagcatttagtccatttacatttaaagttaatattgttatgtgtgaatttgatcctgtcattatgatgttagctggtgattttgctcgttagttgatgcagtttcttcctagtctcgatggtctttacattttggcatgattttgcagcggctggtaccggttgttcctttccatgtttagtgcttccttcaggagctcttgtaaggcaggcctggtggtgacaaaatctctcagcatttgcttgtctgtaaagtattttatttctccttcactcatgaagcttagtttggctggatatgaaattctgggttgaaaattcttttctttaagaatgttgaatattggcccccactctcttctggcttgtagggtttctgccgacagatccgctgttagtctgatgggcttccctttgagggtaacccgacctttctctctggctgcccttaacattttttccttcatttcaactttggtgaatctgacaattatgtgtcttggagttgctcttttcgaggagtatctttgtggcgttctctgtatttcctgaatctgaacgttggcctgccttgctatattggggaagttctcctggataatatcccgcagagtgttttccaacttggttccattctccccgtcactttcaggtacaccaatcagacgtagatttggtcttttcacatagtcccatatttcttggaggctttgctcatttctttttattcttttttctgtaaacttcccttctcgcttcatttcattcatttcatcttccattgctgataccctttcttccagttcatcgcttcggctcctgagccttctgcattcttcacgtagttctcgagccttggttttcagctccatcagctcctttaagcacttctctgtattggttattctagttatacattcttctaaatttttttcaaagttttcaacttctttgcctttggtttgaatgtcctcccgtagctcagagtaatttgatcatctgaagccttcttctctcagctcgtcaaagtcattctccatccagctttgttctgttgctggtgaggaactgcgttcctttggaggaggagaggcgctctgctttttagagtttccagtttttctgttctgttttttccccatctttgtggttttatctactttggtctttgatgatggtgatgtacagatgggtttttggtgggga

SEQ ID NO: 11212 - DNA, 4532 bp, Homo sapiens
gtctaacgtttaagtctttaatgcctcttgaattaatttttgtataaggtgtaaggaagggatccagtttcagctttctacatatggctagccagttttcccagcaccatttattaaatagggaatcctttccccattgcttgtttttctcaggtttgtcaaagatcggatagttgtagatatgcggcattatttctgagggctctgttctgttccattgatctatatctctgttttggtaccagtaccatgctgttttggttactgtagccttgtagtatagtttgaagtcaggtagcgtgatgcctccagctttgttcttttggcttaggattgacttggtgatgcaggctcttttttggttccatatgaactttaaggtagttttttccaattctgtgaagaaagtcattggtagcttgatggggatggcattgaatctgtaaattaccttgggcattatggccattttcacgatattgattcttcctacctatgagcatggaatgttcttccatttgtttgtatcctcttttatttcattgagcagtggtttgtagttctccttgaagaagtccttcacatcccttgtaagttggattcctaggtattttattctctttgaagcaattgtgaatgggagttcactcattgtttggctccctgtttgtctgttattggtgtataagaatgcttgtgatttttgcacattgattttgtatcctgagactttgctgaagttgcttatcagcttaaggagatttggggctgagacagtggggttttctagatatacaatcatgtcatctgcaaacagggacaatttgacttcctcttttcctaattgaataccctttatttccttctcctgcctaattgccctggccagaacttccaacactatgttgaataggagtggtgagagagggcatccctgtcttttgccagttttcaaagggaatgcttccagtttttgcccattcagtatgatatttgctgtgggtttgtcatagatagctcttattattttgagatacatcccatcaatacctaatttattgagagtttttagcatgaagcgttgttgaattttgtcaaaggccttttctgcatctattgagataatcatgtggtttttgtctttgattctgtttatatgctggattacatttattgatttgcatatattgaaccagccttgcatcccagggatgaagcccacttgatcatggtggataagctttttgatgtactgctggattcagtttgccagtattttattgaggatttttgcatcaatgttcatcaaggatattggtctaaaattctcttttttggttgtgtctctgcccagctttggtatcaggatgatgctggcctcattaaatgagttagggaggattccgtctttttctattgattggaatagtttcagaaggaatggtaccagttcctccttgtacctctggtagaattcggctgtgagtccatctggtcctggcctctttttggttggtaagctattgatcattgccacaattttagagcctgttattggtctattcagagattcaacttcttcctggtttagtcttgggagggtgtatgtgtcgaggaatttacccatttcttctagattttctagtttatttgcgtagaggtgtttgtagtattctctgatggttgtttgtatttctgtgggatcggtggtgatatcccctttatcattttttattgcgtctatttgattcttctctcttttcttctttattagtcttgctagcggtctatcaattttgttgatcctttcaaaaaaccagctcctggattcattcattttttgaagggttttttgtgtctctatttccttcagttctgctgtgattttagttatttcttgccttctgctagcttttgaatgtgtttgctcttgcttttctagttcttttaattgtgatgttagggtgtcaattttggatctttcctgctttctcttctgggcatttagtgctataaatttccctctacacactgctttgaatgcatcccagagattctggtatgttgtgtctttgttctcgttggtttcaaggaacatctttatttctgccttcatttcgtcatgtacccagtagtcattcaggagaaggtttttcagtttccatgtagttgatcggttttgagtgagtttcttaaacctgagttctagtttgattgcactgtggtctgagagacagtttgttataatttctgttcttttacatttgctgaggagagctttacttccaactatgtggtcaattttggaataggtgtggtgtggtgctgaaaaaaatgtatattctgttgatttggggtggagagttctgtagatgtctattaggtccccttggtgcagagctgagttcaattactgggtatccttgttaactttctgtctcgttgatctgtctaatgttgacagtgggttgttaaagtctcccattattattgtgtgggagtctaagtctctttgtaggtcactcaggacttgctttatgaatctgggtgctcctgtattgggtgcgtatatatttaggatagttagctcttcttgttgaattgatccctttaccattatgtaatggccttctttgtctcttttgatctttgttagtttaaagtctgttttatcagagactaggaatgcaacccctgcctttttttgttttccatttgcttggtagaccttcctccatccttttattttgagcctatgtgtgtctctgcacatgagatgggtttcctgaatacagcacactgatgggtcttgactctttatccaatttgccagtctgtgtcttttaattggagcatttagtccatttacatttaaagttaatattgttatgtgtgaatttgatcctgtcattatgatgttagctggttattttgctcgttagttgatgcagtttcttcctagcctcaatggtctttacaatttggcatgattttgcagcggctggtaccagttgttcctttccatgtttagtgcgtccttcaggagctcttttagggcaggcctggtggtgacaaaatctctcagcatttgcttgtctgtaaagtattttatttctccttcacttatgaagcttagtttggctggatatgaaattctgggttgaaaattcttttctttaagaatgttgaatattggcccccactctcttctggcttgtagagtttctgccgagagatccgctgttagtctgattggcttccctttgtggttaacccgacctttctctctggctgcccttaacattttttcctttatttcaactttggtgaatctgccaattatgtgtcttggagttgctcttctcaaggagtatctttgtggcgttctctgtatttcctgaatctgaatgttggcctgccttgctagattggggaagttctcctggataatatcctgcagagtgttttccaacttggttccattctccacgtcactttcaagtacaccaatcagatgtagatttggtcttttcgcatagtcctatatttcttggaggctttattagtttctttttattcttttttctctaaacttcccttctcgcttcatttcattcatttcatcttccatcactgataccctttcttccagttgatcgcatgggctcctgaggcttctgcgttcttcacgtagttctcgagccttggctttcagctccatcagctcctttaagcacctctctgtattggttattctagttatacattcgtctaaatttttttcaaagttttcaacttctttgcctttggtttgaatttcctcctgtagcttggagtagttttatcgtctgaagccttcttctctcaactcatcagtcattctccgtccagctttgttccgttgctggtaaggagctgcgttcctttggaggaggagaggcactctgctttttagagtttccagtttttctgctctgttttttccccatctttgtggttttatctacttttggtctttgatgatggtgatgtacagatgggtttttggtgtggatgtcctttctgtttgttagttttccttctaacagacaggaccctcagctgcaggtctgctggagtttgctagaggtccactccagaccctgtttgcctgggtactagcagcggtggctgcagaacagtggattttcgtgaaccatcaatgctgctgtctgatcgttcctctggaagttttgtctcagaggagtacccagccgtgtgaggtgtcagtctgcctttactggggggtgcctcccagttaggctgctcagtggtcaggggtcagggacccacttgaggaggcagtctgcctgttctcagatctccagctgcgtgctgggagaaccactgctctcttcaaagctgtcagacagggacatttaagtctgcagaggttactgctgtctgtttgtttgtctgtgcctgcccccagaggtggagcctacagagccgtcatgcctccttgagctgtgtggctccacccagttgagctt

SEQ ID NO: 11213 - DNA, 1287 bp, Homo sapiens
cttttgatctttgttggtttaaagtctgttttatcagagactaggattgcaacccctgcctttttttgtttcccatttgcttggtagatcttcctgcatccttttattttgagcctatgtgtgtctctgcccatgagatgggtttcctgaatacagcacactgatgggtcttgactctttatccaatttgccagtctgtgtcttttaattggagcatttagtccatttacatttaaagttaatattgttatgtgtgaatttgatcctgtcattatgatgttagctgattattttgctcgttagttgatgcagtttcttcctagccttgatggtctttacaatttggcatgattttgcagtggctgttaccagttgttcctttccatgtttagcgcttccttcaggagctcttttaggtcaggcctggtggtgacaaaatctctcagcatttgcttgtctgtaaagtattttatttctccttcacttttgaagcttagttcggctggatatgacattctgggttgaaaattcttttctttaagaatgttgaatattggcctccactctcttctggcttgtagagtttctgctgagagatctgctgttagtctgatgggcttccctttgtgggtaacccgacctttctctctggctgcccttaatattttttccttcatttcaactttggtgaatctgacaattgtgtgtcttggagttgctcttctcgaggagtatctttgtggcgttctctgtatttcctgaatctgaatgttggcccaccttgctagattggggaagttctcctggatagtatcctgcagaatgttttccaacttggttccattctccccatcactttcaggtacaccaatcagacgtagatttggtcttttcacatagtcccatatttcttggaggctttgttcatttctttttatttttttttctctaaacttcccttctcacttcatttcattcatttcatcctccatcactgataccctgtcttccagttgatcgcatcggctcctgaggcttctgcattcttcacgtagttcttgagccttggctttcagctccatcagctcctttaagcactgctctgtattggttattctagtcatacattcgtctaaattttttttcaaagttttcaacttccttgcctttggtttgaatttcctcctatagctcggagtagtttgatcgtctgaagccttcttctctcaactcatcaaagtcattctctgtccagctttgttccattgctggtgaggagctgcgttc

SEQ ID NO: 11214 - DNA, 4529 bp, Homo sapiens
gtctaacgtttaagtctttaatccatctcgaattaatttttgtataaggtgtaaggaagggatccagtttcagctttctacatatggctagccagttttcccagcaccatttattaaatagggaatcctttccccattgcttgtttttctcaggtttgtcaaagatcagatagttgtagatatgcggcattatttctgagggctctgttctgttccattgatctatatctctgttttggtaccagtaccatgctgttttggttactgtagccttgtagtatagtttgaagtcaggtagtgtgatgcctccagctttgttcttttggcttaggattgacttggcgatgcaggctcttttttggttccatatgaacttgaaaatagttatttccaattctgtgaagaaagtcattggtagcttgttggggatggcactgaatctgtaaattaccttgggcagtatggccattttcatgatattgattcttcctacccatgagcatggaatgttcttccatttgtttgtatcctcttttatttcattgagcagtggtttgtagttctccttgaagaggtccttcacgtcccttgtaagttggattcctaggtatcttgttctctttgaagcaattgtgaatgggagttcactcatgatttggctctctgtttgtctgttattggtatataagaatcttgtgatttttgtacattgattttgtaacctgagactttgctgatgttgcttatcagcttaaggagattttgggctgagacaatggggttttctagatatacaatcatgtcactgcaaacagggacaatttgacttcctcttttcctaattgaataccctttatttccttctcctgcctaatggccctggccagaagttccaacactctgttgaataggagtggtgaaagagggcatccctgtcttgtgccagttttcaaagggaatgcttccagtttttgctcattcagtatgatattggctgtgggtttgtcatagatagctctcattattttgagatacgtcccatcaatacctaatttattgagagtttttagcatgaagggttgttgaattttgtcaaaggccttttctgcatctgttgagataatcatgtggtttttctctttggttctgtttatatgctggattacatttattgatttgcatatattgaaccagccttgcatcccagggatgaagcccacttgatcatggtggataagctttttgatgtgctgctggattcgatttgccagtattttattgaggatttttgcatcaatgttcatcaaggatattggtttaaaattctctttttttggttgtgtctgtgcccggctttggtatcagaatgatgctggcctcacaaaatgagttagggaggattccctctttttctattgattggaatagtttcagaaggaatggtaccagttcctccttgtacctctggtagaattcggctgtgaatccatctggttctggactctttttggttggtaagctattgattatgccacaatttcagagcctgttattggtctattcagagattcaacttcttcctggtttagtcttgggagggtgtatgtgttgaggaatttatccatttcttctagattttctagtttgtttgcgtagaggtgtttgtagtattctctgatggtagtttgtatttctgtgggatcagtggtgatatcccctttatcattttttattgcatctatttgattcttctctcttttcttctttattagtcttgctagtggtctatcaattttgttgatcttttcaaaaaaccagctcctggattcattaattttttgaagggttttttgtgtctctatttccttcagttctgctctgattttagttatttcttgccttctgctagctttcgaatgtgtttgctcttgcttttctagttcttttaattgtgatgttagggtgtcaattttggatctttcctgctttctcttgtgggcatttagtgctataaatttccctctacacactgctttgaatgtgtcccagagattctggtatgttgtgtctttgttctcgttggtttcaaagaacatctttatttctgtcttcatttcgttatgtacccagtagtcattcaggagcaggttgttcagtttccatgtagttgagcggttttgagtgagtttcttaatcctgagttctagtttgattgcactgtggtctgagagatagtttgttataatttctgttcttttacatttgctgaggagagctttacttccaggtatgtggtcaattttggaataggtgtggtgtggtggtgaaaaaaatgtatattctgttgatatggggtggagagttctgtagatgtctattaggtctgcttggtgcagagctgagttcaattcctggatatccttgttgactttctgtctctttgatctgtctaatgttgacagtggggtgttaaaatctcccattattattgtgtgggagtctaagtctctttgtaggtcactcaggacttgctttatgaatctgggtgctcctgtattgggtgcatatatatttaggatagttagctcttcttgttgaattgatccctttgccgttatgtaatgtccttctttgtctcttctgatctttgttggtttaaagtctgttttatcagagtctaggattgcaacccctgccttttttagttttccatttgcttggtagatcttcctccatccttttattttgagcctatgtgtgtctctgcacgtgagatgggtttcctgaatacagcacactgatgggtcttgactctttatccaatttgccagtctgtgtcttttaattggagcatttagtccatttacatttaaagttaatattgttatgtgtgaatttgatcctgtcattatgatgttagctggttattttgctcgttagttggtgcagtttcttcctagccttgatggtctttacaatttggcctgattttgcagtggctggtaccagttgttcctttccatgtttagtgcttccttcaggagctctttcggggcaggcctggtggtgacaaaatctctcagcatttgcttgtctgtaaagtattttatttctccttcacttatgaagcttagtttggctgggtatgaaattctgggttgaacattcttttctttaagaatgttgaatattggctcccactctcttctggcttatagagtttctactgagagatccactgttagtctgacgggcttccctttgtgggtaacctgacctttctctctggctgcccttaacattttttccttcatttcaactttggtgaatctgacaattatgtgtcttggagttgctcttctcgaggagtatctttgtggcgttctctgtatttccatgaattctgaacgttggcctgccttgctagattggggaagttctcctggataatatcctgcagagtgttttccaacttggttccattctccccgtcactttcaggtacacgagtcagacgcagatttggtcttttcacatagtcccatatttcctggaggctttgttcatttctttttattctttcttctctaaacttcccttctcacttcatttcattcatttcatcttccatcactgataccctttcttccagttgatcgcattggcttctgaggcttctgcattcttcacgtagttctcgagccttggttttcagctccatcagctcctttaagcacttctctgtattggttattctagttatacattagtctaaatttttttcaaagttttcaacttctttgcctttggtttgaatttcctcctgtagctcagagtagtttgatcgtctgaagccttcttctctcaactcgtcaaagtcattctccgtccagctttgttccattgctggtgaggagctgcattcctttggaggaggagaggcactctgctttttagagtttccagtttttctgctctgttttttccccatctttgtggttttatctacttttggtctttgatgatggtgttgtacagatgggtttttggtgtggatgtcctttctgtttgttagttttccttctaacagacaggaccctcagctgcaggtctgttggagtttgctagaggtccactccagaccctgtttgcctggatgtcaccagcggtggctgcagaacagtcgattttcgtgaactgtgaatgctgctgtttgatcgtttctctggaagttttgtctcagaggagtacccggtcatgtgaggtgtcagactgtccctactggggtgtgcctcccaggtaggctgctctggggtcaggggtcagggacccagttgaggaggcagtctccctgttctcagatctccatctgcgtgctgggagaaccactgctctcttcaaagctgtcagacagggacatttaagtctgcagaggttactgctgtctttttgtttgactgtgccctgccgccagaggtgcagcccacagccgcaagcacgccttcttgagctgtggagggctccaccca

SEQ ID NO: 11215 - DNA, 2229 bp, Homo sapiens
ccttcatttcgttacgtacttaatagtcattcaggagcaggttgttcagtttccatgtagttgagcaggggtgatttagtttcttaatcctgagttctagtttgattgcactgtggtctgagagacggttgttataatttctgttcttttacatttgctgagaagagctttacttccaactatgtggtcaattttggaataggtgtggtgtggtgctgaaaaaaatgtatattctgttgatttggggtggagagttctgtagatgtctattaggtctacttggtgcagagctgagttcaattcctgggtatccttgttaactttctgtctcgttgatctgtctaatgttgacagtggggtgttaaagtctctcattattattgtgtgggagtctaagtctctttgtaggtcactcaggacttgctttatgaatgtgggtgctcctgtattgggtgcatatatatttaggatagttagctcttcttgttgaattgatccctttaccattatgtaatggccttctttgtctcttttgatctttgttggtttaaagtctgttttatcagagactaggattgcaacccttgcctttttttgttttccatttgcttggtagatcttcctccatccttttattttgagcctatgtgtgtccctgcacgtgagatgggtttcctgaatacagcacactgatgggtcttgactctttatccaatttgccagtctgtgtcttttaattggagcatttagcccatttacatttaaggttaatattgttatgtgtgaacttgatcccgtcattatgatgttagctggttattttgctcattagttgatgcagtttcttcctagcctcaatggtctttacaatttggcatgattttgcagcggctggtaccggttgttcctttccatgtttagtgcttccttcaggagctcttttagggcaggcctggtggtgacaaaatctctcagcatttgcttgtctgtaaagtattttatttctccttcacttatgaagcttagtttggctggatatgaaattctgtgttgaaaattcttttctttaagaatgttgaatattggcccccactctcttctggcttgtagagtttctgccaacagatccgctgttagtctgatgggcttccctttgtgggtaacctgacctttctctgtggctgcccttaacattttttccttcatttcaactttggtgaatctgacaattatgtgtcttggagctgctcttctcaaggagtatctttgtggcattctctgtatttcctgaatctgaatgttagcctgccttgctagattggggaagttctcctggatgatatcctgcagagtgttttccaacttggttccattctccctgtcactttcaggtacaccaatcagacgtagatttggtctctttcacatagtcccatatttcttggaggctttgtttgtttctttttattcttttttctctaaacttcccttctcacttcattttgttcatttcatcttccatcactgatactccttcttccagttgatcacatcggctcctgaggcttctgcattcttcacgtagttctcgagccttggctttcagctccatcagctcctttaagcacttctctgtattggttattctagttatatattcgtctaaatttttttcaaagtttttaacttctttgcctttggtttgaatttcctcctgtagctcggagtagtttgatcgtctgaagccttcttctctcaactcgtcaaagtcattctccgtccagctttgttccattgctggtgaggaactgcgttcctttggagtaggagaggcactctgctttttagagtttccagtttttctgctctgttttttccccatctttgtggttttatctacttttggtctttgacgatggtgatgtacagatgggtttctggtgtggatgtcctttctgtttgttagttttccttctaacagacaggaccctcagctgcagatctgttgaagtttgctagaggtccactccagaccctgtttgcctgggtatcagcagcggtggctgcagaacagcggattttcatgaaccacgaatgctgctgtctgatcgttcctctggaagttttgtctcataggagtacccggcagtgtgaggtgtcagtctgcccctactagggggtgcctcccagttaggctgctcgggggtcaagggtcatggacccacttga

SEQ ID NO: 11216 - DNA, 617 bp, Homo sapiens
tattgattattctagttatactttcatctaaatttttttcaaagtttttaacttcttccccttcggtttgaatttcctcctgtagcttggagtagtttgatcgtctgaagccttcttctctcaactcgtcaaagtcattctcagtccagctttgttccgttgctggtgaggaactgtgttcctttggaggaggagaggtgctctgctttttagagtttccagtttttctgctctgttttttccccgtctttgtggttttatctacttttggtctttgatgatggtgatgtacagacgggtttttggtgtggatgtcctttctgtttgttagttttccttctaacagacaggactctcagctgcaggtctgttggagtttgctagaggtccactccagaccctgtttgcctgggtaacagcagcggtggctgcagaacagcggattttcgtgaaccgcgaatgctgctgtctgatcgttcctctggaagttttgtctcagaggactacccggccgtgtgagatgtcagttggcccctactgtgggggtgcctcccagttacgctgctcaggggtcaggggtgacggacccacttgagaaggcagtctgcccgttctca

SEQ ID NO: 11217 - DNA, 3982 bp, Homo sapiens
gtctaacgtttaagtctttaatccatcttgaattgatttttgtataaggtgtaaggaagggatccagtttcagctttctacatatggctagccagttttcccagcaccatttattaaatagggaatcctttccccattgcttatttttctcaggtttttcaaagatcagatagttgtacatatgcggcgttatttctgagggctctgttctgttccattgatctatatctctgttttggtaccactaccatgctgttttggttactgtagccttgtagtatagtttgaagtcaggtagtgtgatgcctccagctttgttcttttggcttaggattgacttggcgatgcgggctcttttttggttccatatgaactttaaagtagttttttccaattctgtgaagaaagtcattggtagcttgatggggatggcattgaatctgtaaattaccttgggcagtatggccattttcacgatattgattcttcctacccatgagcatggaatgttcttccatttgtttgtatcctcttttatttccttgagcagtggtttgtagttctccttgaagaggtccttcccatcccttgtaagttggattcctaggtattttattctctttgaagcaattgtgaatgggagttcactcatgatttggttctctgtttgtctgttgttggtgtataagaatgcttgtgatttttgcacattgattttgtatcctgagactttgctgaagttgcttatcagcttaaggagattttgggctgagacaatggggttttctagatatacatcatgttgtctgcaaacagggacaatttgacttcctcttttcctaattgaataccctttatttccttctcctgcctgattgccctggccagaacttccaacactatgttgaataggagtggtgagagagggcatccctgtcttgtgccagttttcaaagggaatgcttccagtttttgcccattcagtatgatattggctgtgagtttgtcatagatagctcttattattttgaaatacgtcccatcaatacctaatttattgagagtttttagcatgaagggttgttgaattttgtcaaaggctttttctgcatctattgagataatcatgtggtttttgtctttggctctgtttatatgctggattacatttattgatttgcatatattgaaccagccttgcatcccagggatgaagcccacttgatcatggtggataagctttttgatgtgctgctggattcggtttgcccgtattttattgaggatttttgcatcaatgttcatcaaggatattggtctaaaattctctttttttcttgtgtccctgcctggctttggtatcagaatgatgctggcctcataaaatgagttagggaggattccctctttttctattgattggcatagtttcagaaggaatggtaccagttcctccttgtacctctggtagaattcggctgtgaatccatctggtcctggactctttttggttggtaagctattgattattgccacaatttcagctcctgttattggtctcttcagagattcaacttcttcctggtttagtcttgggagggtgtatgtgtccaggaatttatcaatttcttctagattttcgagtttatttgcgtagaggtgtttgtagtattctctgatggtagtttgcatttctgtgggttcggtggtgatatcccctttatccttttttattgtgtctatttgattcttctctctttttttctttattagtcttgctagcggtctatcaattttgttgatcctttcaaaaaaccagctcctggattcattgattttttgaagggttttttgtgtctctatttccttcagttctgctctgattttagttatttcttgccttctgctagcttttgaatgtgtttgctcttgcttttctagttcttttaattgtgatgttagggtgtcaattttggatctttcctgctttctcttgtgggcatttagtgctataaatttccctctacacactgctttgaatgcatcccagagattctggtatgttgtgtctttgttctcgttggtttcaaagaacatctttatttctgccttcatttcgttatgtaccccgtagtcattcaggagcaggttgttcagttttcatgtagttgagcggttttgagtgagattcttaattctgagttctagtttgattgcactgtggtctgagagattgttataatttctgttcttttacatctgctgaggagagctttacttcccagtatgtggtcaattttggaataggtgtggtgtggtgctgaaaaaaaatgtatattctgttgatttggggtggagagttctgtagatgtctattaggtccgcttggtgcagagctgagttcaagtcctgggtatccttgttgactttctgtctcattgatctgtctaatgttgacagtggggtgttaaagtctcccattattaatgtgtgggagtctaagtctctttgcaggtcactcaggacttgctttatgaatctgggtgctcctgtattgggtgcatatatatttaggatagttagctcttcttgttgaattgatccctttaccattatgtaatggccttctttgtctcttttgatctttgttggtttaaagtctgttttatcagagactaggattgcaacccctgcctttttttgttttccattggcttggtagatcttcctccatccttttattttgagcctatgtgtgtctctgcaagtgagatgggtttcctgaatacagcacactgatgggtcttgactctttatccaatttgccagtctgtgtcttttaattggagcatttagtccatttacatttaaagttaatattgttatgtgtgaatttgatcctgtcattatgatgttagctggtgattttgctcgttagttgatgcagtttcttcctagtctcgatggtctttacattttggcatgattttgcagcggctggtactggttgttcctttccatgtttagtgcttccttcaggagctcttgtaaggcaggcctggtggtgacaaaatctctcagcatttgcttgtctgtaaaggattttatttctccttcacttatgaagcttagtttggctggatgtgaaattctgggttgacaattcttttctttaagaatgttgaatattggcccccactctcttctggcttgtggggtttctgccgagagatccgctgttagtctgatgggcttccctttgagggtaacccgacctttctctctggctgcccttaacattttttccttcatttcaactttggtgaatctgacaattatgtgtcttggagttgctcttctcgaggagtatctctgtggcgttctctgtatttcctgaatctgaacgttggcctgccttgctagattggggaagttttcctggataatatcctgcagagtgttttccaacttggttccattctccccatcactttcaggtacaccaatcagatgtagatttggtcttttcacatagtcccatatttcttggaggctttgctcatttctttttattcttttttctctaaacttcccttctctcttcatttcattcatttcaccttccattgctgataccctttcttccagttgattgcatcggctcctgaggcttctgcattcttcacgtagttctcgagccttggttttcagctccatcagctcctttaagcacttctctgtattggttattctagttatacattcttctaaatttttttcaaagttttcaacttctttgcctttgctttgaatgtcctcccgtagctcagagtaatttgatcgtctgaagccttcttctctcagctcgtcaaagtcattctccatccagctttgttccgttgctggtgaggaactgcgttcctttggaggaggagaggtgctctgcgttttagagtttcccgtttttctgttctgttttttc

SEQ ID NO: 11218 - DNA, 914 bp, Homo sapiens
agtccccagagtgtgatgttccccttcctgtgtccatgtattctcattgttcagttcccacctatgagtgagaatatggggtgtttggttttttgttcttgcggtagtttactgagaatgatgatttccaatttcatccatgtccctacaaaggacatgaactcataattttttatggctgcatagtattccatggtgtatatgtgccacattttcttaatccagtctatcattgttggacatttgggttggttccaagtctttgctattgtgaataacgccgcaataaacatacgtgtgcatgtgtctttatagcagcatgatttatagccctttgggtatatacccagtaatgggatggctgggtcaaatggtatttctagttctagatccctgaggaatcaccacactgacttccacaagggttgaactagtttacagtcccaccaacagtgtaaaagtgttcctatttctccacatcctctccagcacctgttgtttcctgactttttaatgatcaccattctaactggtgtgagatggtatctcattgtggttttgatttgcattcctctgatgaccagtgatgatgagcattttgttgtgtgttttttggctgcataaatgtcttcttttgagaagtatctgttcgtgtccttcgtccactttttgatggggttgtttgtttttttcttgtaaatttgtttgagttcactgtagattctggatattagccctttgtcagatgagtaggttgcgaaaattttctcccattttgtaggttgcctgttcactctgatggtagtttcttttgctgtgcagaagctctttagtttaattagatcccatttgtcaattttggcttttgttgccattgcttttggtgttttagacatgaagtccttgcccatgcc

SEQ ID NO: 11219 - DNA, 1085 bp, Homo sapiens
ttttattttattttattattatactttaagatttagggtacatgtgcacaatgtgcaggttagttacatatgtatacatgtgccatgctggtgtgctgcacccattaactcgtcaattagcattaggtgtatctcctaatgctatccctccccctccccccaccacacaacagtccccagagtgtgatgttccccttcctgtgtccaagtgttctcattgttcaattcccacctatgagtgagaacacgcggtgtttggttttttgtccttgcgatagtttactgagaatgatggtttccaatttcatccgtgtccctataaaggacatgaactcatcattttttatggctgcatagtattccatggtgtatatgtgccacattttcttaatccagtctatcattgttggacatttgggttggttccaagtctttgctattgtgaatagtgccgcaataaacatacgtgtgcatgtgtctttatagcagcatgatttatagttctttgggtatatacccagtaatgggatggctgggtcaaatggtatttctagttctagatccctgaggaatcgccacactgacttccacaatggttgaactagtttacagtcccatcaacagtgtaaaagtgttcctatttctccacatcctctccagcacctgttgtttcctgactttttaatgattgccattctaactggtgtgagatggtatctcattgtggttttgatttggatttctctgatggccagtgatggtgagcattttttcatgtgttttttggctgcataaatgtcttcttttgagaagtgtctgttcatgtcctttgcccactttttgatggggttgtttgtttttttcttgtaaatttgtttgagttcattgtagatcctggatattagccctttgtcagatgagtaggttgcgaaaattttctcccattttgtaggttgcctgttcactctggtggtcatttcttttgctgtgtagaagctctttagtttaattagatcccatttgtcaattttggcttctgttgccattgcttttggtgttttagacatgaagtccttgcccatgcc

SEQ ID NO: 11220 - DNA, 1552 bp, Homo sapiens
gctttgaatgtgtcccagagattctggtatgttgtgtctttgttctcgttggtttcaaagaacatctttatttctgccttcatttcgttaggtacccagtagtcattcagaagcaggttgttcagtttccatgtagttgaatgcttttgagtgagtttcttaatcctgagttctagtttgattgcactgtggtctgagagactgttataatttctgttcttttacttttgttgaggagagctttacttccaagtatgtggtcaattttggaataggtatggtgtggtgctgaaaaaaatgtatattctattgatttggggtggagagttccgtagatgtctattacgtccgcttggtgcagagctgagttcaattcctgggtatccttgttaactttctgtctcgttgatctgtctaatgttgacagtggggtgttaaagtctcccattattactgcgtgggagtctaagtctctttgtaggtcactcaggacttgctttatgaatttgggtgctcctgtattaggtgcatatatatttaggatagttagctcttcttgttgaattgatccctttaccattatgtaatggccttctttgtctcttttgacctttgttggtttaaagtctgttttatcagagactaggattgcaacccctgcctttttttgttttccatttgcttggtagatcttcctccatccttttattttgagcctatgtgtgtctctgcatgtgagatgggtttcctgaatacagcacactgatgggtcttgactctttatccaatttgccagtctgtgtcttttaattggagcatttagtccatttacatttaaagttaatattgttatgtgtgaatctgatcctgtcattatgatgttagctggttattttgctcgttagttgatgcagtttcttcctagcctcgatggtctttacaatttggcatgattttgcagtggctggtaccagttgttcctttccatgtttagtgcttccttcaggagctcttttagggcaggtctggtggtgacaaaatctctcagcatttgcttgtctgtaaaggattttatttctccttcacttatgaagcttagtttggctggatatgaaattctgggttgaaaattcttttctttaagaatgttgaatattggtccccactcccttgtggcttgtagagtttctgccgagagatccgctattagtctgatgggcttccctttgtgggtaacccgacctttctctctggctgcccttaacattttttccttcatttcaacattggtgaatctgacaattatgtgtcttggagttgctcttcttgaggagtatctttatggcgttccctgtatttcctgaatctgaatgttggcctgccttgctagattggggaacttctcctggataatatcctacagagtgtttttcaacttggttccattctccccgtcactttcaggtacaccattcagacatagatttggtcttttcacatagtcccatatttcttggaggctttgttcatttctttttattcttttttctct

SEQ ID NO: 11221 - DNA, 914 bp, Homo sapiens
agtccccagagtgtgatattccccctcctgtgaccatgtgatctcattgttcagttcccacctatgagtgagaatatgcagtgtttggttttttgttcttgcgatagtttactgagaatgatgatttccaatttcattcatgtccctacagaggacatgaacgcatcattttttatggctgcatagtattccatggtgtatatgtgccacattttcttaatccagtctgtcattgttggacatttgggttggttccaagtctttgctattgtgaataatgccgcaataaacatacgtgtgcatgtgtctttatagcagcatgatttatagtcctttgggtatatacccagtaatgggatggctgggtcaaatggtatttctagttctagatccctgaggaatcgccacactgacttccacaatggttgaactagtttacagtcccaccaacagtgtaaaagcgttcctatttctccacatcctctccagcacctgttgtttcctgactttttaatgattgccattctaactggtgtgagatggtatctcattgtggttttgatttgcatttctctgatggccagtgatgatgagcattttttcatgtgttttttggctgcataaatatcttcttttgagaagtgtctgttcatgtccttcgcccactttttgatggggttgtttgtttttttcttgtaaatttgtttgagttcattgtagattctggatattagccctttgtcagatgagtaggttgtgaaaattttctcccattctgtaggttgcctgttcactctgatgatagtttcttttgctgtgcagaagctctttagtttaattagatcccatttgtcaattttgtcttttgttgccattgcttttggtgttttggacatgaagtccttgcccatgcc

SEQ ID NO: 11222 - DNA, 5633 bp, Homo sapiens
gtgtatgtacagaagggctaccaggaagtgtcaaccatgttagattttctgtagtcttccagaaacagtgcagcccatacaacaggaatcttaattttcctcacagcaaatataacaggatggaacagttagtgttttgttttcacaagtgtccaccactccatctgccctgcatggagagggctctctcactgctagatctaggctgagccatctggaaggatcaaagggtgtgggagtatcaccccctctcaggctgcagaaggtctcgagggtggcgtcacagcaggatttccgccttctgcattgcactgcacagccccatggaacatgaggcacttgaggccttgcttcttggagcctctggggagcagagtaggtcactgccctctgggagtgttttgcagtagttttgtaaatgtgttgctacatagtcaagttcctttgtggcaaagaaatattttgttttgatattaggagccagcccatgtaatgcctctcaggcttgcttgcttagaagaaaaaagtcaccctttgtggtttttaagaaaaaaattctgtgcagatctgttcctcctcctgctccttcccttttctctacatacagtgctcattggaggctcctgctaaaccttcttaaccagagaaataataggtatttgttagacctgagtgtacatttcacatgttatccttcacatatttctcattttcatctagtactttcttaatgcctttgttggagtccgcatcctcatctttaaaaaaaaaaaaaaaaaaacagcttagcctaagccacattcactttttttagttcacaaaaaggatttaatagccacaatgtgatttttgccacaactgtgtgattttaatattctctaatatcaagggcggatttagaattgcaggaaatacctggagaaatcacagtggaatgaatttttgctttaagagaaatgagagttggctgtctctgtaattgataatacagcttcatcctagtcccatctgcatttcagaaaataaccctcatctttacaaaacacaggacacttgtgggacagttaactcaagcagctatggggagggaggagattattgaatggtgattaaataatgcaaatggctcttctgtttcttaaagactgtggaagaggtcagactgcccagttgaggtgggcagttcatactgctcagttgaggtggcagtcatttattctgagtcctgttggatagagcctatctcctcaaggctacagaggcttccaggatatggagctgtgcatgttaatggctcagccttgcctccatcagggcacctgcctaacttggagcaagtgggagagcaccctagagtcatcctctgtgctgtttcgtgagttttgcagcggagacttcaccatccggaggagctgtgtttctgtgtcacttgggatatcacctaaaaatgaaacatttgatattttaaggtataaaaaaaaagtaaattggggaacattggctgcagtccctaaaagatactgttgtctgtgcatcaggttagcttgaggtcaccacaggtcctgggagcccagagagtttaggcatactctcctttggaggccagcagcctttcacaaaccctgcctctaaaagggcggtttcacatttgaccatgtttttgcattagcctcagaaactcttgtctttagctgataacctttgagggatgtgagaagcctagttggagcatctgagaaaatgatacctctcaccttcaaattaatcaaatagtttgtccttctagtccccttataaattaataaatggagggctggtcatggtggctcacgcctgtaatcccagcactttgggaggccgaggcgggtggatcacaaggtcaggagttcaagaccagcctgaccaatatggtgaaaccccatctctactaaaaatacaaaaattagccaggtgtagtggcacgctcctgtagtcccagctactcgggaggctgaggcaggagaatcgcttgaacccaggaggtggatgttgcagtgagccgagatcccgccactgcactgcagcctaggcgacagagcaagactccgtctcaaaaaaaaaaaaaaaaaaagaaaagggaagggaatcccattttgtgatgatttgggcacactacttgagctgaggctagcagtcacatgattttggctgtctctgacctgaagcttttgaagtaaggttatgtctcttccctgaagctttgtttatagggggaatctggagagtctgagctttgagcttgtcttagaaaataagactgtccacctggggaggggagcttatagggaaccccgtgttaactcagaatgctgaagaaagtgcttttagccaacaaaagaagattactatgtagaaggtggaaagaagtcattgcttctggttcctccagcagtcagttgactctaggtttcctttggtttatatccccagttcttaatactaaaacttatttgacttcctatcaggaagcacacaaaaaaagcgtcatttaaaaccctggatataggctttaaaggatacaaaaacagcagcattgtcgttttgccaggttcatcaccattttgatgtgctacccatccttccaccctccctttcctgcccccaagcctcccagccaggccagatgtgaagattctattaatcactgtttcagagaacattaattcttgtatagaataattatctactaaattgcttattatctgtgactaccttgcagagaacatctcaacagtgcagtaaaatagctctcctagacttgagcttccagccaggcatttagatcactcttaagcctttgtggaattctgaggaaaaaaagcaagatgcctcaatgccaatgctgggccataagattctactcccctccctgtagggtggggcgcgtggctcagctttggaaaatcattttgccagtaatattgcctgtgaatccctttaagaagtcgtcctgatctgagcctgtctttctgagcactttggtgctgaattgaaaatggtaagctaaagcagtgacagatccacgtagcctctttaacctctttattatcttgccaaaaaaaaagtttctcaggttaaacctttgtctttaacctccctttgttgtggagaaaatgtgtcactaatcagtggtccaagggatatctagctttggttactcagttcctgcagcataacagatatgacttatgccagggaaggtagaggctgattatggagacacccaggaacaggaataagaagggataggtctgctccacgtagaacctccccagatcggaagttaagtcttggagagtttccaaagtgctgaagtaaaaaggagacttggagggcctttgcttaatgagcaagaggcttgtgtcctcccaagaacatgagggagttcagaagggagctatagctcacagacagaaacctgcccgctcaccccatccctcgtgactgggagcatgtttgctcagaattttctaagaggactctcccttcaaaaatccaatttgctcccagaatgttgtttagcctctgagaatctcactctttcatttccatctgtgaatggacatagatgtgttgctcagggatcagaaacatcagagtccagggcccagtggcatggtgttgcattagtagttagaaaagtaattggtcagctctactgtaaaagaaataagtatgtagtacagttttgtaaatgtcaggtctgttctattgttttgtgatctgaagactgtcaaactggttgataatcaaagaaaaggttggttagaataagtaaaatttcagttagaaagatatagcttaccagttttccatgtgcttaaggaagtcaagaatatttcaggttgttgagaactgttgtaaaatggaattgaagctagtgtctctcaccttcttaggtgtatcatagagaggaagtggaaggccagtagtagcatcttcatacttacttttgccagcccagcctccatttcaaagactttgtcttccatcctatccaatgacatggtcagggatgggctctgaggaggcagtgaggccccaccttggtttgctccactgtggtgtgtagtctccaaacagcttaagggtttttaagttttctcacgattacctccactccactcatctactatcagcatcagaaaggttaacatccctgggaccattctacttataaaagagatgaactagtgtgctttctccccttttccaggtgtgccatccatatacaatctcctcttggccaagttcaacaaatgtttccagggaaccccgtgggttgaggcaaagtagccaagatgtattgagttaagtttttctagaggacaaaagtatttcttgtcccttttccctcatgctcatatgttttagctgaggcgtaaatggccaagttgagtaatatctgtggaactgagacagagagccagggacccatgtacccagggaccagtcccctggggaatcacacagtggctcagactagactgctctatcccaccagaactctgctgctgttcatttccatcaggaccacccaggaaagcaaataagttagccttctcatcattaggtcacctaatctcttgggttgcaggatgagagcatatatagatctcctgtttagagagtgtgttcataattgtagaaagggatagaaaatggaataaccaagaggctgtgtcattttttaagaggatggcaagtatgacctctaatgagctcaacaaaactgggaatccaaggaatggtgcttgtagggaaagagaggtcagttgtggtccttaaacctcttggcaccttgtgcgggttataaaacaaggagctggagtaaaattgcccttacccccaatccaaatgctgtccaggatttaggagctacccaacctgtggttatatggtgttggtttccattttttgtttgtttgcttgtttccaaaatagccttgcttggtactgcatggaaagttcaagcttttcttcttgcccgctcagggctggcctcttccccgtgtcttcacagcgtccctaaggaagatttttgcagcactctctggagctgaggggagtgaaatttggtccagagaaggcggaaggaaatagttttcctgtttccttttctcgaggtggatgtcctcaggcttccttcacacctccttctcatgggtgcggctggcagtacagtcaggctgtggaggagggctgagaagaaaggggcactggtccagccccaggtttggtctgagacaggtacacagcagataccatcccaccttcctctctaaagaacaggccagccacacatataaccctttccctactttactaatgtatcccttatgtggtaccagcaatggaggacaggcagacttaccccctgccatctagagagaatgttgttattacccgtaaaacttgaccacccccatatcccactcctttttgtaaaaacaaatgcttaaacctgtgagcctgccgttcctttctatgtgttaatcagtttccttccatttgagctgtgtgggagggaagggcattgaaattgtaggttgtaatcttgtgccaaccaataaaaaccagtatttcacacacat

SEQ ID NO: 11223 - DNA, 13862 bp, Homo sapiens; identical to SEQ ID NO: 7496

SEQ ID NO: 11224 - DNA, 3502 bp, Homo sapiens
ttgtaatgatttgggcacactactggagctgaggctagcagtcacatgatttggctgtctctgacctgaagcttttgaagtaggttaatgtctcttccctgaagctttgtttatagtggtaatttggtgagtttgagctttgagcttgtcttagaaaataagactgtccacctggggaggggagcttatagggaacccgtgttaactcagaatgctgaagaaagtgcttttagccaacaaaagtaagattactatctagaaggtggaaagaagtcattgcttctgttcctccagcagtcagttgactctaggtttcctttggtttatatccccagttcttaatactaaaacttatttgacttcctatcaggaagcacacaaaaaaagcgtcatttaaaaccctggatataggctttaaaggatacaaaaacagcagcattgtcgttttgccaggttcatcaccattttgatgtgctacccatccttccaccctccctttcctgcccccaagcctcccagccaggccagatgtgaagattctattaatcactgtttcagagaacattaattcttgtatagaataattatctactaaattgcttattatctgtgactaccttgcagagaacatctcaacagtgcagtaaaatagctctcctagacttgagcttccagccaggcatttagatcactcttaagcctttgtggaattctgaggaaaaaaagcaagatgcctcaatgccaatgctgggccataagattctactcccctccctgtagggtggggcgcgtggctcagctttggaaaatcattttgccagtaatattgcctgtgaatccctttaagaagtcgtcctgatctgagcctgtctttctgagcactttggtgctgaattgaaaatggtaagctaaagcagtgacagatccacgtagcctctttaacctctttattatcttgccaaaaaaaaagtttctcaggttaaacctttgtctttaacctccctttgttgtggagaaaatgtgtcactaatcagtggtccaagggatatctagctttggttactcagttcctgcagcataacagatatgacttatgccagggaaggtagaggctgattatggagacacccaggaacaggaataagaagggataggtctgctccacgtagaacctccccagatcggaagttaagtcttggagagtttccaaagtgctgaagtaaaaaggagacttggagggcctttgcttaatgagcaagaggcttgtgtcctcccaagaacatgagggagttcagaagggagctatagctcacagacagaaacctgcccgctcaccccatccctcgtgactgggagcatgtttgctcagaattttctaagaggactctcccttcaaaaatccaatttgctcccagaatgttgtttagcctctgagaatctcactctttcatttccatctgtgaatggacatagatgtgttgctcagggatcagaaacatcagagtccagggcccagtggcatggtgttgcattagtagttagaaaagtaattggtcagctctactgtaaaagaaataagtatgtagtacagttttgtaaatgtcaggtctgttctattgttttgtgatctgaagactgtcaaactggttgataatcaaagaaaaggttggtggttagaataagtaaaatttcagttagaaagatatagcttaccagttttccatgtgcttaaggaagtcaagaatatttcaggttgttgagaactgttgtaaaatggaattgaagctagtgtctctcaccttcttaggtgtatcagagagaggaagtggaaggccagtagtagcatcttcatacttacttttgccagcccagcctccatttcaaagactttgtcttccatcctatccaatgacatggtcagggatgggctctgaggaggcagtgaggccccaccttggtttgctccactgtggtgtgtagtctccaaacagcttaagggtttttaagttttctcacgattacctccactccactcatctactatcagcatcagaaaggttaacatccctgggaccattctacttataaaagagatgaactagtgtgctttctccccttttccaggtgtgccatccatatacaatctcctcttggccaagttcaacaaatgtttccagggaaccccgtgggttgaggcaaagtagccaagatgtattgagttaagtttttctagaggacaaaagtatttcttgtcccttttccctcatgctcatatgttttagctgaggcgtaaatggccaagttgagtaatatctgtggaactgagacagagagccagggacccatgtacccagggaccagtcccctggggaatcacacagtggctcagactagactgctctatcccaccagaactctgctgctgttcatttccatcaggaccacccaggaaagcaaataagttagccttctcatcattaggtcacctaatctcttgggttgcaggatgagagcatatatagatctcctgtttagagagtgtgttcataattgtagaaagggatagaaaatggaataaccaagaggctgtgtcattttttaagaggatggcaaggatgacctcaaatgagctcaacaaaactgggaatccaaggaatggtgcttgtagggaaagagaggtcagttgtggtccttaaacctcttggcaccttgtgcgggttataaaacaaggagctggagtaaaattgcccttacccccaatccaaatgctgtccaggatttaggagctacccaacctgtggttatatggtgttggtttccattttttgtttgtttgcttgtttccaaaatagccttgcttggtactgcatggaaagttcaagcttttcttcttgcccgctcagggctggcctcttccccgtgtcttcacagcgtccctaaggaagatttttgcagcactctctggagctgaggggagtgaaatttggtccagagaaggcggaaggaaatagttttcctgtttccttttctcgaggtggatgtcctcaggcttccttcacacctccttctcatgggtgcggctggcagtacagtcaggctgtggaggagggctgagaagaaaggggcactggtccagccccaggtttggtctgagacaggtacacagcagataccatcccaccttcctctctaaagaacaggccagccacacatataaccctttccctactttactaatgtatcccttatgtggtaccagcaatggaggacaggcagacttaccccctgccatctagagagaatgttgttattacccgtaaaacttgaccacccccatatcccactcctttttgtaaaaacaaatgcttaaacctgtgagcctgccgttcctttctatgtgttaatcagtttccttccatttgagctgtgtgggagggaagggcattgaaattgtaggttgtaatcttgtgccaaccaataaaaaccagtatttcacacacat

SEQ ID NO: 11225 - DNA, 3544 bp, Homo sapiens
tatatgaagactcttttctttgcataaaaagcattaggcgtataaatgtataaatatattttattatgtacagtacaaaaatggaaccttatgcatgggccttaggaatacaggctagtatttcagcacagacttccctgcttgagttcttgctgatgcttgcaccgtgacagtgggcaccaacacagacgtgccacccaaccccctgcacacaccaccggccaccaggggcccccttgtgcgccttggctttataactcctctgggggtgatattggtggtgatcacagctcctagcataatgagagttccatttggtattgtcacacgtctcctgcctcgcttgggttgccatgtttgagcgatggccctgttgatttcaccctgccttttactgaatctgtaaattgttgtgcaattgtggttatagtagactgtagcacattgccttttctaaactgctacatgtttataatcttcatttttaaagtatgtataattttttaaagtatgtattctattcatatggtctgcttgtcagtgagccagacttgcttactatattcctttataataatgctagccacttcctggattctttagtaatgtgctgtatgcaagaactttccagtagcagtgaaggagggttgcctctccaagcttcctaagggatgctgccctgggtggggatgcattgcagaggcagtagtagcatgggggctagagtggggagcgagatggaaaagggtggggggataggagaattctagagtgcttccagcatgagggtcctgagaacttctgtcctgagttcagagaaacatgcaaagtaactaacaaaatcgctacttgcctttgcagttttacagacccagggagctgctttgggagtgagaaaggcaaccctccaatgtgtttcaactttaaaatgttgaattcttttcagacatgtggtatctcatttattctccttttctagcgtttgttgaatttcaggcagaatgtcttacagaatgtcctagaaccagattatcatttaatccgaaacagctgaggaagggacagagaaggtacaagggcaaggcagcataaaacagatcaggagaatgaagagggaatgctttggttttttgttctgttttgttttttctttttcaagtaactaaaacagcatctacatgtagagtgtcgtggagagctgagaccagggtaaagtcaagtgcagcatcagtactgcgagacccaccagcccctggagagggtcagctgagaatctggtagtgaagcctgtgtagggtcccggcaccctcaccctcagccacctgcagagaggccagggccccagagactagcccggttctgaagtgggcaggggtgctgccagagccttccgccccttatattgagaccctgctttcaggacaggccagccgttggccaccatgtcacattctgagtgagtgtcacgggtccctaacaataattttctgatctggagcatatcagcagaatgcttagcctcaaggggcctggcagctgtaatgtttgatttatgatgagaactatccgaggccacacttggcctctaaataagctgctctagggagccgcctactttttggtgagaaattagaagagtacctaatgttgaaaacatgacatgcgctcttgggatctgctgttctctccagggctccagaacctgatacctgttaccaaagctaggaaagagctttatcacaagccttcactgtcctggcatgagaactggctgccaggctcagtgtaccccattaaatgtgaatgaatctgagcttggtttcctttattgcttcctctgcaatatgattgctgaaacacattttaaaaattcagaagtttgtcactcctgttaatgggaggatcattcacacatgtgtagtacaaggcggactttgtgtttgtttttggtgttaatttttagcattgtgtgtgttgcttccccaccctgaggagaggacaccatggcttactactcaggacaagtatgccccgctcagggtgtgatttcaggtggcttccaaacttatacgcagtttaaagatggtggggacagactttgcctctacctagtgaaccccacttaaagaataaggagcatttgaatctcttggaaaaggccatgaagaataaagcagtcaaaaagaagtcctccatgttggtgccaagggcttgcgaggggaaataaaaatgttatccagcctgaccaacatggagaaaccccgtctctattaaaaatacaaaattagcctggcatggtggtgcatgcctgtaatcccagctactctggaggctgaggcaggagaatcgcttgaacccaggaggcggaggtcgcagtgagccgagatcatgccagtgcactccagcctgggtaacaagagtgaaactccgtgtcaaaaaaaaaaaaaaaatgttactcatcctctctcaaagcaaaaaagaaaccctaacagctctgaactctggttttatttttcttgctgtatttgggtgaacattgtacgattaggtataatttaaaaaaaaaaattttttttttggtagaaatgcaatcaccagtaaagaggtacgaaaaagctagcctctctcagagactggggaggcagagtactactagaggaagtgaagttctgatggaatcatgcctgtcaaatgaggtcttgaagcggatgcccaaataaaagagtatattatattttatctaaatcttaagtgggtaacattttatgcagtttaaatgaatggaatattttcctcttctttagttgtatctgtttgtatttttctttgatgaatgattggtcatgaggcctcttgccacactccagaaatacgtgtgcggctgcttttaagaactatgtgtctggtcacttatttctctaaaattatctcattgcctggcaatcagtcttctcttgtatacttgtcctagcacattatgtacatgggaaatgtaaacaaatgtgaaggaggaccagaaaaattagttaatatttaaaaaactgtattgtgcattttggcttcacatgtttaactttttttaagaaaaaagttgcatgaatggaaaaaaaatctgtatacagtatctgtaaaaactgtcttatctgtttcaattccttgctcatatcccatataatctagaactaaatatggtgcgtggccatatttaaacacctgagagtcaagcagttcagactttgatttgaagcacctcatccttctttcaatgcgaacactatcatatggcattcttactgaggattttgtctaaccatatgttgccatgaattaactctgccgcctttcttaaggatcaaaaccagtttgatttgggaatcttcccctttccaaatgaaatagagatgcagtacttactttccttggtgtttgtagatattgccttgtgtattccacttaaaaccgtaatctagtttgtaaaagagatggtgacgcatgtaaataaagcatcagtgacactctaaaaaaaaaaaaaaaaaaaaaagaa

SEQ ID NO: 11226 - DNA, 397 bp, Homo sapiens
ccttgatacaacaggttcactttgttcatttttgagaaactgtctgccagatacccaagttagataacatagtttgccattcagtcatcctttcaggtaaaatggtggtctgtgaaacaagtggctggttcagctcacaactcaaatgattgcatggtatatttcctcaagacgaccattgttctttggtataaacagaattgctttgcgaatatttcctatttcattaaccctgaatattaaaaaggcacttcaaggattaaaattcaatgaaattaatgtttatgcttccttagacatttttaaataaaactggcttttttttttttaaaccaagagtacatgatggggaagaatacaaggactactagtaagtttagtatcattgtgttgattt

SEQ ID NO: 11227 - DNA, 319 bp, Homo sapiens; identical to SEQ ID NO: 5402

SEQ ID NO: 11228 - DNA, 109 bp, Homo sapiens; identical to SEQ ID NO: 5415

SEQ ID NO: 11229 - DNA, 184 bp, Homo sapiens; identical to SEQ ID NO: 5421

SEQ ID NO: 11230 - DNA, 147 bp, Homo sapiens; identical to SEQ ID NO: 5241

SEQ ID NO: 11231 - DNA, 170 bp, Homo sapiens; identical to SEQ ID NO: 5447

SEQ ID NO: 11232 - DNA, 98 bp, Homo sapiens; identical to SEQ ID NO: 5449

SEQ ID NO: 11233 - DNA, 4344 bp, Homo sapiens
tgggtatgaagtggttgggagaatccaagaacatggtggtgaatggcaggagaaatggaggcaagttgtctaatgaccatcagcagaatcaatcaaaattacagcacacggggaaggacaccctgaaggctggcaaaaatgcagtcgagaggaggtcgaacagatgtatgtacacacttaaaccttcaatgttctgattgtgatatggggtagtaattctttccagtttgtaatgtgtattctgttttcttttgtcttaaataattttttgcattttcataattaacaatatagtctttttactctcaaagttgtgtcaatttttattctcatcaaactatataaaactcaagtttaatgcttcatataattattttaatcatgcttttctgtctgttactttatattttgtagaatttacctgaatggttgatatgtcttactaaatttttaaaattttaattgaacttcttacaggttaacctgtatttttttaatagatgtaagtataggtatgtacttctttgctaatttccacaaatgtttcatggaataatatgaataatgacgccaactgtaatttacataagtagaatgaggatagatagaactgactgctttagggcagcctcacaaatcatagcaatttattctatttatacagggtagacagttgttcatcctgacagtgaaacactgctgataagttactttatttcctctatacctcttgataggaaagaggctgctttttgagagttcaggaagttgtagatttggtgcgtatttcatagttcctctaaaagtagtaaaatgactgaggacaagtgtatacctaactaggcagctatatgtccaaacgtatgtcatgttaaagaggacagcttttcttctttttctaacgtgaatctagccacctttgaatatccttaattcagattggcattggcctgtttccagggatttggattagcctgggattttctgtagtttcagattgtacaagttctgatagatttccttcttaccttttagggtttatgcgattcattgggcccaggctacccttaacctttccatttcagatcaggtcactgttgctatagaaaaccagacagaattcctgcttgggacaagagtaggaagaggcaagactgaatgagtggtcctctgcatggacaccactcactcctgaggctgctggcagcatgtaccctcatcctgcctcactccttagcagctagtgtgaacgtgaagaattgagaaatatagtgatcacatcagtgtgtattcattctggtcagcaaactaggcatatcttaagttttttaggaaatcactgttggcctccttttgtgtatcatagtgcaaaacagttttaattagttgaattattatagatacacaagaatttagaaaatgcgtctgggcgtggtagctcacacctgtagtcccggcactttgggagtccaaggcgaatggatctgcttaagtccaggagtttgagaccagcctgggcaacatggtgaaaccctgtgtctacaaaaactaccgtgtctacaaaaaaattagccaatcatggtgttgcatgtctatggttccaactactttgagaggctgtggttggaaagatcacttgagcccaggagttagaggttgcagtgagccgagatcacaccactgcactccagcatgggccaaaaaaaaatgagactcttgtttaaagaaaaaaaaaaagagtttagaaatggccattacgggccgggcgtggtggctcacgcctgtaatcccagcactttgggaggctgaggtgggtggatcatgaggtcaggagatcgagaccatcctggctaatacggtcaaaccccgcctctactaaaaatacaaaaaatcagctgggcgtggtggcaggtgcctgtagtcccaactactcgtgaggctgaggcgggagaatggtgtgaacccgggaggcagagcttgcagtgagccgagattgcgtcactgcactccagcctgggcgacagagcgagactccatctcaaaaaaaaaaaaaaagaaaaaggaaaatggccattactttggttacactttaccaagcatagataaatatagagggctaggttgggaaaacccagtgtgtgaagatgacatagccttacattgaatgttattgggccagaatggtgcagaaagagagccagcaatgagaaatgggagagcacagagcagtgccccatctcagatacaatcagtgactttcccagcagcagagccttaagatacaggaaagaaaaactgacaaaattgaagggaaaaatcaacaattcagcaataatttggagactttgatacgccacttttaataatggatagaacagcttaagactataaaccaatgaggcctaacagacatctatagaacctcatcagaatacgcattcatctcaagtgcaagtgcagcattccaggatagaacatatgctagaccgtataacaagcttccataaacttcaaaggattgaaatcataaaaggtatgttctgtgaccccaatggaggaaaattagaaattaacaaggaaatttgggaatttcacaaatacatagaaatgaaataacacacttctaaataatcagtgggtcaaagaagaaatcaaaaaggaaatcagaaaacattttgaagtgaattaaaagaaagataaaacatactaaaacttacaggatgcagccaaagcggtggtttagagggaaatttatacttgtaaatgcctgcgtgaaaaaaagaagactgggcgtggtggctcacgcctgtaatcccagcagtttgggaggctgaggcaggaggatggcttgagctcaggagttcaagaccagcctggacaatatggcgagaccccacttttacaaaaaaatacaaaaattaaccaggtttgatgatgcatgcctgtggtcccagctactagggaggctgaggcaggatgattccttgagcccaggaattcgaggctgcggtgagctgtgatcatgccactgcactccaggctgggtggcaaagcaagaccctgtcttcaaaaaaaaaaaaagtgagttgtgtcgtatgtgaattgtatttcaataaagctattatgctgttaccaaaaatttaacaatgttgatagcttttcacatacctacatgcaactaatttgattgcaaaatcatatgtctacccttggcaggaacttacatttaagtatttgttctgtgaaagagtggatgaaaaggttaaactttactctgtgtttcattcttccccattttggttttgagagcctgaaagttacattgctgttgtcctccataaatgatgtgctgattccatggaaggactgtcagtggcatatacatcaaacttaatcagctctgatgaaacttcttacaaacttggccttcatttccttctttacattgcttttcttccacagttaaacccagttatttcagttatatatttcagtctgtatttttatccattcgttcataattgcttcaaacagaggtcagtagaaataggtctgtcattctctctccacttctttccccacttctactgcccagctctggaattgtgggcaagtttctttttgtctgggcctcagttgcctgcaaagtggggataataatcattcacctgccctaaagcaggaagctgaacttcatgagattccttttgatacttgagatctggagttctggcgcttcttgcagaaactatcttgtgttcctctttccttttcagtcgagtcctatctgtaatggccctgtgtattgtcttgttaaaatagtgaacatgctcccgtcccgtttctcagtgttccttggagagaagggggtgggggagagtcaagcatttgaaccaaattctcacgactacccagaccccattcttgggaacctgctattactacctgctaacgataatactctcagtaatggagatagtttactgcatttggttttctgtcttatgcaaaggttattaaattcttaattactaaaatgattgatttttcagttctttattaccagcttgaatgggcaatgccgctaaagattttaaggcagatttaagtagttttcaatttgagtaatttttcttgcttttgcttttcacaggtaatggtaactcgggatttgaaggacagagtcgctatgtaccatcctctggaatgtccgccaaggaactctgtgaaaatgatgacctagcaaccagtttggttcttgatccctatttaggttttcaaacacacaaaatgaatactaggtaattttcagtctttatcctgaatggaacagatgattatgtt

SEQ ID NO: 11234 - DNA, 125 bp, Homo sapiens; identical to SEQ ID NO: 5454

SEQ ID NO: 11235 - DNA, 108 bp, Homo sapiens; identical to SEQ ID NO: 9293

SEQ ID NO: 11236 - DNA, 175 bp, Homo sapiens; identical to SEQ ID NO: 5462

SEQ ID NO: 11237 - DNA, 101 bp, Homo sapiens; identical to SEQ ID NO: 6749

SEQ ID NO: 11238 - DNA, 162 bp, Homo sapiens; identical to SEQ ID NO: 5244

SEQ ID NO: 11239 - DNA, 129 bp, Homo sapiens; identical to SEQ ID NO: 5494

SEQ ID NO: 11240 - DNA, 193 bp, Homo sapiens; identical to SEQ ID NO: 5245

SEQ ID NO: 11241 - DNA, 140 bp, Homo sapiens; identical to SEQ ID NO: 5978

SEQ ID NO: 11242 - DNA, 187 bp, Homo sapiens; identical to SEQ ID NO: 5506

SEQ ID NO: 11243 - DNA, 114 bp, Homo sapiens; identical to SEQ ID NO: 5508

SEQ ID NO: 11244 - DNA, 153 bp, Homo sapiens; identical to SEQ ID NO: 5246

SEQ ID NO: 11245 - DNA, 202 bp, Homo sapiens; identical to SEQ ID NO: 5516

SEQ ID NO: 11246 - DNA, 16284 bp, Homo sapiens
tgggtatgaagtggttgggagaatccaagaacatggtggtgaatggcaggagaaatggaggcaagttgtctaatgaccatcagcagaatcaatcaaaattacagcacacggggaaggacaccctgaaggctggcaaaaatgcagtcgagaggaggtcgaacagatgtatgtacacacttaaaccttcaatgttctgattgtgatatggggtagtaattctttccagtttgtaatgtgtattctgttttcttttgtcttaaataattttttgcattttcataattaacaatatagtctttttactctcaaagttgtgtcaatttttattctcatcaaactatataaaactcaagtttaatgcttcatataattattttaatcatgcttttctgtctgttactttatattttgtagaatttacctgaatggttgatatgtcttactaaatttttaaaattttaattgaacttcttacaggttaacctgtatttttttaatagatgtaagtataggtatgtacttctttgctaatttccacaaatgtttcatggaataatatgaataatgacgccaactgtaatttacataagtagaatgaggatagatagaactgactgctttagggcagcctcacaaatcatagcaatttattctatttatacagggtagacagttgttcatcctgacagtgaaacactgctgataagttactttatttcctctatacctcttgataggaaagaggctgctttttgagagttcaggaagttgtagatttggtgcgtatttcatagttcctctaaaagtagtaaaatgactgaggacaagtgtatacctaactaggcagctatatgtccaaacgtatgtcatgttaaagaggacagcttttcttctttttctaacgtgaatctagccacctttgaatatccttaattcagattggcattggcctgtttccagggatttggattagcctgggattttctgtagtttcagattgtacaagttctgatagatttccttcttaccttttagggtttatgcgattcattgggcccaggctacccttaacctttccatttcagatcaggtcactgttgctatagaaaaccagacagaattcctgcttgggacaagagtaggaagaggcaagactgaatgagtggtcctctgcatggacaccactcactcctgaggctgctggcagcatgtaccctcatcctgcctcactccttagcagctagtgtgaacgtgaagaattgagaaatatagtgatcacatcagtgtgtattcattctggtcagcaaactaggcatatcttaagttttttaggaaatcactgttggcctccttttgtgtatcatagtgcaaaacagttttaattagttgaattattatagatacacaagaatttagaaaatgcgtctgggcgtggtagctcacacctgtagtcccggcactttgggagtccaaggcgaatggatctgcttaagtccaggagtttgagaccagcctgggcaacatggtgaaaccctgtgtctacaaaaactaccgtgtctacaaaaaaattagccaatcatggtgttgcatgtctatggttccaactactttgagaggctgtggttggaaagatcacttgagcccaggagttagaggttgcagtgagccgagatcacaccactgcactccagcatgggcaaaaaaaaatgagactcttgtttaaagaaaaaaaaaaagagtttagaaatggccattacgggccgggcgtggtggctcacgcctgtaatcccagcactttgggaggctgaggtgggtggatcatgaggtcaggagatcgagaccatcctggctaatacggtcaaaccccgcctctactaaaaatacaaaaaatcagctgggcgtggtggcaggtgcctgtagtcccaactactcgtgaggctgaggcgggagaatggtgtgaacccgggaggcagagcttgcagtgagccgagattgcgtcactgcactccagcctgggcgacagagcgagactccatctcaaaaaaaaaaaaaaaagaaaaaggaaaatggccattactttggttacactttaccaagcatagataaatatagagggctaggttgggaaaacccagtgtgtgaagatgacatagccttacattgaatgttattgggccagaatggtgcagaaagagagccagcaatgagaaatgggagagcacagagcagtgccccatctcagatacaatcagtgactttcccagcagcagagccttaagatacaggaaagaaaaactgacaaaattgaagggaaaaatcaacaattcagcaataatttggagactttgatacgccacttttaataatggatagaacagcttaagactataaaccaatgaggcctaacagacatctatagaacctcatcagaatacgcattcatctcaagtgcaagtgcagcattccaggatagaacatatgctagaccgtataacaagcttccataaacttcaaaggattgaaatcataaaaggtatgttctgtgaccccaatggaggaaaattagaaattaacaaggaaatttgggaatttcacaaatacatagaaatgaaataacacacttctaaataatcagtgggtcaaagaagaaatcaaaaaggaaatcagaaaacattttgaagtgaattaaaagaaagataaaacatactaaaacttacaggatgcagccaaagcggtggtttagagggaaatttatacttgtaaatgcctgcgtgaaaaaaagaagactgggcgtggtggctcacgcctgtaatcccagcagtttgggaggctgaggcaggaggatggcttgagctcaggagttcaagaccagcctggacaatatggcgagaccccacttttacaaaaaaatacaaaaattaaccaggtttgatgatgcatgcctgtggtcccagctactagggaggctgaggcaggatgattccttgagcccaggaattcgaggctgcggtgagctgtgatcatgccactgcactccaggctgggtggcaaagcaagaccctgtcttcaaaaaaaaaaaaagtgagttgtgtcgtatgtgaattgtatttcaataaagctattatgctgttaccaaaaatttaacaatgttgatagcttttcacatacctacatgcaactaatttgattgcaaaatcatatgtctacccttggcaggaacttacatttaagtatttgttctgtgaaagagtggatgaaaaggttaaactttactctgtgtttcattcttccccattttggttttgagagcctgaaagttacattgctgttgtcctccataaatgatgtgctgattccatggaaggactgtcagtggcatatacatcaaacttaatcagctctgatgaaacttcttacaaacttggccttcatttccttctttacattgcttttcttccacagttaaacccagttatttcagttatatatttcagtctgtatttttatccattcgttcataattgcttcaaacagaggtcagtagaaataggtctgtcattctctctccacttctttccccacttctactgcccagctctggaattgtgggcaagtttctttttgtctgggcctcagttgcctgcaaagtggggataataatcattcacctgccctaaagcaggaagctgaacttcatgagattccttttgatacttgagatctggagttctggcgcttcttgcagaaactatcttgtgttcctctttccttttcagtcgagtcctatctgtaatggccctgtgtattgtcttgttaaaatagtgaacatgctcccgtcccgtttctcagtgttccttggagagaagggggtgggggagagtcaagcatttgaaccaaattctcacgactacccagaccccattcttgggaacctgctattactacctgctaacgataatactctcagtaatggagatagtttactgcatttggttttctgtcttatgcaaaggttattaaattcttaattactaaaatgattgatttttcagttctttattaccagcttgaatgggcaatgccgctaaagattttaaggcagatttaagtagttttcaatttgagtaatttttcttgcttttgcttttcacaggtaatggtaactcgggatttgaaggacagagtcgctatgtaccatcctctggaatgtccgccaaggaactctgtgaaaatgatgacctagcaaccagtttggttcttgatccctatttaggttttcaaacacacaaaatgaatactaggtaattttcagtctttatcctgaatggaacagatgattatgttgaattcaagaacatagatggctaattttacttttgctcaaaatttaaaatgacattaaaggaaagttctttgcagtggaagggttttctgtctgtgagccaagagaagcagagaaaagactccaggaatcttgtcagttctaactctgtgttcttattttacctcagaacatttctattaacgtataaagctggaggagcatcctcatgttctattttaaaagttgatgatgccaggcatggtggctcacgcctgtaatccccacactttgggaggccaaggtgggtggatcacctgaggtcaggagtttgagaccagcctgaccaacatggtgaaaccctgtctctactaaaagtacaaaaaaaattagccaggcaggtggcacatgcctgtaatcccagctacttgggaggctgaggcaggagaatcacttgaacccgggaggcggaggttgcagtgagccgagatcgtgccattgcactccagtctgggcaacaagagcgaaactccatctcaaaaaaaaaaaggtgatgacaattatcttagcgaaaagaaaaatctgacaagcatcctgtaacaccttgaaagtgtatgattatttccaacctaaagtagggtacatccctttttttcatgattttattatagacttttctcttacacgttgtctctgtatagatggggaattttgtcatcatgtttaatctttgggattcagctaattatttaagagcgaatagttttaaagacatgtttatattcagtatgcaggtaagaaagtggatgtgtaagtgttttgagtaccaaatgctgtatataaaaaacattattacattaatcttgaaatctgtcatcttttaacagctgaggtctctctttaattctcttaaataccatttctccctcaaaaaagaccattagatcatttcacaaatgtatctgccaccaaacaggtcagagctttgcaactttgctttgtctcttaacctctatggcaaagggttttttagcctggtggaaaagcataacagcagggatttagaagatagagctagttctggcccatcactttcatctccatcacacccggactggggttatatagttctgattttagtggcaaccctgggggaacttgatacccaggtaggtggtcactgatcagtagttgggagaggtaggaattggtgagtacaggtaattagaggaaagtcttgtgtcctgtttccccccttttaattttatcccttgctagaattaagatactatatgcctcacttatcaattacagtctaaatccaaaagaagtaattcaggtaaaaatatgcttttgtttttttcataaatttttttttcttttcttttttagatggagtctcactctgtcgcccagactggagtgcagtggcatgatctcagctcactgcaacctccaccttctgggttcaagtgattcttctgcctcagtttcccaagtagctgggattacaggcgtgcaccactgcacccagctaatttttgtatttttagtgtagatgaggtttcaccatgttgaccaggctggtcttgaaactcctgacctcaggtgatccacctgcctcagcctcccaaagtgctgggattatagacgtgagccaccatgtctgaccataaaattttctgtcatatatctttacctactaaaatgaagtgtgaaatattggaatggagttgggggattatttaaacagttccctgccaaatgactgccattggatgccctgattgattaagatccaggctgggcgcagtggctcatgcctgtaatctcagcactttgggaggccaagctgggtggatcaccagaggtcaggagttcgagaccagcctggccaacatgatgaaatcccatctctactaaaaatacaaaaattagctgggtgtggtggtgcacacctgtagtcctggctactcaggaggctgaggcaggagaatcacgtgaacccgggagacagaggttgcagtgaaccaagatcacatcactgcactccagcctgggtaacaaagtgagactgcctcaaaaaaaaaaaaaagatacaggactgggcatggtagctcatgcctgtaatcccagcactttgggaggccgaggtgggtggatcacctgagctcaggagttcgagaccagcctggccaacatgctgaaaccccgtctctactaaaaatacaaaaaattagctgggcctggccacatgcgcctgtagtcccagctactcggaaggctgaggcaggagaatccctcgaacctgggaggtggaagttgcagtgagctgggatcgcgccactgcactccagcctgggcaacagagcgtgactccggctaaaaacaaaaaactaatttgcattattttaagtccattttcttttcttttctttttttttgcccattgaacatgagaccagtgctcattctcctagaagatgctgataatatttgtcaccctgtagcacccccagtgtttttctttgttttttttttttttgagttaagaaatgtgaatgtgtgaatgaatcactctttgacacagtagtctagtggcattcagaatgtcaccacaaaggcccagaatcttgacctggggtcatcaagaaagttatattgattatgccttattaccaagatatggaagcatataaaacagcgttacatcagaattacaatgggccaggtgcggtggctcacgcctgtaatcccagcactttgggaggctgaggtgggcggatcacctgaggtcgggagttcaagaccagcctgaccaacatggaaaaccccgtctctactaaaaatacaaaatttagccaggcgtggtggcacatgcctgtactcccagctactcaggaggccgaggcaggagaatcgcttgaacctgggaggcagaggttgtggtgagccgagattgcgccactgcactccagcctgggcaacaagagcgaaactcagtctcaaaaaaaaaaaaaaaaaaattacaatgaaagttttagtggcttatgacagaacttcatgtactctaaaatccccgtgccgtattccagaaggctgcctgttactggcatcttcaatagtaaatactccagttttctgctgcagtggctcatgcctgtaatcccagcactttgggagggcaaggtgggaggatcactggagcccaggagctcgaggctgcaatgagctgtattcataccactgcactccagcctgggccacagagtgaaaccctatattaaaaaacaaaaggaagcactccagttttctgtaaaagtcctcctataccattgcttcttataattagtttacatgagagtcacctgggagtttgttgaaatgcaggctctgattcagtagctttggggtggggcctgagattgtgcctttctaacaagctcccagactacacttggaatagctaggtcctaaaacatctggcctctcagtttcattgtgacgtgctaagtggataaaaataccttactaggagtttcctagggctcacgtaaaactatgtagtcataaatgtaaacttcaggattaccacacaaatatttttggaactcaagacattaactgaggactcctaagttaaaatgcacccagtgcctaagatttttccccatagaattgaagcatctaaaattaaagctggttaaacttgcagaagaaatcattttttaagtattttttagtccaacatttaattatacagttcctaaaataacctgtggaagtacagacgattctgttgccctggttagagcagcctgggttcctagcaatgccagcacttcaggccggtgtgggagtgcaggggacggcctgcctacttcccaccagagtgttccgtttacgtgtgcttttacactcttgtgtacactgatatttgggaacagaaactttattaatgacctttacaataatcttggtgaaaggtatatgttttcaattaaccttagtgaatttacttgaaaataaaactatcccttctagctcttcatcttttgagcaagaatttaccagaatgtgactttagaaaataaggaaaactgataatgcttaattaaggtagtaaatagccaataaatacttcttaaattgttagtttatggacttctctctctttggggtgcaaaagaagtgaccagaagatgtactgctcttggattttaattttctaagctctctgcctgttccttgtatagtgcgctctttgttcatatgtttatgcacctgtaatttgtcactttttagtttctcttttttatactcttttcccttccttttacttctttcagtctaccaacaggaagaatgtttagaaacagtagatgtttagcccgggcgtgatggctcacgcctgtaattccagcactttgggaggccgaggcgggtggatcacgaggtcaggtgttcgacaccagcctgaccaacatggtgaaaccccgtctctactaaaaatacaaaaattagccaggcatggtggtgcgtgcccgtaatcccagctactcaagagtttgaggcaggcgaataacttgaacctgggaggcagaggttgcagtgagcctagatcacaccactgcactccagcctgggcaacagagtgagactctatctccaaaaaaaaaaaaaaaagaaaaaagaaagagtagatgtttaatgattggagaattttcaaaactggctatgttttgagtgcacaggttttaatcttaatatatccttacatttactaacaagcaagagttgtagcatgaatacttagaaatagtacgaacaaaatgctaatttcaatttattgggagaaatttgaacttaattgacttttgtcaattatgaaacctaaagttttctttttaacaagaaaaaaagagttgttgtttatacctctggtttttaaatggagtgggagcgggatattttaagaaagggatcgatgctttcagtaatgccccctttttgaggctgcatgaccctgagatgtcacagtatcctgaggcgcgaaggcgactcaggccagcagtgagctgagcaggagacagcatttaaacatcaggggagtcacttcagggcactgagtttctcttttcaacttttcttggttttctaatcagaatgtcagcctgtacagtccttactcatttttctactgttataaccatctaatttttatttcacttttatatgtatttgattattcatatccactattggatatgaatatgaatcactttaaatatcattttaaaattaagtgcttgactagaatccgtaaagaatgttttcaaagcttctaacttcatggtaaggtgtgttctatgggaagcagagaatttcagcagcatggcttctatcctgccgcgcccacctgtggtatcttaaagttcttgattatcacagagttttaaagatttttgcaacaacgaatattgtaagtctgtttagaaattacaagtacagattatacaaatagctttttatttttgttgtttgtttttgcatttatatagcgcctttccttcgaggagctcaaggcatttttcaaaatctgacagtttttctcacaacaaccctgtgaggtaggtagtgtgtgttaaaaacaatgagatactgactaacccattctagccttttaaaatgttcttttatgttaagtaatttgaagtgtcagcataaattagagttttagaacattttacaaaccttttaaagtagtttgataatagttgtattttttaaaaaaccacttgtacttcataacagggtgattttaagagaaacaaatcattcttcaaaagatcaggagtcactccatgtgattagctgagcactgattgcaggactcagccaggtatgtttttggttctcgtttattttcaggtcaagaaggactgaagagctgatctgcgactcctcactcagcgtctacaaactgtggatttgcagctaaactttcttcagagggggaaatgtgttcactatgttgcctcatggttttattttatatcttaaatatttgagcatttttctctcttcctctctccttccctgtctcccttttttctgttccccttcctgttccccacccctccagtcagctcttgattgtgcatgctaatgaagggcacagtagcacagctaatacagtctacaacttttcttcactgccacagtggggagacagaaaaaccaaatagcaagaaaacctgggaagtgagtctctggaaagagtggggaacaggtgtgtgggagtgtgaattcatatgtttttttcctgcccctttaataataatcaattgtaaatgacatttttatttttcttataccagccattgattggaagtgtaaaaagagaaaaaatagatatgtttggttgatttaaagtagcaaattttctattaagggagggaggacggggcatattggtttggaaatgccaaataactgtttttcttgcctcccttgtcacccacccccccacccaaatacgaaattttaaaattcacatttgcgtccatcccttccactgtattgtcagtatacaagctagagctgtctctggctgggcccagtgctgatgttcaatggcaaacgcaagtcaaatcctcttctaaccatgaaacaatgtgaggaaggctctcctgagccaggtgatataacaggaaccagaaaggccagggtaaatcccaggtcttccattcattaaccctaagtcattggcaatctactcagccttgttgggccttattttcctcatttgtggaacaaaagggctgttctaaattatctggcctttaagtgtcagagtaaaaggatagttttatgcagtttgtatgggagatttagagtgattatagttaaggagagagggtatttttctgttcaataataggaaaaaaaaaaatttccctaaggttttcagtgcatttgcaccagccctaataggtataacagtcttaacttttattttccacagtatttgttacaatgggatttgatttggactatcagccagctgacttttacatacttctgtaggattattgaaaacaactgtctcatctcctgcctgtctgcacccttaaccattttcttcccccttttccttactgtcatttcatgcccatagcagccaactgtgacagtaagttttaacaggtttgggacagcaacttatatttttagtgaaatagaggttcttgctattggtagcaagggatagtttcaggggttttatttatgtttgaggcaataaagtcaggaaagcagaaacagaagtcaacacagggaaggtaggcagaatactactaaatcaagagttgactattttgtgttggttttagcatgtaaattgtttggcattatgaataaaaagtaaacaaaaccaaggttacctgaaggcatttttagataggaatgaacttgtttcagaaagcatagaacacacataaagcctattaaaaatagccaagtttcattccaggtctataacttacttttgtataatgttcccattggtcactttcacattgaacgtgtaaagatagcttggccctttctgtcgtttgtagccctgtcatttaacggcatggataatttattgcatttgcttaaagtgaactattgcttttctgattgccacacaaagcacgggttatctgtttcccaccatttcatatttcatatttcatattgctcgacaggtcatgccttagctgagagctgctttgttgtcttatctgtccttcatgtgcaaataaccatgtagtgtaggattgcagcaagaatggtttccattggatttcttggagatggtatcttgacacaatcaattgtgatggctacaagtagttgagtatggatatttggatgctttcccaattctacagctctttattttcatggtggttctctgacaccatatgtcgacagactagtaagacgttctgaattgtttaaaggacttgcatttatctgtctgtaaaggcttgtataccaattgattgaaaatggaaaatagggccctgttcatttcttcagtattatctctaggatatgtttgaactttcagatggttcagctaatagttgtgagaattcaggattactgaattaaaaaaaaaatgactagagtgtgtagctagtaagttcctggtagtatcagtatgcattaatacacctgaagtcttccagtgatcctgtccagtaaacagtattatacctgttcaggacctcatgtctttcctcttcctgattctggtactttactttattattgctacctagctgaccctggtcaactctttgaatccagcttgattaagatcttctgcttagacttcccctcattcttccttccttttgattcttacctgcttataatgtgcttttcttaaacctttcccatgtacattttgcaccctagttataatttctatacttttaggtgctatagcaatgcagtttttagcatattaacatgcatttgcatattgatcacttgcttaactgtttgatgcatatatatgtcttttagtcccaattaaattttccattcaagaacagtggccatgtcttctcttgtatttttcaccatagcacttcatatgccactgtatacacaacacagcacctaataatccttgatgaaatactgtggcttgaaatcttactgaaatactatgaatacatatatgatagcttctctaggaaaaaaaattctgctgaatgcttcctttgctggagtttgtgctagatcttacctcaattttagcatattcaggtttatgaaatgtacaattttaaatgtcagagtaagacacataaagatttttttctcctgaaccactaatattttttcttaatgtattttatttgaatggcaatcggtgattccttttttctgttggacgttttgttttgtttttttgatacagagtcttgctctgtcaccaggctgaagtgcagtgacgcgatcttggctcactccaacttcaactctcgagttcaagcaattcccctgcctcagcctcctgagtacctaggactacaggcgtgtaccactacgtgggcctggctaattttttgcattttagagacggggtttcaccaggttggccaggatggtctcgatctcctgacctcgtgatccatccgcctcgacctcccaaagtgctgggattataggtgagagccaccataccgggccataatccggttagaattagctttatgaaaataaaataaaacttttttttaaaataaaaactttatttgggagaattagctttatgaaattgacatgaaaagaaaatttgaaattaagatgctagtaactttatagtacacgttttactgaaaacacagctttagaatgaggggttcacaaatttgtcttgcttgggccatgactgcatcatgcataaatacagacctaatgggataatattctgaagacatcagtgtggctgattctacaatggaagccttttcaattctacccctgcaggccaggcgcagtggctcacacctataatcccagcactttgggaggccaaggtgggcagaccacttgaggttaggagttcaagaccagcctggccaacatggtctctactaaaaatacaaaaattagctgggcatggtggcgcacgcctgtcatcccagctacatgggaggctgaggcaagagaatcacttgaacccgggaggcagaggttgcagtgagccaagatcacaccactgcactccagcctgggccacagagtgagactccatctcaaaaaaaaaaaaaaaaaacaactctaccccatcagttttcctacattaccagtatagcaatttcaccactagagttaacactgcttgtactcgttttgttctctgaatgcagtcatcaaagatgactttgacatgggtggttagaacatcaaggtgtgtttcgaagcctgttggaatacttagtttggggttttttctgactgtgtacataaagaatgtttttgtgtatggcatggttttgtttacatcatcatacttctgaaattcattgcctggcactcttccagcttgattttgcatgttttaaaaagattcttgtcattctaactctaaattaggtgtgctgtattctagagctttgattttgtgtctcccaaagttgacgactagtgtaagtctgaatcagacagcttttgtttgaatcgtctgctcacctcacagttaatgagataacagtgaaataaaaataattaaaataacagattgaaaaaagagaagttactgagataacagtgaaataaaaatattaaaataacagattgaaaaaagagaacttgcgtatccaggtgatcagtattacttgaatagtagtaatcaagactattgattgttgttctcttctcttagatctttgctctgataaccatggctgtttttagggtattagctctttctcaagatctgttaagatggatcagtggcgcaaggattgtggcagataacccattcattcttttgatttctttcagatttaggcctattaaaggaaggcaggaagaactaaaggaagtaattgaacgttttaagaaagatgaacacttggagaaagccttcaaatgtttgacttcaggcgaatgggcacggcactattttctcaacaagaataaaatgcaggagaaattattcaaagaacatgtaagtttattaagactgatgctgttaacctatttggataagaatagtgaagtaaattaaaaccctaaatgttagttaatactgaaattttaaatttatttttcataaaactaatcagtctgaagatcttgtaacacatacagtcatttggatgacagtccagagaaaaaactgggccaggctcagtggctcatgcttgtaatcccagcactttgtgggggctaagatgggagtattgcttgaggccaggacttcgagaccagcctgggcaacatagcaagactccatctctaaaaaaataagaataaaaaaattagctaggcatagtagtgtgtacctttgtagtttgtagttccggctactcaggaagcagagccagaagcattgcttgtgcccaagagttagaggctgctctgagctatgatcatgccactgcgctccagccctgggagacagagcaagaccctgtctctaaaaccaaaaaaggagagaaaactttgtcatatagaggtgaaattcattatgagccttaagggaaacaagccattaggtactcatacagagtgagtacccttaaccccaaaatttgaaatgctccaaaatctgaaactttttgaacaccgacctgacactcaaaggaaatgctcatgggaggattttgaattttttgtttagaggtgttcagctagttactgtaatgcaaatattgcaaaatgagaaaaattgtgacattcaaaactcttgagtaacaataaagtttgttacctaatgatcttactttttttgtttattttattgtttttttagaggcagaatcttgctctgtcacccaggctggagtgcagtggcctgattatggctcactgcagcttccatctcttgggctcaagtgattcttcctctcagcctcccacgtagctggcactaaaggtacatgccatcatgcttggctaatgtttttcgtagagacagggtctcgctatgttgctcaggctagatcttacatttttttcatcattgcgggtggtttgcttttataattgtaagaaagtctagcagggtataccatttaaagtcattatcaatttttttttcctgttttaggtatttatttatttgcgaatgtttgcaactgacagtggatttgaaatattgccatgtaatagatactcatcagaacaaaatggagccaaaatagttgcaacaaaagagtggtaac

SEQ ID NO: 11247 - DNA, 193 bp, Homo sapiens; identical to SEQ ID NO: 5539

SEQ ID NO: 11248 - DNA, 33 bp, Homo sapiens
gagactccgtctcaaaaaaaaaaaaaaaaaaat

SEQ ID NO: 11249 - DNA, 93 bp, Homo sapiens; identical to SEQ ID NO: 5558

SEQ ID NO: 11250 - DNA, 136 bp, Homo sapiens; identical to SEQ ID NO: 5560

SEQ ID NO: 11251 - DNA, 192 bp, Homo sapiens; identical to SEQ ID NO: 5569

SEQ ID NO: 11252 - DNA, 300 bp, Homo sapiens; identical to SEQ ID NO: 5574

SEQ ID NO: 11253 - DNA, 142 bp, Homo sapiens; identical to SEQ ID NO: 5249

SEQ ID NO: 11254 - DNA, 123 bp, Homo sapiens; identical to SEQ ID NO: 5589

SEQ ID NO: 11255 - DNA, 268 bp, Homo sapiens; identical to SEQ ID NO: 5616

SEQ ID NO: 11256 - DNA, 4802 bp, Homo sapiens; identical to SEQ ID NO: 5618

SEQ ID NO: 11257 - DNA, 205 bp, Homo sapiens
accaacatggtgaaaccctgtctctactaaaagtacaaaaaaaattagccaggcaggtggcacatgcctgtaatcccagctacttgggaggctgaggcaggagaatcacttgaacccgggaggcggaggttgcagtgagccgagatcgtgccattgcactccagtctgggcaacaagagcgaaactccatctccaaaaaaaaaaa

SEQ ID NO: 11258 - DNA, 368 bp, Homo sapiens; identical to SEQ ID NO: 5252

SEQ ID NO: 11259 - DNA, 2925 bp, Homo sapiens; identical to SEQ ID NO: 5990

SEQ ID NO: 11260 - DNA, 128 bp, Homo sapiens
tggtggggggcattggctcacgcctataatcccagcactttgggaggccgaggcaggcagatcacttgaggtcaggagttcaagaccagcctggccaacatggtgaaaccccatctctactaaaaata

SEQ ID NO: 11261 - DNA, 4704 bp, Homo sapiens; identical to SEQ ID NO: 5253

SEQ ID NO: 11262 - DNA, 9877 bp, Homo sapiens
  SITE (7341): n equals a,t,g, or c
  SITE (7354): n equals a,t,g, or c
ggcaagcggaggaggcgtggcgagcggatcatccgcttccggagtcgaggttttcgggcttgtaccgcttggcggtgcggcctggtgtcggcttgcaggttctttctgtgtttgttctctgccctgccaaggccgtagagctggtgcgtgcgggtagcggggctctccgaggagccgcacgccggcggcaccatggtccacctcagtgagtcatcgggccaccgcgagacgttccgggcggtcacggggctcgggagttcggggccgggtggggagagctctcccaggcgcgatggaggcaacccgaacctgaagcagccacactgccttacatttgatccttctctcagttttttccccacttaatcaccgctgaaaaatttccaccccattgaagcagctaaggctccgacaaggtcacagagcctagtgaatggcaagcccatgcggggtgggtttgggtatgaggaggaggtcattgctggctggactggccaagaggggtttcacaaagaagagtagcatctaaactggattgacaggaatggattggaagtgagacatttcagtgggaaaagggaattgtgccgtctgtgtcattttgtcctttttgtgctgttttttgtgtcctaaccagctgcttttctacagctactctcctctgcaaggcctaccgtgggggccacttaaccatccgccttgccctgggtggctgcaccaatcggccgttctaccgcattgtggctgctcacaacaagtgtcccagggatggccgtttcgtagagcagctgggctcctatgatccattgcccaacagtcatggagaaaaactcgttgccctcaacctagacaggatccgtcattggattggctgcggggcccacctctctaagcctatggaaaagcttctgggtaactcagctctggtcttaccttattgaggggattttaaactgaagtcagctccaggacagtaggtgtaagaatgattttcggctgggcacggtggctcacgcctgtaatctcagcgctttgggaggccgaggcgggcggatcacctgaggtcaagagtttgagaccagagtggccaacatggtgaaacgctgtctctactaaaaataaaaaaaaaaaattagttgggcgtggtgacacgcacctgtagtctcagctactggggaggctgaggcaggagaatcgcttgaacccaggaggcggaggttgcagtgagccaagatcgcgtcactgcactccagtctgggcaacagagggcgattccatctcaaagaaaaaaaaaaaagagttatttcattccctctaggctgttcaggactgaagtgggagctgaagttgtgatctaattggcattttgaatctggaggccccttttgtggactcctttgtaagactttgggtgactggtattttatgctaaaaataggaatagtatgttttgaatggccatctgtcagtttacgttttttaaagtaaggggaatattgttagggaagtagacatccactgtctccttgccggggagaagtagtacagagtttggcaagtgaggagcatggtttgcatccatgcactgggtcagatctcagacctcagttctgtgagacagagttcctagggaagcattggcttatactgtgttataataagtgaaaaatctgttacttttaggtcttgctggctttttccctctgcatcctatgatgatcacaaatgctgagagactgcgaaggaaacgggcacgtgaagtcctgttagcttctcagaaaacagatgcagaagctacagatacagaggctacagaaacataaatgagctgactttagtgagcatagcagtgggaacaaggtcaaggtccttttgaaacactgcagcgatcttaattttgttagatttggagttcaataaatggagtatcctgagttgcccttgctcttctggcctggcctgcacagggcccagggagagatttgttcttgtgtgacttagagctgggtgtgggtactaattagcttttttcgactttgtcttgggatagacagtggctatgggaggattggacttttgagttgggctctgggtctcttggacaactttacaatttactggcttccaagacttcctgcttcaaaacccccagccagactattcatggcccattcagatcttcatgttcatcccacaagtgcaagaacagttaacctttcttaattgatttttgtaattggaggtttatattgtcttgcctaatgcatattctctttttttttttttttttgagacggagtcttgttctgttgccaggctggagtgcggtggtgcaatctcagctcactgcaatctccacctcctgggttcaagaggttctcctgcctcagcctcctgagtagccggggagctacaagcatgcaccaccacacccagctaattttttttttttttttgagaggagtctcgctctgtcgcccaggcttgagtgcagtggcgcgatctcggctcactgcaagctctgtctcctgggttcatgccattctcctgcttcagcctcccgagtagtcccaggagtagctgggactacaggtgcccaccaccacacccagctaatttttttgtatttttagtagagatggggtttcaccatgttatccaggatggttttgatctcctgacctcgtgatccgcccgccttggcctcccaaaagtgctgggattataggcgtgagccaccgcccgggcaaatttttgtatttttagtagagatggggtttcaccgtgttggccaggatggtctcaatctgaccttgtgatctgcccacctcggcctcccaaagtgctaggattactggcgtgagccaccactcctagccttaatgcatattcttaaatatacaaaggtagatttgttatgaaaattgctttggggctctaataacctaccttttaagaatgagaaactgctgggcttaagggagttcagtatgaatcaagattgaaccattcaaatgtggctgtgatttctgcatatatcatagatgggatccttctgagaatactggaatagggaattaggacaccaagccaattcagctgtgaaccttattcttgtacttttctttcttgctggtaattttatggagcaggttaagaaggctgctctgtgttaggataaactgtataccaataatgttgacaacctgtaatgagtgttgcattttacttcttgtatcttttccttcctaccttgatgccagtaatctataagggatctttatagtttgaatgtatttgaataacttcagtatactttagttctacttttttatttgactcacaaccattcttaggtctcaagtattcccatgtgttttaaaagcctgaagtcagtgagatgaaattcaacatcaagaatttgaagtaacttgtaaggaaaaataatataaagataccattggggcagtggctcacacctgtaatctcagcactttgggaggctgaggtggaaggatcacttgaagccagagtttgagaccagcctgtgcaacacagcaagaccccgtctctacaaaaacttaaaaaattagctggctgtggtgttgctcacccatagttccagctactcgggaagctgaggcagtaagatcacttgagcccaggaggccgatgctgcagtgaactgtgattgttccactacagtccagcctgggtgacagagaaaagaaaaagaaaacattacataatttggctagagcataataatttgattttctggtttttgaaaatttgagttgcaataaaaggatatttcagtgtgcgatttcaattttccgtagcaaatgtatatatagaaaaatgttaaaatagatgtatttgaataccttaaaaaatacaagaaactggaagaaagataatattgcaaagcatctacatatatcctaggccttttgtgtacaaggttatttgtgacaattgtaaggtattatgaaggcaggtaggattatctccgttttacagatagggaagctgaggcctagaggtggaaacttgcccagtgatgtaagattcatctcccggttatgccctcctggaaagcccttcccaacatattatgttgtccatagagggaaaaatgagcaaagacagatggcttaactctggtgtgtgactaagatataggaaatttatagaggaggttctatcaatgtgccgacttactttgtgttttatgttctgagaacgattaccagccatctcaaattctgtggttgtcaaagctcccctggggttgttgctggttggcccccacttgctttgagactttgatgccagggcaggttgagaggaactgacttcagctgagtttgatcttggatctgggaaagagaaatgctttgaaaatcacggcaactctgggaagtttaaaagatattaatgtatcctggagagtttgaggctttgcagaaacttattggcagagcagaatgattctgaaaaatgctacatcagtgaggggatatttgataaggtattttctgccaactcgggtattcacttagcattgtttatcctttaagatatgtatacacatacttcctctgtgagtttaccctactaacaaagttttatccccagcctcaaccttgctttgggtctccaggcccaagtttctcaccatctcttggatgattgctccagcccactctgctgccacctgggatccaacatgttcaaacccagctgtgaacttcacagagtattaaaagaaagagcctttgcttcagcagtttatgttattaagacggaggcttgggtcatgttatctctctccaccaatgtgtaaggtgaaagtcctattaggtaagagtttttggaagacccgtgttttgtgctttttgggtttcagtatagggttttttcctacagggctagagggaaagtaccccagcatttccaaccagtggggtgcaaaattatttgggtctacagctttacctattcctttcaagaacatttttgaaaaaacacatctgttaagttgaaccatgtgtaactgctgaatgctgatgtttggccgttttctacttaaaaaaataggccagcagtttgtaaattcaagctaatatatgaactttttgaaaaagttgttcttggacactaaaaggtaagacggacgccagatttccagagcaaggggaggagagacccgagcaacatcacttccctgaagacctagctcctgcgcgcggccggggactgtgactccacatgccggcgttacttacccgggcccgcgcctgactcgccacacctcattttgcggccgccgtaaagcgcggatgcgcggcgtggccacgccccttcagtgcttgtgacgcaggcgccctgggctttttgggcgcgaaaaagaagcagtcctgggttgtacccggcgcagctgggagcggctgcttcctccggggtcgtatctccgcccggcatggggctgctggacctttgcgaggaagtgttcggcaccgccgacctttaccgggtgctgggcgtgcgacgcgaggcctccgacggcgaggtccgacgaggctaccacaaggtgtccctgcaggtacacccggaccgggtgggtgagggcgacaaggaggacgccacccgccgcttccaggtatgcagggtcccgccccgaagccgaccggctgcgcgggcctccccctagccttttggctaccgggccccgccccgggggagcgcgctgagctccgcttggcgccttctgatctttatttctcgcgccgccgtttcggtgggaggagcaggggtgatttacggatactctttgccctcagatcctgggaaaagtctattccgttctcagtgacagagaacagagagcagtgtacgatgagcagggaacagtggacgaggactctcctgtgctcacccaagaccgagactgggaggcgtattggcggctactctttaaaaaggtaaaggactctggaggtttctttgtgactgttaccatcattcaatcaacaaacctttattgactgcctctaagatcttgtattttgtgttaattttgtaggaattaggaattttgagtttggccttgaaatacagatacacgcacgcttactgaaacgggctttaaatttcctgttaatgtgattgttgcactgaaaagggccgatttattttttttgccggatgcgctttattttacatatccaaatgtaagtcctgattccggatcacctctcactcttggaaatttcacttaaatttcccttccctggtccctagttagcagttaatgaagattggatttaaaaaggaggactccggagaagcttaggcatagaaaatctggttcaataatttcaactcaagcaactgttgtattgcagcaattcaacacccaactctagttttactaacgtacgttttatttaaagtaaaattcccaaagttaaagcaaatctcctttatcatcagatatctttagaggacattcaagcttttgaaaagacatacaaaggttcggaagaagagctggctgatattaagcaggcctatctggacttcaagggtgacatggatcagatcatggagtctgtgctttgcgtgcagtacacagaggaacccaggataaggaatatcattcagcaagctattgacgccggagaggtcccatcctataatgcctttgtcaaagaatcgaaacaaaagatgaatgcaaggaaaaggagggtaagattttgaatactgtggatttatattttgactgcttccaaaaaggatttgagagtatttacagcagtagaagtaaacataaaactccagaaataaggactagggttaacttggtctatagtttcgatctaataaatgggcataccagttcatcaagagaaactttttctagcatgttgtgctcaagatgatttttattgcatagattgtttaaatattaccatagtaaagtagcactgaaatattttttcatgtaggccaattcttgtagcattcctgaggcattcctcagggagaataaagttagtggggaacccgggtacacaggatgggcagtgatccttactcggttgagggggtaagaagagaatggcagacaccgtcttgttaaaagtgcagatgtttgggcctttgccccgaatttgattcttgagttggatacagaatttttcttttcttttttttttttttaaagaaaaactttagcttagcggtccccagcctttttgataccaggtacctgttttgtggaagacagtttttccagtgacagtgggggtgaggagagttgggggggtggttcangatgaaaccttanatcatcgggcgttagattctcttaaggagcacacaacttttaggaccactgctgccttcctgagtgccctcaggaacttttctgcagcttttacataagagacgctggcagagagaaagctgacctttttgtttccggtgaaaatttgaagggcctggtttgcctagataagaggctgcaccctttctggagagcttgaggggaacggggggagcgatatcaagaccattttggttcataggctacatctgctaagactcaagctgacaattatcttaagtcgttcatcatttcctgagatgaaactgagcacagctgcattcacagtagactgttagcttgagaaacttccctagaatttgaggagaaaatggcatagttttgatagactgttcaacaaaccttagggggatgctgaatttaaagagagaatttgaatacaaggaaacggtgtcttattgggatagggggtcctaatgtatcatcatcctcagtattaatagcattaattgctacttagaaaattcacaaggggtgttggggcctcttatagttgttgccctaaggtgttcttgtgatattttgtaaacaatgctctaggaacacttggcaaaggaaggctgctttgaaattaggtaaatagatgttaaaactgagtttattgatgttggttcttctgactactggggagaagtcattttaaactggggttgttcacaaggcaccaccagtcccatggagtaaattgggtttccaggagagaaattggaaatacctgtatcctggcaattgcatcatttgccttttttttttttttttctcttttttctaagagatggcatctccatcacccaggctggagtgcagaggcatgatcacagcttattgcagcctgaactctcagactgaagccatcttcccacctcagcctccctagtagctgggactacaagcacatgccaccacaccaggctcatttcttttcttttttatagaactgaggtctcactatgttacccaggcaggtcttgaactcctgagttcaagtgatcctcccaccttggcctcccaaggtatggggattacagttgtgagccaccatacccggcctcatgttcctttttatcatcatgtgatttatgagtgccagagtacttactacctctagcaaatagaattgggtaaaaaacaaatggtaattggaatcagaggatctactgcttgctgtcagcattgttgccatttaatgaatgacatagttatgtaattcgattcattttgtctattcatatattcataaaattgaaacagaattatagatttgcttttgggaaagagtatgtattttaagcatttcctggtggccctgagtctcatgtgagttcctgtttcaggctcaggaagaggccaaagaagcagaaatgagcagaaaggagttggggcttgatgaaggcgtggatagcctgaaggcagccattcaggtaaacttggcagtttgttgccacatctttaatgatctgattcctactgctaatattttctttggaatgttgtattttgttttcttcttttaagacataaccgcataccttctatttgtccttttaaagtgtacaatttggtggttttaagtgtatttacaaagttttacaattattaacaccaattgtaggacattttcaccattccaaaaaaactccatacccattagtagttattccacttttccagcccctggcaaccactaggtactttctgtctatggataatgttgtgaaagcttgtgttttaacttctcaaacagagcagacaaaaggatcggcaaaaggaaatggacaattttctggctcagatggaagcaaagtactgcaaatcttccaaaggaggagggaaaaaatctgctctcaagaaagaaaagaaataatggaatttttctcttcaaaggtccttaggtgtaaattgatgccatcgtaggcaaggtgcaggcaggatttgaaggcaaaagtcaattcagctcttgagaaaaggtgtctttccagcctgaatttttcagattgactagaccaagcagaatctctcaacctgatcttagtatttcctagaaagcacttgacattgtgtgaggtctcacctgaaggaacttggtggtgacatttgggagggtggagggaggcagtgtccttcctgacagcacttgcctccatggatcttctgtacacagaactcttatctaggatgtggttctgttcatgctgctttctgcgatgtgcgtgtctgttagaataggctctctacccagctagaacaccttccaaacacttgctggacagctatcttccacatactttccagtttaacattggtcttaatgatcttgaatagaatcctctcttcattttactccacccagtttgtgaactgatggtacagggttaaattaccttgaaacatttttgtgaagaaggtgtttataattcaattaaaaaagggagaaacatgattgattaaggttttggggccttt

SEQ ID NO: 11263 - DNA, 5156 bp, Homo sapiens
ggcaagcggaggaggcgtggcgagcggatcatccgcttccggagtcgaggttttcgggcttgtaccgcttggcggtgcggcctggtgtcggcttgcaggttctttctgtgtttgttctctgccctgccaaggccgtagagctggtgcgtgcgggtagcggggctctccgaggagccgcacgccggcggcaccatggtccacctcagtgagtcatcgggccaccgcgagacgttccgggcggtcacggggctcgggagttcggggccgggtggggagagctctcccaggcgcgatggaggcaacccgaacctgaagcagccacactgccttacatttgatccttctctcagttttttccccacttaatcaccgctgaaaaatttccaccccattgaagcagctaaggctccgacaaggtcacagagcctagtgaatggcaagcccatgcggggtgggtttgggtatgaggaggaggtcattgctggctggactggccaagaggggtttcacaaagaagagtagcatctaaactggattgacaggaatggattggaagtgagacatttcagtgggaaaagggaattgtgccgtctgtgtcattttgtcctttttgtgctgttttttgtgtcctaaccagctgcttttctacagctactctcctctgcaaggcctaccgtgggggccacttaaccatccgccttgccctgggtggctgcaccaatcggccgttctaccgcattgtggctgctcacaacaagtgtcccagggatggccgtttcgtagagcagctgggctcctatgatccattgcccaacagtcatggagaaaaactcgttgccctcaacctagacaggatccgtcattggattggctgcggggcccacctctctaagcctatggaaaagcttctgggtaactcagctctggtcttaccttattgaggggattttaaactgaagtcagctccaggacagtaggtgtaagaatgattttcggctgggcacggtggctcacgcctgtaatctcagcgctttgggaggccgaggcgggcggatcacctgaggtcaagagtttgagaccagagtggccaacatggtgaaacgctgtctctactaaaaataaaaaaaaaaaattagttgggcgtggtgacacgcacctgtagtctcagctactggggaggctgaggcaggagaatcgcttgaacccaggaggcggaggttgcagtgagccaagatcgcgtcactgcactccagtctgggcaacagagggcgattccatctcaaagaaaaaaaaaaaagagttatttcattccctctaggctgttcaggactgaagtgggagctgaagttgtgatctaattggcattttgaatctggaggccccttttgtggactcctttgtaagactttgggtgactggtattttatgctaaaaataggaatagtatgttttgaatggccatctgtcagtttacgttttttaaagtaaggggaatattgttagggaagtagacatccactgtctccttgccggggagaagtagtacagagtttggcaagtgaggagcatggtttgcatccatgcactgggtcagatctcagacctcagttctgtgagacagagttcctagggaagcattggcttatactgtgttataataagtgaaaaatctgttacttttaggtcttgctggctttttccctctgcatcctatgatgatcacaaatgctgagagactgcgaaggaaacgggcacgtgaagtcctgttagcttctcagaaaacagatgcagaagctacagatacagaggctacagaaacataaatgagctgactttagtgagcatagcagtgggaacaaggtcaaggtccttttgaaacactgcagcgatcttaattttgttagatttggagttcaataaatggagtatcctgagttgcccttgctcttctggcctggcctgcacagggcccagggagagatttgttcttgtgtgacttagagctgggtgtgggtactaattagcttttttcgactttgtcttgggatagacagtggctatgggaggattggacttttgagttgggctctgggtctcttggacaactttacaatttactggcttccaagacttcctgcttcaaaacccccagccagactattcatggcccattcagatcttcatgttcatcccacaagtgcaagaacagttaacctttcttaattgatttttgtaattggaggtttatattgtcttgcctaatgcatattctctttttttttttttttttgagacggagtcttgttctgttgccaggctggagtgcggtggtgcaatctcagctcactgcaatctccacctcctgggttcaagaggttctcctgcctcagcctcctgagtagccggggagctacaagcatgcaccaccacacccagctaattttttttttttttttgagaggagtctcgctctgtcgcccaggcttgagtgcagtggcgcgatctcggctcactgcaagctctgtctcctgggttcatgccattctcctgcttcagcctcccgagtagtcccaggagtagctgggactacaggtgcccaccaccacacccagctaatttttttgtatttttagtagagatggggtttcaccatgttatccaggatggttttgatctcctgacctcgtgatccgcccgccttggcctcccaaaagtgctgggattataggcgtgagccaccgcccgggcaaatttttgtatttttagtagagatggggtttcaccgtgttggccaggatggtctcaatctgaccttgtgatctgcccacctcggcctcccaaagtgctaggattactggcgtgagccaccactcctagccttaatgcatattcttaaatatacaaaggtagatttgttatgaaaattgctttggggctctaataacctaccttttaagaatgagaaactgctgggcttaagggagttcagtatgaatcaagattgaaccattcaaatgtggctgtgatttctgcatatatcatagatgggatccttctgagaatactggaatagggaattaggacaccaagccaattcagctgtgaaccttattcttgtacttttctttcttgctggtaattttatggagcaggttaagaaggctgctctgtgttaggataaactgtataccaataatgttgacaacctgtaatgagtgttgcattttacttcttgtatcttttccttcctaccttgatgccagtaatctataagggatctttatagtttgaatgtatttgaataacttcagtatactttagttctacttttttatttgactcacaaccattcttaggtctcaagtattcccatgtgttttaaaagcctgaagtcagtgagatgaaattcaacatcaagaatttgaagtaacttgtaaggaaaaataatataaagataccattggggcagtggctcacacctgtaatctcagcactttgggaggctgaggtggaaggatcacttgaagccagagtttgagaccagcctgtgcaacacagcaagaccccgtctctacaaaaacttaaaaaattagctggctgtggtgttgctcacccatagttccagctactcgggaagctgaggcagtaagatcacttgagcccaggaggccgatgctgcagtgaactgtgattgttccactacagtccagcctgggtgacagagaaaagaaaaagaaaacattacataatttggctagagcataataatttgattttctggtttttgaaaatttgagttgcaataaaaggatatttcagtgtgcgatttcaattttccgtagcaaatgtatatatagaaaaatgttaaaatagatgtatttgaataccttaaaaaatacaagaaactggaagaaagataatattgcaaagcatctacatatatcctaggccttttgtgtacaaggttatttgtgacaattgtaaggtattatgaaggcaggtaggattatctccgttttacagatagggaagctgaggcctagaggtggaaacttgcccagtgatgtaagattcatctcccggttatgccctcctggaaagcccttcccaacatattatgttgtccatagagggaaaaatgagcaaagacagatggcttaactctggtgtgtgactaagatataggaaatttatagaggaggttctatcaatgtgccgacttactttgtgttttatgttctgagaacgattaccagccatctcaaattctgtggttgtcaaagctcccctggggttgttgctggttggcccccacttgctttgagactttgatgccagggcaggttgagaggaactgacttcagctgagtttgatcttggatctgggaaagagaaatgctttgaaaatcacggcaactctgggaagtttaaaagatattaatgtatcctggagagtttgaggctttgcagaaacttattggcagagcagaatgattctgaaaaatgctacatcagtgaggggatatttgataaggtattttctgccaactcgggtattcacttagcattgtttatcctttaagatatgtatacacatacttcctctgtgagtttaccctactaacaaagttttatccccagcctcaaccttgctttgggtctccaggcccaagtttctcaccatctcttggatgattgctccagcccactctgctgccacctgggatccaacatgttcaaacccagctgtgaacttcacagagtattaaaagaaagagcctttgcttcagcagtttatgttattaagacggaggcttgggtcatgttatctctctccaccaatgtgtaaggtgaaagtcctattaggtaagagtttttggaagacccgtgttttgtgctttttgggtttcagtatagggttttttcctacagggctagagggaaagtaccccagcatttccaaccagtggggtgcaaaattatttgggtctacagctttacctattcctttcaagaacatttttgaaaaaacacatctgttaagttgaaccatgtgtaactgctgaatgctgatgtttggccgttttctacttaaaaaaataggccagcagtttgtaaattcaagctaatatatgaactttttgaaaaagttgttc

SEQ ID NO: 11264 - DNA, 1581 bp, Homo sapiens
tttttaaaaataaaaaaagtaaattttaatgaagttatcttacaaaaaaatgtacaaatcatgaccgtgcatagtgcttgatgaattttcacaaagtaaacatatccatgtaaccaggacaaggttctaaggtcttctactggagttttcatgaagtagggaaataggaagagccaattccatcccagggaactatgttctttagccgtagccccacaaaagaggggtcttcaaagccacataaagtatatcacgtatgacatatatctttccctttcttcctctttcatgtagctgaaattgaaagatgaggctctgcttgcagagatccacacactacaggaaacagttggctttggaaatccatctttctgatacccctccagctgaacaattttctgcatgggactctgagttcctttccttcccagagagttttaccgtatgaagcctggagctggagaacgaaagaatcttcactataaacagagacccattcatttatttccattggctgtgttactggatgttttactggttgacgagaaactgggtcacaataaaaaaatggagatatgaaactcaaaattcatcagcatggttctggagttaacgtatactgagttacatgtaggtatttagttatataaataactatagtgtaattgctataataattatatggcatatatatacatacaataaaattaaggtatagtggggtcattattagggtttctgatgaaagcttattggatcactcctggaggaagtcaggtgctaaggtttctggacaggttcagttaactgaaatacaggaattaaggcatcattttcaaaggtggccctggaggaagactgctatgctgggtcactgtattagggcaaagagcatgctagccctttggaactaacagtaaacgaaaaagctgaacagagaggtctttgctgaaggtggagctattgacaccttctcaccaaacacaggcatcttcatggatctaaaccactagggctccaaggagacaccgttaccctcatcaccgaggtcatattctagggctacagataaaaaaaaaaaaaatcatacttcacctctgccctggatcacagcacggcaaaagcaggaataacccctccttttttttttaaggtgtgactgcctcgataggggtgggacgacaacaggagaaaaggtgagaggtaaattaattttggttaacgagaaggataaagtaaaatctagtcacttacaatccttctcctagtctcggccctgacactacctcctctgtgaagtcttccttagcaagcactaggtttgccttctctgctcgctgtccttgcgctgagtactactgatcgcgctagtttctctgctgtcatctcacggtctccccagcggactgtgagctccacgaggaaagaacagcgccctttagtatttgcgttctcagcgttgcgcctcggcaccaacgcttgcaagatggatggcttttgtagcactttccttggcgcgcctgggattcgcctaaaacttctgactccagcagggactcacaagtctgagagggatcgcac

SEQ ID NO: 11265 - DNA, 302 bp, Homo sapiens
aatgtggggccgggcgcagtggctcacgcctgtaatcccagcactttgggaggctgaggcaggtggatcatgaggtcaggagattgagaccatcctggctaacacggtgaaaccccatctctactaaaaatacaaaaaattagccgggcgtggtggtgggcgcctgtagtcccagctactcgggaggctgaggcaggagaatggcatgaacctggggggcggagcttgcagtgagcggagattgtgccactgcactccagcctgggcgacagagcgagactccatctcaacaacaacaacaa

SEQ ID NO: 11266 - DNA, 1580 bp, Homo sapiens
tttttaaaaataaaaaaagtaaattttaatgaagttatcttacaaaaaaatgtacaaatcatgaccgtgcatagtgcttgatgaattttcacaaagtaaacatatccatgtaaccaggacaaggttctaaggtcttctactggagttttcatgaagtagggaaataggaagagccaattccatcccagggaactatgttctttagccgtagccccacaaaagaggggtcttcaaagccacataaagtatatcacgtatgacatatatctttccctttcttcctctttcatgtagctgaaattgaaagatgaggctctgcttgcagagatccacacactacaggaaacagttggctttggaaatccatctttctgatacccctccagctgaacaattttctgcatgggactctgagttcctttccttcccagagagttttaccgtatgaagcctggagctggagaacgaaagaatcttcactataaacagagacccattcatttatttccattggctgtgttactggatgttttactggttgacgagaaactgggtcacaataaaaaaatggagatatgaaactcaaaattcatcagcatggttctggagttaacgtatactgagttacatgtaggtatttagttatataaataactatagtgtaattgctataataattatatggcatatatatacatacaataaaattaaggtatagggggtcattattagggtttctgatgaaagcttattggatcactcctggaggaagtcaggtgctaaggtttctggacaggttcagttaactgaaatacaggaattaaggcatcattttcaaaggtggccctggaggaagactgctatgctgggtcactgtattagggcaaagagcatgctagccctttggaactaacagtaaacgaaaaagctgaacagagaggtctttgctgaaggtggagctattgacaccttctcaccaaacacaggcatcttcatggatctaaaccactagggctccaaggagacaccgttaccctcatcaccgaggtcatattctagggctacagataaaaaaaaaaaaaatcatacttcacctctgccctggatcacagcacggcaaaagcaggaataacccctccttttttttttaaggtgtgactgcctcgataggggtgggacgacaacaggagaaaaggtgagaggtaaattaattttggttaacgagaaggataaagtaaaatctagtcacttacaatccttctcctagtctcggccctgacactacctcctctgtgaagtcttccttagcaagcactaggtttgccttctctgctcgctgtccttgcgctgagtactactgatcgcgctagtttctctgctgtcatctcacggtctccccagcggactgtgagctccacgaggaaagaacagcgccctttagtatttgcgttctcagcgttgcgcctcggcaccaacgcttgcaagatggatggcttttgtagcactttccttggcgcgcctgggattcgcctaaaacttctgactccagcagggactcacaagtctgagagggatcgcac

SEQ ID NO: 11267 - DNA, 6708 bp, Homo sapiens; identical to SEQ ID NO: 6360

SEQ ID NO: 11268 - DNA, 237 bp, Homo sapiens
tttctatttttaaaaatttgtcagtatgtgccttatggcccagaatgtggtatatcttcatgaaagttccatgtgaactcaagaacaatgtgtaatctgcagttacgagtgtagtagtctataatgctcattatatacacttgaagaatggtgttgctgagtccagctatgtctttacttattttctgcctgccagctctgtccatttcaaaaaacaaaaaaacaaacaaaaaaaaa

SEQ ID NO: 11269 - DNA, 1314 bp, Homo sapiens
cagagaaagcagtactgactctggagttgagcagatgtgggttcaaacccacatgtacatgtgaccagcagtgtcatcaaagagagttctgcatttctctgagcttcagttttcctcctatgcaaagaggggatcacatctactaccaagatgcaaaacagttagtacaaaatgactgctcgcagggccacatttatactgtggatgcattttggtcatattttggtaacataatctgatgtggctgactgtgtcatggcttcatacctttcatgctttggacttttgctgctttctgcaggaacgattccacgtgaagatcctccccatacatacattcacaagctcaaaggctatctggatccagctgtaaccaggaaggtaagatggatttgtttccactctttgttattgcttccttattagcgagcagaatcctcctgcattggaagagaccttccttcctctgcattagagcctctgccagagcctccacaaaaaacaaccttgggagaccaacaacgtaagaagacaaaggaaaaaaaacaaccttctcacttgaagatgtgtataaaagttctttcctgacatgagagtcacgtacctctgatgttgtttgagtcactgctatttccaattacgtagggcagtgagtgcattccagaggtattcaggcccctagaagagcaggctttgcaaagggaatacttgcctttcagttttttatgccttggtgcatttccagagaccttgaaaaatcactgggcctttgtcatcccagctgtgcactcacatcctgtgttgatgcttttagcagctcccccctactccccccaacccctgcccctggcctgagaaggtaagtagagaatagctgattccattctcaacagactctccccttttacaaacaagccctgctttgtgcagccacacaattggtttaaactgatgcctcgtggtaaagcatgtagcctggcacggccctgtgggcctgaatcagtcctgggatgtctcagggcagagctgtccttgctcaagatgggtgaaggggtgctttaccagatagcatttgtttttccattgacctacaactcctgcttttaaggctcctgcgaaaatctctcaggctgattctctctgttgtttcagtgtgtgattcttgagaaaagaatggtatactttacctagttagccattttcagggctcttgatgcttgcattaaaaaaaaaatctttttctttatcttctactctaactcttcctcccctcaccgcccaccccccgaccaaaaaaaaaaaaaaaaaaaagtc

SEQ ID NO: 11270 - DNA, 1314 bp, Homo sapiens
cagagaaagcagtactgactctggagttgagcagatgtgggttcaaacccacatgtacatgtgaccagcagtgtcatcaaagagagttctgcatttctctgagcttcagttttcctcctatgcaaagaggggatcacatctactaccaagatgcaaaacagttagtacaaaatgactgctcgcagggccacatttatactgtggatgcattttggtcatattttggtaacataatctgatgtggctgactgtgtcatggcttcatacctttcatgctttggacttttgtgctttctgcaggaacgattccaggtgaagaatcctccccatacatacattcaaaagctcaaaggctatctggatccagctgtaaccaggaaggtaagatggatttgtttccactctttgttattgcttccttattagcgagcagaatcctcctgcattggaagagaccttccttcctctgcattagagcctctgccagagcctccacaaaaaacaaccttgggagaccaacaacgtaagaagacaaaggaaaaaaaacaaccttctcacttgaagatgtgtataaaagttctttcctgacatgagagtcacgtacctctgatggttgttgagtcactgctatttccaattacatagggcagtgagtgcattccagaggtattcaggcccctagaagagcaggctttgcaaagggaatacttgcctttcagttttttatgccttggtgcatttccagagaccttgaaaaatcactgggcctttgtcatcccagctgtgcactcacatcctgtgttgatgcttttagcagctcccccctactccccccaacccctgcccctggcctgagaaggtaagtagagaatagctgattccattctcaacagactctccccttttacaaacaagccctgctttgtgcagccacacaattggtttaaactgatgcctcgtggtaaagcatgtagcctggcacggccctgtgggcctgaatcagtcctgggatgtctcagggcagagctgtccttgctcaagatgggtgaaggggtgctttaccagatagcatttgtttttccattgacctacaactcctgcttttaaggctcctgcgaaaatctctcaggctgattctctctgttgtttcagtgtgtgattcttgagaaaagaatggtatactttacctagttagccattttcagggctcttgatgcttgcattaaaaaaaaaatcttttcctttatcttctactctaactcttcctcccctcaccgcccaccccccgaccaaaaaaaaaaaaaaaaaaaagtc

SEQ ID NO: 11271 - DNA, 246 bp, Homo sapiens
ctcataggtgggaattgaacaatgagatcacatggacacaggaaggggaatatcacactctggggactgtggtggggtggggggaggggggagggatagcattgggagatatacctaatgctagatgacgagttagtgggtgcagcgcaccagcatggcacacgtatacatatgtaactaacctgcacaatgtgcacatgtaccctaaaacttaaagtataattaaaaattaataataataataag

SEQ ID NO: 11272 - DNA, 246 bp, Homo sapiens; identical to SEQ ID NO: 11271

SEQ ID NO: 11273 - DNA, 2393 bp, Homo sapiens; identical to SEQ ID NO: 10040

SEQ ID NO: 11274 - DNA, 2452 bp, Homo sapiens; identical to SEQ ID NO: 10041

SEQ ID NO: 11275 - DNA, 298 bp, Homo sapiens; identical to SEQ ID NO: 10042

SEQ ID NO: 11276 - DNA, 298 bp, Homo sapiens; identical to SEQ ID NO: 10042

SEQ ID NO: 11277 - DNA, 1071 bp, Homo sapiens
gtttcatcagtatgattatactcctaggtgaaaaaaaagatggagacaagggaaaaaatgaagttaacgaataaaacaaatgttatttcagatcacggccctgtgtgtgttactaaggaaagatataaggatttataacatatatttgttttccatttatttttatgaaggaattaaagaaattatcagaaaatactaaaagggaacaaagcattttaaaaacattccaacaatggcatgctgctttttatacagtatgcagtgaagttccttgcatttcaaaggcaagggtagctaaatctgcctcagccccttagcgttctgtactacccttatcttgccatttacaacatgaaagtataataatctatttacatgctggtatataccactatgagtttctgacaaacatggcacatcttggtggtagttcatttattctacaaatacttattcaatgtctactatgtgccaggcacacttttggacattttggatacatcaggtaagaatataaatacctctgccccatgaaccttacattctacctatattgcaaagttcctagcacatcgtagatttcttctcatggtcataagatgtctgcaccaattctaagcatcacatcttcatagaaaagcatccaaaacaggaaggaaaaattagaagcaaaagggctttctccttttgggcctttcttttcataggaaagaaaatctttcccagaaccctcaaacatgtgatctggaccaaacactggctggcaaagagtggaatttcttaagtctgagcaacaagaagaaaaccgttaccataactaccaactcacctgcatctgtgccatgtgcttgcctgcccacctataactaaggatgagctgtttgtagtcttaggtcaactcctccacttgtgccttggatcctgccgcacgcccccatcacctacttgcggacattactccaacagttcttttctttctgtcctgtattatcaaatttctgttcttactggattttcatgctctttcatcattatgaaagcatgcagtaatttcttcattaaaaaaaaaaa

SEQ ID NO: 11278 - DNA, 2256 bp, Homo sapiens
acataaccaagtacaaaggatttaatcagaaaattatccaatggtgatgtatttgaattcaattatggttaccccctacacagatgtgaactcatagaggaactgaaatccttcctacaaagctacacagtgactgtgacaatggtgatgcacaccaggctactgttcagaatgagtttatggccagtaaactgtggtcaggaaacttactgcaaagtggggactcatctgtcccattggggcagtcaaagatgccatcacacactacactcagattcacacagatgttatggccaagacactgccattgccaactaggacagcgaaagggctgagtagggcagtccttctcatcactcatatccccgcagtcattgtcccgatcacagagccatgccctgtggatgcagtttccgttgtcacagtggaaatatgatgaagggcaagtcttggggacacaggcattgtgctcatcagatccatagaggcagtctggatgcccatcacattcccagaagttcgggatgcagataccatcttcttggcactgaaattcatctgagtggcacataccaggaggcctggttgctagaaggaaaacatggggtaaatcggcttgtgaatgtaatttgtgatcccttttatagtctagactcagaggaaatgattttggatccaatagtaggtttatagtaacaactatgaccaaattaatatttaaggctaaatgatatagagtcttctcccacactctagtacatagaaatatttctttgtggcagctagtggctctgacaacaaacgaagtacagaacgcacaactgctgactagcagatgagtacctgtgtcaaaagaacatcctgtttccttttcctgtgtttttaatgtacttccaattgcagattcaataataaagtttatctatctttctatgaaagaatcaccagaacattacaatagagcttaaatagctatgattactttgaacttcatgtgtttcatatcatgtttgggtgttattattttccctcagatgaactatacctaatgaaaccatcacacactaactaaagatgatggtaaatactcagttctttgcaaactttccactattcatcaagcaatcctggagagatacgtaagaactgcttccctatttgacaagggtaaaccaaaactctctaccagggatctcacaaggcaacagcaagccagcggcaattgacagtttaacctcagctcatcacagaattttatgtttttaatgtgaaacaggaaaattagtgattagtaatttctagatgttgtgcaaactataaagtatataagcattttatttaacttttctttttaatccatggctttacacactacctttctgacgcaggaggagaattcatgaaaacttacttttttggtctaaaacaccattgttcaaacaaatgatcaactcactgatgagtttttgcaagtctaaaatccatttaaaacaaaaagtgggcaaataacaaatcatgtgagtataggtttccagtctgtgaagattatagatccatcagaattatactgtatgaagtcctacttgaatcctccaactagaagaaatttcttttctctgaacctccatagaattttatctgtgccatttctaagacccttgtaactgtctatcttgcttaattgtctcttgccttctataatctccatagataacatcttagcagatattcaacacataatagcacaaagaatgaattcatcagagtcaatactaaacacagctccataccatttctacaccatgatatgacttctctactgaaacttaaaagaaaccagtaaaatatctttatatggagtagagcctcaaaagtttaaacctactaaagtgggaagtcctaagaaaaactaaaagtgaaaacaaaaatatctaagaaatatttagcccatctaagagactatttgaagtgtccatttatacaaccacttgatttgttaattacacattatatggcaatgtctactcaattttactgtatgttcaataccacattcctttgaggatactttcccccagtttgtctgagttagggaaaatgtgtggcaatatcaatatcaatactggcaaaaatgaaatgacccctttgtctgaaacattctgggtatgtgttacttacgacagcctgcttcatccgagttgtcactgcaatcaaaaacaccatcacaacgatttgtgacgccaatacatttatccc

SEQ ID NO: 11279 - DNA, 2254 bp, Homo sapiens
acataaccaagtacaaaggatttaatcagaaaattatccaatggtgatgtatttgaattcaattatgttaccccctacacagatgtgaactcatagaggaactgaaatccttcctacaaagctacacagtgactgtgacaatggtgatgcacaccaggctactgttcagaatgagtttatggccagtaaactgtggtcaggaaacttactgcaaagtggggactcatctgtccattggggcagtcaaagatgccatcacacactacactcagattcacacagatgttatggccaagacactgccattgccaactaggacagcgaaagggctgagtagggcagtccttctcatcactcatatccccgcagtcattgtcccgatcacagagccatgccctgtggatgcagtttccgttgtcacagtggaaatatgatgaagggcaagtcttggggacacaggcattgtgctcatcagatccatagaggcagtctggatgcccatcacattcccagaagttcgggatgcagataccatcttcttggcactgaaattcatctgagtggcacataccaggaggcctggttgctagaaggaaaacatggggtaaatcggcttgtgaatgtaatttgtgatcccttttatagtctagactcagaggaaatgattttggatccaatagtaggtttatagtaacaactatgaccaaattaatatttaaggctaaatgatatagagtcttctcccacactctagtacatagaaatatttctttgtggcagctagtggctctgacaacaaacgaagtacagaacgcacaactgctgactagcagatgagtacctgtgtcaaaagaacatcctgtttccttttcctgtgtttttaatgtacttccaattgcagattcaataataaagtttatctatctttctatgaaagaatcaccagaacattacaatagagcttaaatagctatgattactttgaacttcatgtgtttcatatcatgtttgggtgttattattttccctcagatgaactatacctaatgaaaccatcacacactaactaaagatgatggtaaatactcagttctttgcaaactttccactattcatcaagcaatcctggagagatacgtaagaactgcttccctatttgacaagggtaaaccaaaactctctaccagggatctcacaaggcaacagcaagccagcggcaattgacagtttaacctcagctcatcacagaattttatgtttttaatgtgaaacaggaaaattagtgattagtaatttctagatgttgtgcaaactataaagtatataagcattttatttaacttttctttttaatccatggctttacacactacctttctgacgcaggaggagaattcatgaaaacttacttttttggtctaaaacaccattgttcaaacaaatgatcaactcactgatgagtttttgcaagtctaaaatccatttaaaacaaaaagtgggcaaataacaaatcatgtgagtataggtttccagtctgtgaagattatagatccatcagaattatactgtatgaagtcctacttgaatcctccaactagaagaaatttcttttctctgaacctccatagaattttatctgtgccatttctaagacccttgtaactgtctatcttgcttaattgtctcttgccttctataatctccatagataacatcttagcagatattcaacacataatagcacaaagaatgaattcatcagagtcaatactaaacacagctccataccatttctacaccatgatatgacttctctactgaaacttaaaagaaaccagtaaaatatctttatatggagtagagcctcaaaagtttaaacctactaaagtgggaagtcctaagaaaaactaaaagtgaaaacaaaaatatctaagaaatatttagcccatctaagagactatttgaagtgtccatttatacaaccacttgatttgttaattacacattatatggcaatgtctactcaattttactgtatgttcaataccacattcctttgaggatactttcccccagtttgtctgagttagggaaaatgtgtggcaatatcaatatcaatactggcaaaaatgaaatgacccctttgtctgaaacattctgggtatgtgttacttacgacagcctgcttcatccgagttgtcactgcaatcaaaaacaccatcacaacgatttgtgacgccaatacatttatccc

SEQ ID NO: 11280 - DNA, 2257 bp, Homo sapiens
acataaccaagtacaaaggatttaatcagaaaattatccaatggtgatgtatttgaattcaattatggttaccccctacacagatgtgaactcatagaggaactgaaatccttcctacaaagctacacagtgactgtgacaatggtgatgcacaccaggctactgttcagaatgagtttatggccagtaaactgtggtcaggaaacttactgcaaagtggggactcatctgtcccattggggcagtcaaagatgccatcacacactacactcagattcacacagatgttatggccaagacactgccattgccaactaggacagcgaaagggctgagtagggcagtccttctcatcactcatatccccgcagtcattgtcccgatcacagagccatgccctgtggatgcagtttccgttgtcacagtggaaatatgatgaagggcaagtcttggggacacaggcattgtgctcatcagatccatagaggcagtctggatgcccatcacattcccagaagttcgggatgcagataccatcttcttggcactgaaattcatctgagtggcacataccaggaggcctggttgctagaaggaaaacatggggtaaatcggcttgtgaatgtaatttgtgatcccttttatagtctagactcagaggaaatgattttggatccaatagtaggtttatagtaacaactatgaccaaattaatatttaaggctaaatgatatagagtcttctcccacactctagtacatagaaatatttctttgtggcagctagtggctctgacaacaaacgaagtacagaacgcacaactgctgactagcagatgagtacctgtgtcaaaagaacatcctgtttccttttcctgtgtttttaatgtacttccaattgcagattcaataataaagtttatctatctttctatgaaagaatcaccagaacattacaatagagcttaaatagctatgattactttgaacttcatgtgtttcatatcatgtttgggtgttattattttccctcagatgaactatacctaatgaaaccatcacacactaactaaagatgatggtaaatactcagttctttgcaaactttccactattcatcaagcaatcctggagagatacgtaagaactgcttccctatttgacaagggtaaaccaaaactctctaccagggatctcacaaggcaacagcaagccagcggcaattgacagtttaacctcagctcatcacagaattttatgtttttaatgtgaaacaggaaaattagtgattagtaatttctagatgttgtgcaaactataaagtatataagcattttatttaacttttctttttaatccatggctttacacactacctttctgacgcaggaggagaattcatgaaaacttacttttttggtctaaaacaccattgttcaaacaaatgatcaactcactgatgagtttttgcaagtctaaaatccatttaaaacaaaaagtgggcaaataacaaatcatgtgagtataggtttccagtctgtgaagattatagatccatcagaattatactgtatgaagtcctacttgaatcctccacactagaagaaatttcttttctctgatcctccataggattttatctgtgccatttctgagacccttgtaactgtctatcttgcttaattgtctcttgccttctataatctccatagataacatcttagcagatattcaacacataatagcacaaagaatgaattcatcagagtcaatactaaacacagctccataccatttctacaccatgatatgacttctctactgaaacttaaaagaaaccagtaaaatatctttatatggagtagagcctcaaaagtttaaacctactaaagtgggaagtcctaagaaaaactaaaagtgaaaacaaaaatatctaagaaatatttagcccatctaagagactatttgaagtgtccatttatacaaccacttgatttgttaattacacattatatggcaatgtctactcaattttactgtatgttcaataccacattcctttgaggatactttcccccagtttgtctgagttagggaaaatgtgtggcaatatcaatatcaatactggcaaaaatgaaatgacccctttgtctgaaacattctgggtatgtgttacttacgacagcctgcttcatccgagttgtcactgcaatcaaaaacaccatcacaacgatttgtgacgccaatacatttatccc

SEQ ID NO: 11281 - DNA, 2620 bp, Homo sapiens
gcctaaatgtattgattacttgtccccttcctcctttgtgacaactcagatgtattatatccacatactacttactcctctgaattcctccagggtagttatgcttttgcaagatgtggtaagtctatattgacaaagaaactcccagttatctatcaatttgttcctgaatgaatactgatgaggacattgttgatgatatcctaacgtatcttttgtatggggaagacctttgtctcagttgggaaagcaatgaggcttctcctaatttggcaagcctttttatgccctaaactcaccaagtcttcccaatctttcctctttctagcttatcctatttctctttaactttctttatacgtatttttatttgtttttagtatgttgtgttttatgtagctttatgaactgtactttttcttctcctcctctttttttcttcatcttttaatagaggaatgtcaattaaaaaaaatctttttcaggggaagatagaaagagtaggatatattagtgtgtttgtttcctagagctgctataacgaagtactacaaaccgaatggcttagaacaacagaacttgattgtattccagttctaaaggctggaagtccaaaatcaaggtgttggtaaaaccatgctccctaaatatattggggaggatctgttccaggtctctcactttctgtcttcttcttctctttgcctctcatagcttcaggtgttccttgacttgtagatgtctgtcttcttccttcctttgtgtctcttcacatcatctttcctctccatctccctgttcagattttccttgtataaagacctcagtcatgttgaattagagcccaccctaatgacataattctatgattacctctgttaaaaccctatttgcaaataacgtcatattctgagacactgagggtttaggaattcaaaatatattttttgaggggcagacatttcaacccacaacaagcagacacaatgaaaaaattaaagcaaactggattttaaaagatagagatgagatcttctaggcccttcaaagagaacttcagtgagacaactagttgaagacagtgtttaggctgtttttctatcatgcaaagaattccttctttgtatttatattttgctgctccatttctctttgacttttcctttcctttctttttcttctctcttctattttttaagagggaatataccctcttggtaaaaaattcaaaaggtctacaaatttaaatttacatattttacaaagtaatgcaatatttattcattttataaatataaaaaaattaatatgtaatcattttagaaaagttttaaaaagcaccgttaaaaaagcacaacaaaaacaataaacttatgcaaaatttcaaacctaacagatcatctctgacaattttaggatttatatttttgttttatatatacaatatagttggatattttatacaattgatattatttcatatacccattttctagtccttttagcactaacaagcatactatgaatattttctcctgtcactaaatatccttcacagcatgagtttttgcagtgttctatgaaataaaataccataaaattttcaaagtcttttgtggtatatttagattgccttcaattttacagtaccatacaaataattctgtgatgaacatatttgtaagtaaatctttatttaactccttgactactttttaattttcttctagaaatgaaactgctatattaaagtgtaaatacattaaaatactctggataaatgtcaaataaattatagccaaacatccatcatggccactaaaaaagtctcaataaactatttattaaatgtctagttttatcacatgtgactttcctagtttgccatctgagacaacctaattaaaaattactcccttacgtattatagctacataagataattagctacaaaatacctatgtctacaaaaatgcttgttttacttcagaaaagtttagacaatatttttttcccacatagtaatctagtgcatgaaaataaaatgtccaaaaaatttatatcagagtttaaatgagtatggtggtttctaaaacagatgcaaatccttttaactttcctcccattgaaaagtgcagtctatctttcctttccttctccctggtagacttgtgaccaattccaccaataaaggatggtggaactgacactgcaacttctaaggtgacactatgcaaaggccacttggtttgcagcttccaccttgctttagtggaatacttggttgtcatgggggaagtgttccttgagccaccatgttggagaggggacctatagacacttggacctatagtcccagctgagctcagccttgcagccacatccactgaggtgtcaaatattaggttggtgaaaacataattgtggtttttgcatttttgaaatttgccatttgatattggaatacattcttaaacaaaagtggttatgttatacatcatgttaatgtacatttatgttttttgacactgaattattactgttaattttgtatttattttagactatagaaatagtgtgagacgaaaagcaaatttgagcgattttcttattcgaattc

SEQ ID NO: 11282 - DNA, 2833 bp, Homo sapiens
  SITE (220): n equals a,t,g, or c
gcctaaatgtattgattacttgtccccttcctcctttgtgacaactcagatgtattatatccacatactacttactcctctgaattcctccagggtagttatgcttttgcaagatgtggtaagtctatattgacaaagaaactcccagttatctatcaatttgttcctgaatgaatactgatgaggacattgttgatgatatcctaacgtgtcttttgtntggggaagacctttgtctcagttgggaaagcaatgaggcttctcctaatttggcaagcctttttatgccctaaactcaccaagtcttcccaatctttcctctttctagcttatcctatttctctttaactttctttatacgtatttttatttgtttttagtatgttgtgttttatgtagctttatgaactgtactttttcttctcctcctctttttttcttcatcttttaatagaggaatgtcaattaaaaaaactctttttcaggggaagatagaaagagtaggatatattagtgtgtttgtttcctagagctgctctaacgaagttctacaaaccgaatggcttagaacaacagaacttgattgtcttccagttctaaaggctggaagtccaaaatcaaggtgttggtaaaaccctgctccctaaatatattggggaggatctgttccaggtctctcactttctgtcttcttcttctctttgcctctcatagcttcaggtgttccttgacttgtagatgtctgtcttcttccttcctttgtgtctcttcacatcatctttcctctccatctccctgttcagattttccttgtataaagacctcagtcatgttgaattagagcccaccctaatgacataattctatgattacctctgttaaaaccctatttgcaaataacgtcatattctgagacactgagggtttaggaattcaaaatatattttttgaggggcagacatttcaacccacaacaagcagacacaatgaaaaaattaaagcaaactggattttaaaagatagagatgagatcttctaggcccttcaaagagaacttcagtgagacaactagttgaagacagtgtttaggctgtttttctatcatgcaaagaattccttctttgtatttatattttgctgctccatttctctttgacttttcctttcctttctttttcttctctcttctattttttaagagggaatataccctcttggtaaaaaattcaaaaggtctacaaatttaaatttacatattttacaaagtaatgcaatatttattcattttataaatataaaaaaattaatatgtaatcattttagaaaagttttaaaaagcaccgttaaaaaagcacaacaaaaacaataaacttatgcaaaatttcaaacctaacagatcatctctgacaattttaggatttatatttttgttttatatatacaatatagttggatattttatacaattgatattatttcatatacccattttctagtccttttagcactaacaagcatactatgaatattttctcctgtcactaaatatccttcacagcatgagtttttgcagtgttctatgaaataaaataccataaaattttcaaagtcttttgtggtatatttagattgccttcaattttacagtaccatacaaataattctgtgatgaacatatttgtaagtaaatctttatttaactccttgactactttttaattttcttctagaaatgaaactgctatattaaagtgtaaatacattaaaatactctggataaatgtcaaataaattatagccaaacatccatcatggccactaaaaaagtctcaataaactatttattaaatgtctagttttatcacatgtgactttcctagtttgccatctgagacaacctaattaaaaattactcccttacgtattatagctacataagataattagctacaaaatacctatgtctacaaaaatgcttgttttacttcagaaaagtttagacaatatttttttcccacatagtaatctagtgcatgaaaataaaatgtccaaaaaatttatatcagagtttaaatgagtatggtggtttctaaaacagatgcaaatccttttaactttcctcccattgaaaagtgcagtctatctttcctttccttctccctggtagacttgtgaccaattccaccaataaaggatggtggaactgacactgcaacttctaaggtgacactatgcaaaggccacttggtttgcagcttccaccttgctttagtggaatacttggttgtcatgggggaagtgttccttgagccaccatgttggagaggggacctatagacacttggacctatagtcccagctgagctcagccttgcagccacatccactgaggtgtcaaatattaggttggtgaaaacataattgtggtttttgcatttttgaaatttgccatttgatattggaatacattcttaaacaaaagtggttatgttatacatcatgttaatgtacatttatgttttttgacactgaattattactgttaattttgtatttattttagactatagaaatagtgtgagacgaaaagcaaatttgagcgattttcttattcgaattcaaaatgggtcataaagtggcagagacaactcgtaacatcaacaatgcatttggcccaggaactgctaacgaacgtacagtacagtggcggttcaagaagtttcacaaaggagatgagagccttgaagataaggagcacggcagccggccattggaagttgataataatcagttgagaccactcatcgaagctaatctacttacaactactcga

SEQ ID NO: 11283 - DNA, 2833 bp, Homo sapiens
gcctaaatgtattgattacttgtccccttcctcctttgtgacaactcagatgtattatatccacatactacttactcctctgaattcctccagggtagttatgcttttgcaagatgtggtaagtctatattgacaaagaaactcccagttatctatcaatttgttcctgaatgaatactgatgaggacattgttgatgatatcctaacgtatcttttgtatggggaagacctttgtctcagttgggaaagcaatgaggcttctcctaatttggcaagcctttttatgccctaaactcaccaagtcttcccaatctttcctctttctagcttatcctatttctctttaactttctttatacgtatttttatttgtttttagtatgttgtgttttatgtagctttatgaactgtactttttcttctcctcctctttttttcttcatcttttaatagaggaatgtcaattaaaaaaaatctttttcaggggaagatagaaagagtaggatatattagtgtgtttgtttcctagagctgctataacgaagtactacaaaccgaatggcttagaacaacagaacttgattgtattccagttctaaaggctggaagtccaaaatcaaggtgttggtaaaaccatgctccctaaatatattggggaggatctgttccaggtctctcactttctgtcttcttcttctctttgcctctcatagcttcaggtgttccttgacttgtagatgtctgtcttcttccttcctttgtgtctcttcacatcatctttcctctccatctccctgttcagattttccttgtataaagacctcagtcatgttgaattagagcccaccctaatgacataattctatgattacctctgttaaaaccctatttgcaaataacgtcatattctgagacactgagggtttaggaattcaaaatatattttttgaggggcagacatttcaacccacaacaagcagacacaatgaaaaaattaaagcaaactggattttaaaagatagagatgagatcttctaggcccttcaaagagaacttcagtgagacaactagttgaagacagtgtttaggctgtttttctatcatgcaaagaattccttctttgtatttatattttgctgctccatttctctttgacttttcctttcctttctttttcttctctcttctattttttaagagggaatataccctcttggtaaaaaattcaaaaggtctacaaatttaaatttacatattttacaaagtaatgcaatatttattcattttataaatataaaaaaattaatatgtaatcattttagaaaagttttaaaaagcaccgttaaaaaagcacaacaaaaacaataaacttatgcaaaatttcaaacctaacagatcatctctgacaattttaggatttatatttttgttttatatatacaatatagttggatattttatacaattgatattatttcatatacccattttctagtccttttagcactaacaagcatactatgaatattttctcctgtcactaaatatccttcacagcatgagtttttgcagtgttctatgaaataaaataccataaaattttcaaagtcttttgtggtatatttagattgccttcaattttacagtaccatacaaataattctgtgatgaacatatttgtaagtaaatctttatttaactccttgactactttttaattttcttctagaaatgaaactgctatattaaagtgtaaatacattaaaatactctggataaatgtcaaataaattatagccaaacatccatcatggccactaaaaaagtctcaataaactatttattaaatgtctagttttatcacatgtgactttcctagtttgccatctgagacaacctaattaaaaattactcccttacgtattatagctacataagataattagctacaaaatacctatgtctacaaaaatgcttgttttacttcagaaaagtttagacaatatttttttcccacatagtaatctagtgcatgaaaataaaatgtccaaaaaatttatatcagagtttaaatgagtatggtggtttctaaaacagatgcaaatccttttaactttcctcccattgaaaagtgcagtctatctttcctttccttctccctggtagacttgtgaccaattccaccaataaaggatggtggaactgacactgcaacttctaaggtgacactatgcaaaggccacttggtttgcagcttccaccttgctttagtggaatacttggttgtcatgggggaagtgttccttgagccaccatgttggagaggggacctatagacacttggacctatagtcccagctgagctcagccttgcagccacatccactgaggtgtcaaatattaggttggtgaaaacataattgtggtttttgcatttttgaaatttgccatttgatattggaatacattcttaaacaaaagtggttatgttatacatcatgttaatgtacatttatgttttttgacactgaattattactgttaattttgtatttattttagactatagaaatagtgtgagacgaaaagcaaatttgagcgattttcttattcgaattcaaaatgggtcataaagtggcagagacaactcgtaacatcaacaatgcatttggcccaggaactgctaacgaacgtacagtacagtggcggttcaagaagtttcacaaaggagatgagagccttgaagataaggagcacggcagccggccattggaagttgataataatcagttgagaccactcatcgaagctaatctacttacaactactcga

SEQ ID NO: 11284 - DNA, 807 bp, Homo sapiens
gtccccactgtgcctatggctcatctagcctgcttccctcatttttgtgacctgcctggttcccatggggaactgagtttgcaatccggggagcaatactggctgaattcatgttcatattgagagcattctgagtagctggcagggccacacagaccttagcgggaagacagggacaccactttccaggatgatccctgtgaaaactgccatgtttgcactgccctcctctgtgagacatggtttagctcaagtccttgctctggtaactttccaacatgtgactttgggcacatgtgaccttcacctctctgggtttgtttcctcactgcttacgctgcaggcaatgcacatacaatatttgctactttagggctatgagatgcactagttagttgtgtccaagtcattccttttaccaacagaaatgaagagaaagaggagaaaaaaataaataaaaccaaaaacctcatcactcttttctccaaaatgagcatttatcgccctctggtgtccaccacagcgctcagtgcagccaattaagagcggcttgaaggccgggcgcaatggctcatgcctgtaaccccagcattttgcgaggttgaggcgggcagatcacctgaggtcaggagttcaagaccagcctgggcaacatggtgaaaccctgtctgtactaaaaatacaaaaattagccgggtgtggtggcatgagcctgtaatcccagctactcgggaggctgaggcaggagaattgcttgaacccaggaggtggaggttgcagtgagccgagatcaccccactgcgctcc

SEQ ID NO: 11285 - DNA, 1120 bp, Homo sapiens
caggatagtcctcagcaagattccgtgtcattgtgttcacaagcacactagaattgtaacaagtctcagatttgggttaaggagagatgataactgtgtctgtaggatttgcccttcctctgtcttcacaccccattcactctgagacaaaggaggtacttccagggctgctggaccagcagggatgggacctcgcctctgccctgtcttggggtcagcctgcccagcgagtaccctctgctggctccttctggcatcttactgggtcctgccgtgcagggacaagcacacgggccctgaaaagctgggtcgacatgagcaggtagcagggccttcctggacctcctttgtttcagatcccaccatcattcagggcccaatttaaaggcttctcttccgtaaagtctcccatcactccaaccatggaatccctccctcctgtcactcttctttttttttctttaacaaatacagttttatttatttacttatttatttcacaaactcttatgtagctcttcctatctctgggcactgttttaagtgacaagtattaactcatttaaactgtcacaacaggccaggcactgacgcatgcctataatcccagcactttgggaggcagaggtggccagatcaccagaggtcaggacttcgagaccaccctggtcccaggagacctcaacttctccagagttctagcctcttcttaaagggccagagtcatgggaacccagatggggtgagggggtctcctgccacggcctccttacaatgatatgacttggcataaatttggatactacctccaaatacagatttatggtctggcgtgatagctcatccctgtaatcccaacgctttgggaggccgagggaggcagattacctgaggtcaggagttcgagagcagcctggcaacacggtgaaacactgtctctactaaaaatacaaaattagccggatgtggtggcaggtacctgtaatcccagctacacgggaggctgaagcaggagaattccttgaacctgggaggtggaggttgcagtgagttaagatcgcgccaaagcactccagcctgggcaacagagtgagactccatctcaaaaaaaaaaaaacaa

SEQ ID NO: 11286 - DNA, 310 bp, Homo sapiens
tgaaacccattctgtgctatttccccacttccggaaagcatcatggaaatagatgtactcagcagctggcagaatcccacggcatctgccttcactcttggcaaggggagcaccggtcggtaggactcttggttgaatcagtccagctccgtgttcttcctacagtccagctattggcctagctgcctctttcacaggcaggcttcccgctccactccactcaaggctgcctcactcactccagtcactcctccagtctccaggtctggagcggggtgggctgtcttccaccctccgtgggcctccgtct

SEQ ID NO: 11287 - DNA, 2109 bp, Homo sapiens
atctccagctgcaagctgggcccccaggtgtcactggaccccatgaagaatgtcacctgcgagaatgggctaccggccgtggtgagttgtgtgcctgggcaggtcttcagccctgacggaccctcaagattccggaaagcgtacaagccagaggtgaggacggggcacgaggtgtggccacttggcacctggaggggatgggagggtgttgagggagtaggcaggatcccccaggagagtgaggaagggtggcctcagcggagatcaccattgtggctgctttactctgagacctgagcgccctctgcagagaaggaccacctgggggagaagaataccccagcatcagttgtcacaggctgttggtgcgctgtccgcttacccagcaggagcagacgatgaagggttgtgcgacagggaccttgtgtccctgcacagttcccaaaggacagctggaaatgtgacccaactctgaaaagcacatgcagtcagcgacacatttgcaagcatgtttggtttattttgcaacagaaagggtaacaattttaaaaagcttccaccaaggtagaaaacctgccattatcctaagtcatctatacattagtcacattatacttatgtgaaacaccccccctctgtggggggggtgtatgtgtatgggggtgtgtgtatgagtctgtgcgtgtgtatgagtgtgtgtgtatgtgtgcgggggtgagtgtgtgggtgtgtatgagtgggggtgtatgagtgtgggtatgagtgtgggggggtgtatgagtgtgtatgagtgggggtgtgtatgagtttatgggggtgtatgagtgtgtgtgtatgagtgcatgtgtatgagtgtgtggggggtgtatgagtgtgtgtatgagtgtgggggggtgtatgagcgtgtgagtgtgggtgtgtatgagtgggtgtgttgggtgtgtatgattgtgaggggtgtctgggggggatgtgtgcgtgggtgtgtgtgtatgagtgtgggtgtgtgggggtgtatgaatgggggtgtgtgtagggatgtgtatgtgtgtgtatgagtgggggggtatgggagtgtgtggggggtatgtgtgtgggtgtgtctgtaggagtgtgtggggtgtgtttgtgggtgtgtggcggtgtgtgtatgagtgtgtgtgtatgagtgtgtatgtggggtgtgtgtgggtgtgtatgagtgtgggggtgtatgtgggggttgtgtatgtgtgtagggggtgtgtatgaatgtgtgtgggggtctgtgtgggttgtgtgtatgtgtgggtggtgtgtataagtgtgtgggggtgtgagtgtgtagggggtgtgtggggtgggtgtgggtgtgtgtggggtgtgtgtgtgtgtgtgaaagagtgtgagtgtgtgtgtgagtgtattcctgaaatgcagatgaacatcttcccatataaagtaacagccccatttcaatgggccgatttcttttttcttttcttttcttttcttcttcttcttcttttttttttttttgagacagagtttcactcttgttgccaggctggagtgcaatggcatgatcttggttcactgcaacctccggctcctgggttcacgcgattctcctgcctcggcctcccaagtagctgagatgacaggcacccgccaccacgcctcgctaatttttgtatttttagtagagatggggtttcaccatgttggccaggctagtcttgaactcctgacctcagatggcccacccgcctcagcctcccaaagtgctgggattacagatgtgagcccactggccgatttcctagaacaagtaaagtagtccaaccacagcaggcttgacccagcctctgacaaagagcaaatgccctatctgtctcttcttgattcgcttttctttctcctcctcttcctttttcctgtatccatcaaagggtctctgtgatttctgtgttcaggaaacagcgaatatcttgtgagtgggtgggaatagcaactgggaagaggagagggagggataggagaagtgaccgatcatttctcaggggctgatgccctgtgccaggtaaaacctcagtacttagtgcactgtttgctgacgcggcatgagta

SEQ ID NO: 11288 - DNA, 1708 bp, Homo sapiens
aaaacattgatgcatgggtaaaaatatcttttttatatcgcaaataaattgagcttgttatagtcccctctcttcattttcaggaagaggcagaaatccaggcagaacttgaacgtttggaaagagtcagaaatcttcacatacgtgagctgaaaagaataaacaatgaagataattcacagtaagtcattatttgcatttcacagtttcatattattaaaactacccccgccccccatagagcataaacacaatatttccttcttgggttgtctcatcgtacttagaaaagatccaaagtccttcccatggcttggaaggccttttatgatttggtccctggccaccttactgtcctcacttctcttaaacatgtcaagagcattcccttctcagtgggcttttgtgcttaccatttcctctgcctggatgttcctcctctaaacacctaattggcttaattacttatctcactccaaatgttctttagaaaggccattcttagatcatcctatttaaaatagtagtccctagccaggcccagtggtgctcacctatagttccagctactcaagaggctcaggtaggaggattgctttggccaggagttcaaaaccagccttgtcaacatagtgagacccccatttctttaaaaaaaaaaaaagtctctgcttcttcatttcctcttttaatatcgttaccttgctttatattttctggatgttgatcactatctggaattataaatttattttttagttattatttgtctcctccctctagaatgtaagcttcatgagtgcaaggacttggttttgttcttgctgtatccgtaaagcctagaccagtgcctgacatatggcaggcacttaataaatatttgaataccaaagttaatgttatagtagtgaaggagaaattatttcaaccaaaagtatttcagtaagccatgtatcccacattatgcaagaattgggagagaaatggaaaagtacagcttacagtctgtgttcttaatcagttgtcagaatgagtgccatagatagtatatgttgaagcaattgaaagaaaagaaaatatctgtgggcttgtgggagcttcatgaaaaagatagaaattgagcaagacatagaagtagaaattaagcaaggtactacttggatttagttgatgtacaagagaggaaaggtttctgtttacacttcatctttgactggtcatgtagtttaaagcttcatgagttaatataagtatcagaataggaagtggccaatttctgtgtgaaatatgaaaatcttgcttagaaaggtcttcttgtgatgtctatgtatgtataattcataaatacacagatcattccattgtgtgaagagaaagaaatagttatggaataacctaaattatgtcagattaaaattctaatgaaagccaggtgtgctggcttatgcctgtaatccttgcactttgggaggccagtgcaagcaaattgattgagcccaggagtcaaaaacgagcctcagcaaggtggaaaaaccctgtctctacaaaaaatacaaaacttagcagggaatggtggcatgcacctgtagtcgcagctacttggggaactgaggagggaggatcgcctgagcctgcagtgagcctagatcgcagtccagcctgattgacaaagtgagactttgtctccaaaaaaaaaaaaaaaaaaaaa

SEQ ID NO: 11289 - DNA, 118 bp, Homo sapiens
cctcagcctcccaagtagctgggattacaggcatgcgccaccacgcctggctaattttgtatttttagtagagacggggtttctccatgttggtcaggctggtctcgaactcccgacc

SEQ ID NO: 11290 - DNA, 411 bp, Homo sapiens
aaaaaaagtgagactctgtctccaaaaaaaaaaaatctaatagagcatatggtacaaaactaatttaagactaactgttccgaaaattacatttcaaattttgtggatctgacttacattgatgaaaataaaatcaactgttacagctttacagtgtggcttgaaactaagcagaaatttcttatatctacaagtttctcaagaaaaagcttaaattactaaatctagagtcaattgatcttgaaaaaaataataaaatacaatgtattttggccaggcgttgtggctcacacctgaaatcgcagtactttgggaggccgaggcaggcggatcacaaggccaggagtttgagaccagcctggccaatatggtgaaaccccgtctttattaaaaatacaaaaattagctggg

SEQ ID NO: 11291 - DNA, 622 bp, Homo sapiens; identical to SEQ ID NO: 8065

SEQ ID NO: 11292 - DNA, 926 bp, Homo sapiens
tgcagaaaatacaaaaaaaaggaaaaaataaatagaaaatcttcaaagaggcaatctgtttaaatcttcaagaactggaaacagtaaaagtgaacaggtttttattgagcatgtcaataaaatgtttgcataagactttacaagtgctttatttcatgaggtttttattattgatcaaagcaacgaaaatgaacgggaaattcattctcatcaaatctacaacttgggaggaggtccgatgaaatccctggaagctcacattttttataaatgaagagttaattaccggtgggaacaatgagaacctctgtggttcttcctgatgcttggatcctcccagacctctgtttccagtctccttctccacaacctggcctatgcgatgcaagtggtctaactgatctccgcctagggaaggatccttcggcaacttgccgacaagagaagcagcgatgcccgaggcaggtccaaaggagcactgactgcgtgggattgattacactggaggaacaaaaggtcctgtggctacacaagtttgaaaagcagaaggtacaatcattgtatttctggcagacttttcaaagactttaatatatgaatccctcatatgaatctcctggaggattatataataggcagatctcccagccattttcactgaacagttcttagaattggtatccttgaaaaatttcacctaaccactcaatatggtagccactagtcctgggtggctattgagcacctgaaatttgcctagtctgaattaagacacattctaagaataaagcacactgtatttcaaaggcagtacaaaaataaaaaagaatgtaagctgtctcaataataatttttgtattgaatacgtgttgaaatgatgttatttttgatatattgagtgaaataaattgtattgctaaaatgaa

SEQ ID NO: 11293 - DNA, 143 bp, Homo sapiens
cccagcactttgggaggccaaggcaggcggattacgaggtcaagagatggagaccatcctggccaacatggtgaaaccctgtctctactaaaaatacaaaaattagctgggcgtagtggcgcgtgcttgtagtcccagctact

SEQ ID NO: 11294 - DNA, 3698 bp, Homo sapiens
gaatgcctggagcatcctggcactctatactctactgagtgcctctcttcagcccctcaccctgcttccacacacacacacacaaaagcaaaggcactgaccagcttggctgcagggcaagctgccttgcagctggatttgcgactttttttttgtcttaaaatttttactggatcagttgtaggggactgtacttcctaagacactgttctcaccttccaacctcacaaatctcttactagatatttggtttttataacaagggtaaagaatcccaggtccctttagcatgcagagtaatggtgatccctccagagccattggcacttcaaagtggtcccagacctgggagattctggtgggatcttccttaaaaataagcaaaaaacctgagtaccctagatgcaattggccatttgtttcaggcccatcagcgaatcagggctccctcctcaaccctactgctacagttccttagctgtatgcctcagccagatccttggggttagggcatgcactcgctgactgtccccacccatccacttgctctgtagtttctgagctttctccatttcacaagtatggtgcctaacgatctttttctttaggattgatgcagttgtttttcctgaaagctaactcagcatctattcataaaaacccttaatagtatacattaggagttttcccaagctctacagtccctcagacattgcatcctaaacagatttgaggcacacaggccaagactccaccaaggcataaatggtcccccctactcccttttgaccagggtatcacttgtgtctctgcagtaagagttggtcaagttgctctacgcaccttggtgctttccagagatctcactccagactgcccccaagggtggatagagtatcctgacagccagtgtgcactcatgactgccttaattaacattcttctgctattatggagcctgtccagcaataaacagggtctaggaaggtacaagattagcttccagttaaaatcccattttatattggaatgcatgagctacagatgacagcagagatcctgaggtttctagacatgttgattgtctcttttttctaaatgaactccaagtacttagaaaacagtccctgtccatcagccagaaaaggtgaccatcacccctaaagtaatttccaaacttagttcagtgggaagatatgctggtagtgcatattcagtgttgattttcagtgctagtaaccacttttaatgccagaaatatgtaacaatgataatgtaacgtcaaagtggttactaaagattatagccttaacttttttatgtaaaagataaaatccattcctcctcccagtgagcaagcatggcttgcatttctcaaaaatgagaacttccatggcagccaagaaaacgtcttctcagaggaactttcgtttgatgcatctcccaagcccacatgcctcctgtgttccagccacctcttccatttcacatttaaaccagctctccattcccattgagttgccctaacaacattgtctccagtgtcagaaccatattaaggttcgtttctcagattgggagcctgcaacaccatacagccaacattgcctttgccacgccactgccaccatccccaccattgccctatggtgggcagatgaattccagaaaccctcagggagccaggataattaggcaacccatctgaattggccacgtaagtgacaggcacttatctctcgggttcttgcttttgcagactccagggaagtcctgtctagaggtcgatggcagagactcctagtctttcccatgaggggttgataggaatcaaattgggattcctttggctttgggttttgtttttttgttgttgtttttggttttcagtttgttttttggtgtatggggggtgattttgtttctgaataagaaaaagaagaggcaaccatggcccttatgtgggtttatcctttttgagcaatgttttagccacaagtaaggaatcttgaaagtcttttgtccagcaagcagtcttaaaaatgtttttcctaactccttttgcaggtgactaagtacaaaaaaatagttttctcattgtattcaaaatagtgagtaggttccctggataatacacagtggtagttgacatattttctcaaaacacaaccagaaaacccacttccggtatttgtaaatcacctttcaagggaaaaagtgaacacgtattccttgtatttctagtttgattaccaaacctgatgttacaaagaaacctccgttctgtagacagaatttcttttatttttcttcttttactcctcacaatcactttcccagtgccatcaccatctataaggtctcagagcagaggattattcatggtaataagtgggggtgtggtgcagccattccagtaacacccacaagaggacagctgttctgaatgtccccacccacccctctttcagtacaggtgagacattttcagttcatgagctccagaccaaatcccaggccagcccttgcaccaaaagccttttttagaaggcttatcagtctattaggaatgtctcaggaaagatgagccatttctttggggagaaatatatttacagatggaagtgtgtgactgcgtgtctgtgtgtgtgtgtggtgtgtgtgcgcacgtgagtgcgtgtgttcatctatgtgcatttcacttccataaagacccagcccaagctgctgggaaccatgtgttcctgagtattctcagaggttaaacaagtgacaagtgagcttctgaaattagtgtctcagcaagctggctttaggaatgagccccattttatcaagcagagaaaaaaaataacagcagaaaagataaagataaaccaaaaatatataccccccaatggaaaataatgttgattcagcaattcccataggatgtattacatgctctaatttattatattattatttatctgtctttgatctttgcccattgtactcttaaaaagatgttgggatgttgattgcgatttttaaacaactagataatgtataaatcagcagtggaaatcagttttaatgtgtggatgtgtctgattattgttaaatgcctctttttttactttttttttttttagatgtataatgtttcataaaccctggcactggtcacaaagctcagctgtgaaaatgaaatttgtagtatttttaaacatgaatgtcaatttcaagtgtatttgaaatggttcctccaggagagatatttgtgcaccattaggaaaatcttctctgcagaggaagtagccttctttggagaaaatggaaaatgggttctgatatgtgatctcagagtagcccatttcctagggcaccatggaaaacacaaatgtgatctttaagtatacctcttccccagtttggggaggaaaggactcagtttgcaccctttttgtatgtaaaataaaatgtcttacctttcttggctacttctgcttgtttggttggttgattggtttgtctgtttttaatctccctcggctcatttgtaattaacaatctagctaggactaactttgatgcgattcaagactcctgtgaacaaaaataatttggcattcttgtttcattccttggattaaatattgtcttctcctgtgagtcacttcaaaaataaatactgctgtctctcttcgagtgctgaa

SEQ ID NO: 11295 - DNA, 3698 bp, Homo sapiens
gaatgcctggagcatcctggcactctatactctactgagtgcctctcttcagcccctcaccctgcttccacacacacacacacaaaagcaaaggcactgaccagcttggctgcagggcaagctgccttgcagctggatttgcgactttttttttgtcttaaaatttttactggatcagttgtaggggactgtacttcctaagacactgttctcaccttccaacctcacaaatctcttactagatatttggtttttataacaagggtaaagaatcccaggtccctttagcatgcagagtaatggtgatccctccagagccattggcacttcaaagtggtcccagacctgggagattctggtgggatcttccttaaaaataagcaaaaaacctgagtaccctagatgcaattggccatttgtttcaggcccatcagcgaatcagggctccctcctcaaccctactgctacagttccttagctgtatgcctcagccagatccttggggttagggcatgcactcgctgactgtccccacccatccacttgctctgtagtttctgagctttctccatttcacaagtatggtgcctaacgatctttttctttaggattgatgcagttgtttttcctgaaagctaactcagcatctattcataaaaacccttaatagtatacattaggagttttcccaagctctacagtccctcagacattgcatcctaaacagatttgaggcacacaggccaagactccaccaaggcataaatggtcccccctactcccttttgaccagggtatcacttgtgtctctgcagtaagagttggtcaagttgctctacgcaccttggtgctttccagagatctcactccagactgcccccaagggtggatagagtatcctgacagccagtgtgcactcatgactgccttaattaacattcttctgctattatggagcctgtccagcaataaacagggtctaggaaggtacaagattagcttccagttaaaatcccattttatattggaatgcatgagctacagatgacagcagagatcctgaggtttctagacatgttgattgtctcttttttctaaatgaactccaagtacttagaaaacagtccctgtccatcagccagaaaaggtgaccatcacccctaaagtaatttccaaacttagttcagtgggaagatatgctggtagtgcatattcagtgttgattttcagtgctagtaaccacttttaatgccagaaatatgtaacaatgataatgtaacgtcaaagtggttactaaagattatagccttaacttttttatgtaaaagataaaatccattcctcctcccagtgagcaagcatggcttgcatttctcaaaaatgagaacttccatggcagccaagaaaacgtcttctcagaggaactttcgtttgatgcatctcccaagcccacatgcctcctgtgttccagccacctcttccatttcacatttaaaccagctctccattcccattgagttgccctaacaacattgtctccagtgtcagaaccatattaaggttcgtttctcagattgggagcctgcaacaccatacagccaacattgcctttgccacgccactgccaccatccccaccattgccctatggtgggcagatgaattccagaaaccctcagggagccaggataattaggcaacccatctgaattggccacgtaagtgacaggcacttatctctcgggttcttgcttttgcagactccagggaagtcctgtctagaggtcgatggcagagactcctagtctttcccatgaggggttgataggaatcaaattgggattcctttggctttgggttttgtttttttgttgttgtttttggttttcagtttgttttttggtgtatggggggtgattttgtttctgaataagaaaaagaagaggcaaccatggcccttatgtgggtttatcctttttgagcaatgttttagccacaagtaaggaatcttgaaagtcttttgtccagcaagcagtcttaaaaatgtttttcctaactccttttgcaggtgactaagtacaaaaaaatagttttctcattgtattcaaaatagtgagtaggttccctggataatacacagtggtagttgacatattttctcaaaacacaaccagaaaacccacttccggtatttgtaaatcacctttcaagggaaaaagtgaacacgtattccttgtatttctagtttgattaccaaacctgatgttacaaagaaacctccgttctgtagacagaatttcttttatttttcttcttttactcctcacaatcactttcccagtgccatcaccatctataaggtctcagagcagaggattattcatggtaataagtgggggtgtggtgcagccattccagtaacacccacaagaggacagctgttctgaatgtccccacccacccctctttcagtacaggtgagacattttcagttcatgagctccagaccaaatcccaggccagcccttgcaccaaaagccttttttagaaggcttatcagtctattaggaatgtctcaggaaagatgagccatttctttggggagaaatatatttacagatggaagtgtgtgactgcgtgtctgtgtgtgtgtgtggtgtgtgtgcgcacgtgagtgcgtgtgttcatctatgtgcatttcacttccataaagacccagcccaagctgctgggaaccatgtgttcctgagtattctcagaggttaaacaagtgacaagtgagcttctgaaattagtgtctcagcaagctggctttaggaatgagccccattttatcaagcagagaaaaaaaataacagcagaaaagataaagataaaccaaaaatatataccccccaatggaaaataatgttgattcagcaattcccataggatgtattacatgctctaatttattatattattatttatctgtctttgatctttgcccattgtactcttaaaaagatgttgggatgttgattgcgatttttaaacaactagataatgtataaatcagcagtggaaatcagttttaatgtgtggatgtgtctgattattgttaaatgcctctttttttactttttttttttttaaatgtataatgtttcataaaccctggcactggtcacaaagctcagctgtgaaaatgaaatttgtagtatttttaaacatgaatgtcaatttcaagtgtatttgaaatggttcctccaggagagatatttgtgcaccattaggaaaatcttctctgcagaggaagtacccttctttggaaaaaatggaaaatgggttctgatatgtgatctcaaagtagcccatttcctagggcaccatggaaaacacaaatgtgatctttaagtatacctcttccccagtttggggaggaaaggactcagtttgcaccctttttgtatgtaaaataaaatgtcttacctttcttggctacttctgcttgtttggttggttgattggtttgtctgtttttaatctccctcggctcatttgtaattaacaatctagctaggactaactttgatgcgattcaagactcctgtgaacaaaaataatttggcattcttgtttcattccttggattaaatattgtcttctcctgtgagtcacttcaaaaataaatactgctgtctctcttcgagtgctgaa

SEQ ID NO: 11296 - DNA, 119 bp, Homo sapiens
ggtggatcatttgaggtcaggagttcgaggccagcctggccaacatggtgaaaccctgtcactactaaaaatacaaaattagttgggcgtggtggtgcacacctgtaatcccagctact

SEQ ID NO: 11297 - DNA, 4175 bp, Homo sapiens
tactttcagagaaaatctttccaaagaccctcttaagaaagtcctatttctaaaattttcatgtttgattcattcagatatgattaaagcccatcatggtctgtgtaaatgtttctgcattcttagaaactttctccagttttttataactagtccattggatgtaggaatgccaaagagtctaactaaaaagagagggaatcttggctacaatggaatacctaggggtatgggaagtaagtaatagtctttatttccatatgaatattgctggctttacacctgcaataattaggcaagagactcaaagatagttttttcagaaaagttttctttcaaggatctagcaagtctgagctatgcttccaactttactgccctccatcatccggcatctttgactcatccaccaccttctgtccctttcattctcattccccatgtgtcagctccccagaaaggacatatcttgtacaccttgccacagcactcatcacctgcttctggactgcctgagcaagagtgatacttcctgttctaaagacaggagtgaggatgggggatactcagactttgggatgtgccagaactgtggctagtccccaggaagcagaacttggaggactcataaaggagccaatcccacctccatcctaaacaaggccagttcataaaccccatctggcacagcagcagtctcaggaagctaaattggggagtgccctgtatctcactccctaaactggggagtgagagcatcctgatggtcagctcttgggctgtgacagtggtcccctgcaaatgaaaaggggagctgtactgatgtcaggagatgtggctcaccgtcattattagagtcagggcctctcctgcctacttcggtgggtgaggacagagagggggatggagagaatccttaatccttcattggtaacatcctgagatcctcctagagttccagacatcatacttatcatgggatttgtttgccttattttagcctccctgccctctggccagtgagttgaattaaataattgtgccctcagtatcaaggagtagacaatgtagactatttttatgcagccctgaggacccccagtcatgactcttgataaggtgaggcatctgggttgggtgctaaactatgagccttcttcaccctccttccagtaatgcctatttcagccctgcctagcctgcaccatcttgataattaggtaggatgactgcagattgaaatcaagcagctatttcctttggcttttctggcagacactgcccactgcctccagtgcgtgcactgtagatggtgggtggtccctatgggtgggtgctagggggaaaattccacccctgcagtaagcagaagcaggcagaagtctgctggaagctgcaggcctcccgcactgacttgcaatgttccttgtgctccaggtgctgctgtttctttaagaggaaaaggaagaagactgctcagcgccacaagtgaccagtgcctcccaggagtcctcaggccctggggactctgactcaattgtacctgcagctcctgccatttctcattggaagggactcctctttgggggagggtggatatccaaaccaaaaagaagaaaacagatgcccccagaaggggccagtgcgggcagccagggcctagtgggtcattggccatctccgcctgcctaaggctctgagcaggtcccagagctgctgttcctccactgcttgcccatagggctgcctggttgactctccttcccattgtttacagtgaaggtgtcattcacaaaaactcaaggactgctattctccttcttccccttagtttactcctggtttttaccccaccctcaaccctctccagcataaaacctagtgagctaaaggctttgtctgcagaaggagatcaagaggctgggggtaaggccaagaaggtaggaggaaaatggcagacctgggctggagaagaaccttctccgtatcccaggtgtgcctggcagtatggtttcctcttcctctgtgcctgtgcagcattcatcccagctggccttggggttcaggttccttcttccctccctcctgtgaagttacactgtaggacacaagctgtgagcaatctgcagtctactgtccctgtgtgttggcgttcttagcttttttgacaaactcttttctccaggtagtaggacaatgaaaattgttctaagcaaaggaaagaaaactgactttgttgcacttttagtttttttaaaaaaaacaaaaacaaaaacatggcagatgcatattgtgtctggttatattgggggttttacttttacctgttttgagggggatggggccggccaagccattcagagagaacatgggtccagaggacattctcagtggaaagagtttgatctgcagcacccagaagagaagccaaactcggtgtcattctgagtgaacactcaggttggcaagaaaacatacttgaattttcattcatcttctcagcagctgaagaatgtccctaccagagcatcttgacctaatcagcttacagtttgaaaacctagctctccagaacatgagatgagccagccgagccagactgtgaccaggaaacagctcatcccagagaaggagatgcttaacaaaaaaaaattgaaattgtttcccatgctgccagggacttccaactagatagccatgtgacgtcctggtgacttgggggaaaaattagtgatgaaacagccaccaccatattgccattagtggaaaaaaagaggacagtgaacctgccttccacctgccagagggacctcagggtgtggcattatagggccaggaaaagaaaatcggtgtatcctatctgccccaatagctgagctgtagcatttgggctggcctgccttatcagaaaccaagcttatgaagatcttctcccagcaggtccatagcagtaggcttaggatgcagtatatggggccgcatttaaaaggagggaaagattgtttggtgctggaacattccagggaaaaggagactggaatgaaaggtctgaaattatcttctcaattggactccttccagaaaggtggccgtgcctctaagcatgtttttcccagtatgccctaggcctccccccatggtgttttcatatgaggtactactgtgaaggatctggttcctcattcactgtttgacaagtctttcatgtgtggagttactcttctcatgcccaattttcatttgagtttagtggcttaaccaaacaatgactcctcattccagcggtgacagaagagaaagggtcatttacatcaggaaagaggtcttgtatctgggagtagagagctaaccatggagcacagtggctggtgggtgacttagtctgatggtttgtggaccatagaagtcttcacctctggtttgaggtgcagggctgtcttttgtactggagggtgtggggatattttctgatagttgccatttcttgaaaaattcccttgatgtaccttacacagagcagaaataacattaacatggatcagaggtactgggcttcatctgttccattggacccttggctagggaatatcatttcactggcatcaaacctgcttagcttatgaaaagatggtaatatgtcatttctataaatgtttctatatatgaaacataaagtggcagggagatacaatatcacaccccttccccacaaggactgtgaatattgggatttatgtccttgccattacctagtggttacagccctatcactaaaatttacatcgtttctcagttgggatttgggcattgctaacttactgtatagaaagtttaacttttcctcacccctgtatagaaaatgccttgcctctcaagagagggcagagggggggccaggtgcagtggctcacgcctgtaatcccagcagtttgggaggccaaggcaagtggatcatgtgaggtcaagagttcgagaccagcctggccaacatggtgaaaccccgtctctacaaaaaatacaaaaattagctgggcatggtggcatgctcccgtagtcccagctactcgggaggctgaggcaggagaatcacttgagcctgggaggcagaagttgcagtgagccgagatcgcaccactgcactccagcctgggcaacagagtgagactctgtctaaa

SEQ ID NO: 11298 - DNA, 4174 bp, Homo sapiens
tactttcagagaaaatctttccaaagaccctcttaagaaagtcctatttctaaaattttcatgtttgattcattcagatatgattaaagcccatcatggtctgtgtaaatgtttctgcattcttagaaactttctccagttttttataactagtccattggatgtaggaatgccaaagagtctaactaaaaagagagggaatcttggctacaatggaatacctaggggtatgggaagtaagtaatagtctttatttccatatgaatattgctggctttacacctgcaataattaggcaagagactcaaagatagttttttcagaaaagttttctttcaaggatctagcaagtctgagctatgcttccaactttactgccctccatcatccggcatctttgactcatccaccaccttctgtccctttcattctcattccccatgtgtcagctccccagaaaggacatatcttgtacaccttgccacagcactcatcacctgcttctggactgcctgagcaagagtgatacttcctgttctaaagacaggagtgaggatgggggatactcagactttgggatgtgccagaactgtggctagtccccaggaagcagaacttggaggactcataaaggagccaatcccacctccatcctaaacaaggccagttcataaaccccatctggcacagcagcagtctcaggaagctaaattggggagtgccctgtatctcactccctaaactggggagtgagagcatcctgatggtcagctcttgggctgtgacagtggtcccctgcaaatgaaaaggggagctgtactgatgtcaggagatgtggctcaccgtcattattagagtcagggcctctcctgcctacttcggtgggtgaggacagagagggggatggagagaatccttaatccttcattggtaacatcctgagatcctcctagagttccagacatcatacttatcatgggatttgtttgccttattttagcctccctgccctctggccagtgagttgaattaaataattgtgccctcagtatcaaggagtagacaatgtagactatttttatgcagccctgaggacccccagtcatgactcttgataaggtgaggcatctgggttgggtgctaaactatgagccttcttcaccctccttccagtaatgcctatttcagccctgcctagcctgcaccatcttgataattaggtaggatgactgcagattgaaatcaagcagctatttcctttggcttttctggcagacactgcccactgcctccagtgcgtgcactgtagatggtgggtggtccctatgggtgggtgctagggggaaaattccacccctgcagtaagcagaagcaggcagaagtctgctggaagctgcaggcctcccgcactgacttgcaatgttccttgtgctccaggtgctgctgtttctttaagaggaaaaggaagaagactgctcagcgccacaagtgaccagtgcctcccaggagtcctcaggccctggggactctgactcaattgtacctgcagctcctgccatttctcattggaagggactcctctttgggggagggtggatatccaaaccaaaaagaagaaaacagatgcccccagaaggggccagtgcgggcagccagggcctagtgggtcattggccatctccgcctgcctaaggctctgagcaggtcccagagctgctgttcctccactgcttgcccatagggctgcctggttgactctccttcccattgtttacagtgaaggtgtcattcacaaaaactcaaggactgctattctccttcttccccttagtttactcctggtttttaccccaccctcaaccctctccagcataaaacctagtgagctaaaggctttgtctgcagaaggagatcaagaggctgggggtaaggccaagaaggtaggaggaaaatggcagacctgggctggagaagaaccttctccgtatcccaggtgtgcctggcagtatggtttcctcttcctctgtgcctgtgcagcattcatcccagctggccttggggttcaggttccttcttccctccctcctgtgaagttacactgtaggacacaagctgtgagcaatctgcagtctactgtccctgtgtgttggcgttcttagcttttttgacaaactcttttctccaggtagtaggacaatgaaaattgttctaagcaaaggaaagaaaactgactttgttgcacttttagtttttttaaaaaaaacaaaaacaaaaacatggcagatgcatattgtgtctggttatattgggggttttacttttacctgttttgagggggatggggccggccaagccattcagagagaacatgggtccagaggacattctcagtggaaagagtttgatctgcagcacccagaagagaagccaaactcggtgtcattctgagtgaacactcaggttggcaagaaaacatacttgaattttcattcatcttctcagcagctgaagaatgtccctaccagagcatcttgacctaatcagcttacagtttgaaaacctagctctccagaacatgagatgagccagccgagccagactgtgaccaggaaacagctcatcccagagaaggagatgcttaacaaaaaaaaattgaaattgtttcccatgctgccagggacttccaactagatagccatgtgacgtcctggtgacttgggggaaaaattagtgatgaaacagccaccaccatattgccattagtggaaaaaaagaggacagtgaacctgccttccacctgccagagggacctcagggtgtggcattatagggccaggaaaagaaaatcggtgtatcctatctgccccaatagctgagctgtagcatttgggctggcctgccttatcagaaaccaagcttatgaagatcttctcccagcaggtccatagcagtaggcttaggatgcagtatatggggccgcatttaaaaggagggaaagattgtttggtgctggaacattccagggaaaaggagactggaatgaaaggtctgaaattatcttctcaattggactccttccagaaaggtggccgtgcctctaagcatgtttttcccagtatgccctaggcctccccccatggtgttttcatatgaggtactactgtgaaggatctggttcctcattcactgtttgacaagtctttcatgtgtggagttactcttctcatgcccaattttcatttgagtttagtggcttaaccaaacaatgactcctcattccagcggtgacagaagagaaagggtcatttacatcaggaaagaggtcttgtatctgggagtagagagctaaccatggagcacagtggctggtgggtgacttagtctgatggtttgtggaccatagaagtcttcacctctggtttgaggtgcagggctgtcttttgtactggagggtgtggggatattttctgatagttgccatttcttgaaaaattcccttgatgtaccttacacagagcagaaataacattaacatggatcagaggtactgggcttcatctgttccattggaccttggctagggaatatcatttcactggcatcaaacctgcttagcttatgaaaagatggtaatatgtcatttctataaatgtttctatatatgaaacataaagtggcagggagatacaatatcacaccccttccccacaaggactgtgaatattgggatttatgtccttgccattacctagtggttacagccctatcactaaaatttacatcgtttctcagttgggatttgggcattgctaacttactgtatagaaagtttaacttttcctcacccctgtatagaaaatgccttgcctctcaagagagggcagagggggggccaggtgcagtggctcacgcctgtaatcccagcagtttgggaggccaaggcaagtggatcatgtgaggtcaagagttcgagaccagcctggccaacatggtgaaaccccgtctctacaaaaaatacaaaaattagctgggcatggtggcatgctcccgtagtcccagctactcgggaggctgaggcaggagaatcacttgagcctgggaggcagaagttgcagtgagccgagatcgcaccactgcactccagcctgggcaacagagtgagactctgtctaaa

SEQ ID NO: 11299 - DNA, 119 bp, Homo sapiens; identical to SEQ ID NO: 11296

SEQ ID NO: 11300 - DNA, 917 bp, Homo sapiens
gagtacagtagaagaaaagtaagatgggaaggcattggcctactcacctgctttccagtttgggctagaagcagtctcaggtatgagaaaagaacatgaaagggctacagaaaagaactgagaaggaacagtgtgcaggtgagaattcagttttgactctccacgtcagcacgagtttggccaatgatgaaatggcgtaatgagtgaaaatcccttactggcaaaatcaccagaaagtaaattctgtttttaggggtgctgttgtgctgcttagttccgtgtaatcaggctactctcttgggacagccattgtaaacactgccttcctgataaggatatagcaagttgtatagagtcaaagccaatttgtttaacagagccattcagaagaccctgtccattttttgttcttttaatgaagaaagtaacgttttgaatgtagtgtttatgtatagtgactatattggaatataatgtgtaatgctttcaataaacccagaaacttttccaaaatattgtcttggttcataggatgtgatatggaaggatagacaccgtcttaatattttcccccaacagaatgtcaattcttagagtaggggtggggcaggaaagtgggctataaaatcactggctataaaatcaacttttcccctttgaatctcagaattcagtgtcttctagggcagatctctactcatcatctctacctgatatgaccgcacacgtgagtgcctggcacctgctctttctcttgctctgatgaccacttcctttctgcccatctgttttgacctcgcaccattctggagcttttaggaaaggcatttgtaacaaaggcaggacccaggtctcctggttttcatctccgtattgttttcactatattataaaaccttctttacttaaaaaaaaaa

SEQ ID NO: 11301 - DNA, 391 bp, Homo sapiens
tgatctgttctgtctgtgtcctttaatataaatgtttaaatgtttaaatgtcattgggtacttggttataggaggaggcagagctctgagtggaatccatgatggtcctgagaccagagatatgtatttttttcttttcatgtatgtatgtcttatatccccaattgagaattctatcactgtgagtgatacagcttcagaatcctgaaggctaagctattaggtttgaacaatatgaaattgctggtttgcaactatattatatctacaaaagggcaagttcatatagcttaacctaaaaagtaaaaatcaaatgacatcaggtatgtgcaaaaatgtcataaatggctggtgaatatataagaagttcaacattactaagagccaaaaa

SEQ ID NO: 11302 - DNA, 577 bp, Homo sapiens
aggcccctgtcccagctggccctgccccaggtactggggctgatcctgaacctgccctcgcccgtgtcgctggggctgctgtcactgccgctgcgccggcggcactgggtggccctgcgccaggtggacggtgtctactacaacctggactccaagctgcgggcgcccgaggccctgggggatgaggacggagtcaggtgagccccacagaggcgattccaagaccaggggcctgaaaccccactccccagacggaatgcccaggctggccgagcctcagtctccccatttctcccacccagggccttcctggcggctgcgctggcccagggcctgtgcgaggtgctgctggtagtgaccaaggaggtggaggagaagggcagctggctgcggacagactgaccatggctgaccatcggcgcccacagcgcagtccctgcgcatccccctccggctgcgcacactgcatgcctgggaaaggccagcacttcatggaccctggggaggccccgccccctccccacacccctgctccccactgccgctgctgcctcaataaatctgctgatttgctgcc

SEQ ID NO: 11303 - DNA, 282 bp, Homo sapiens
catggctgtaatcccaacactttgggaggctgaggcaggcagatcacgaggtcaggagatcgagaccatcctggctaacacggtgaaaccccgtctctactaaaaatacaaaaaaattagccaggcatggtggcgggcacctgtagtcccagctacttgggaggctgaggcaggagaatggcatgaatccgggaggcagagcttgcagtgagccaacattgtgccactgcactccagcctgggcaacagagcgagactctgtctcaaaaaaaaaaaaaaaaa

SEQ ID NO: 11304 - DNA, 1352 bp, Homo sapiens
atcagtacttcattttttttgtgactgaataatattccgctgtgtagatatatttcacattttgttcaccatttatccgttgatggacacttggtttgtttccaccttttggctattgttaacagtgctgctatgtacattcctgtctaagtctttgtttggaaacctgttttccaattctttgaaatatctaggaatggaattgctgagttttatgataattcaaagtttaccttctagaggaaccccagcaaccgtattgttttacattcttatcagcagtgtttgaggggtccagtttctccatgtcctcaccaacacttattttttattatttcctgattattattattattgccatactagtgggtgtgaaattgtatttagttgtggttttgaattccatttctttaatgactcatgatgttgagtatcttttcatgtgcttattggcgatttacatattttctttggagagatgtctgttcaagcccctttgcctatttttttaattgggtggtttgtctttttgttgttgagctgtaagaattctttatatatctggttactagaccctcatcagatatatgatttgtaaatattctattctgtagattgtcattttattttcttcatagtgtcctttgatacacaaacgttttaaattttgatgaagcccaatttatctctgttttcttttgttgcttgtgctcttgctgtcatagctaaaattttatcaccaaatccaaagtcatgaagatctcccccatattttcttctaagagttttatagttttcgcttgtacatttatattttatatcctctaaattttgtttataatttaaatcattgctatagacttggtccagtgagacctataaacagaggtcttaatttactcagtggttaaattgtcctaaaattgatttctgcaaaattcagaggggagatttttgggatttcatagagaaatctatatccatacagttaaatccttcatgatttcatacacttcacttttttaaagtattaaaacttttttatttgaagaatacgtggggagaagagaaatatatttcagcacttagatatgtagattatttccaaaatagtttaccactcaactagtcacttctgtgtaaatcagttttccctgaagcaagcattgtgttgttcccggctacaagcggtcctcattttgcatggtactgtgggaccataaaaatggccatgcaaagcaatcttaataatcaatggggaaaatgatgattgttccatgacctttaaaattctgctaaaatattaaaactcttaaggtcagttataaatgtagaaaaaaatgcaaaaaaaa

SEQ ID NO: 11305 - DNA, 266 bp, Homo sapiens
ttgttgttttttgagatggagtcttcgctctgtcgcgcaggctggagtgcagtggcgcgatctcagctcactgcaagctccgcctgccgggttcacgccattctcctgcctcagcctcgcgagtagctgggactacaggcgcgcgccaccgcgcccggctaattttttgtatttttagtggagacgaggtttcaccgtggtctcgatctcctgacctcgtgatccgcccgcctcggcctcccagagtgttgggagtacaggcatga

SEQ ID NO: 11306 - DNA, 12586 bp, Homo sapiens
tagtttgataccacagattatccagcatgtttataatgaattatttctcctccttcaatttcagtttgctcatactttgtgacttgcggtcacagtggcattcagctccacacttggtagaaccacaggcacgacaagcatagaaacatcctaaacaatcttcatcgaggcatcgaggtccatcccaataaaaatcaggagaccctggctatcatagaccttagtcttcgctggtatcactcgtctgtctgaaccagcggttgcatttttttaagccttcttttttctcttttaccagtttctggagcaaattcagtttgccttcctggatttgtaaattgtaatgacctcaaaactttagcagttcttccatctgactcaggtttgcttctctggcggtcttcagaatcaacatccacacttccgtgattatctgcgtgcattttggacaaagcttccaaccaggtacaagcggtcttccgaattttgcactcagaaaagtggcatcatctaagtcaattacatgcaaattctggggggctagttttttgtgtatgttaaatgggtcacaacacgacttctgtaaatcctcaaatctgtcaatataaatttttatgtgatgaaagcaaattgtattgttcctagaaagtgtccttccagttctaagttgaagtaaaagcatgtcatttgatgacaattcttgcaacatcttaaaacctgtgtgacaagtatagtaggttttatggcactcatttgtagtacgaagctggactgcaactatcgatccatcattgttgattctagcatattttccttgttttattttgtctagagatctaggtcacgggctgatcacccttagcttgagctctcctccgcctggcttccggcaggatccacgtccacacaggcacacttgcctgcccgttcatttcccagcctgtccccatgctaccactccacttcacttattatatatactctaaatctttttcttctcaacataaaacattctacaatcctgcagcctttttacttttttaagcaggtaggcaaacatgtagttgatactcagtggaagcacagagcagagttaaagagaaggaccccctttcactgaccagttgagttttttttctttcctttattttttaaaacaatttcaaaattgagatggggtttcgccatgttgcccaggctggtctcgaactcctgagctcaggtgatccgcccaccttggctgggattataggcgtgagccaccacacctggccaagttgagtttttaaagtagaaaattttggagaaattaactttattgtgcagtgaatgagaaagaaagaacggttttgaaagaaagtctctgcatttatgtgagactgagatgagtcctataaaggggagtctccccaacccctctgtctcctaaactgcattgggaaactcagattaaatatgttctgtgagcatcactcattcaaatgtctcttccattgtaggatacgggaagaagaaatggctggtgatctttcagcaggtttcttcatggaggaacttaatacataccgtcagaagcagggagtagtacttaaatatcaagaactgcctaattcaggacctccacatgataggaggtaggttgctataaaaaatgatatggcagccataaaaaatgatgagttcatgtcctttgtagggacatggatgaagctggaaaccattattctcagcaaactatcgcaaggacaaaaaaaccaaacaccgcatgttctcactcataggtgagaactgagcaatgagaacacatggacacaggaaggggaacatcacacaccagggactgttgtggggtggggggaggggggagggatagcattaggagatatacctaatgctaaatgacgagttaatgggtgcagcacaccaacatggcacatgtatacatatgtaacctgcacgttgtgcacatgtaccctaaaacttaaagtataataataataaaattaaaaaaaaaagaaaaaagatatgaccttataaatgtaagctgggggaatggcaactctggcacaactttgaggtcaacactttagttttgtgagagtgctcttggcataaagtgggaaccatggtggagccacagttgactccagagagaaaagagggtagaaacctttccatgcttcaacaagacatgctgctttactgtttgaggtgactgcttaaatgctatattgaatgtaggttcaaaccctcaaaggtagtcataggaggtagtgatgactagagtacttgtttttagatagtgcatgagttgtataatattttatgaatattctctttgtaatcaggtttacatttcaagttataatagatggaagagaatttccagaaggtgaaggtagatcaaagaaggaagcaaaaaatgccgcagccaaattagctgttgagatacttaataaggaaaagaaggtgagtgattgccttttttcctaataaatgggaacttgcaaatacattttctgtttctctctgtgagaaaatactttcatacagagtaaagccattcacacgttcccttacattcaagagtttggttaagtcattcaccctatcttcatttctatgaaaccctgagtgagagccacacctaggacaccatgggcaaagctggataatagttatttagagtgtcagcagcagttaaatactctaaagttgaacaaatatggaaaggtgagaagtgttcagtgggaaatgagctgacaggttctgggaggagtcccctccacctaaatgaggaagtacagtaaaaaaggaaaaagagatgaaagtgattgtagggagaataatgtacagtggtcactcactctctgtggggaattggtaccaggactccctgtggatgccaaaattcactgatgctcaagtcctttatataaaatggcatagtatttacatataacctatttacatcttcccatatacagttatgcattgcttaacaaggagaatacattgtgagaaatgcacctttgggcaatttcctcattgggcaaacatcatagaggtacttacacaatcctgaatggtacaaccagtacacacctaggctgtgtagtatagcttattgctcctagactacgaacctatacagcatattattgtactgaatactgtagccaattgtaacacaatgtttagtattcatgtatctaaacatatctaaacacagaaaaagtacggtaaaaatacagtataaaagacaaaaggctgggcttggtggctcacacctgtaatcctagcactttgggaagctgaggcgggtggatcacctgaggtcaggagttgaaaaccagcctggccaacatggtgaaaccctgtctctactaaaaatacaaaaaattagctgggcgtggtggtggacgcctgtaatcccagctacttgggaggctgaggtaggagaattgcttgaacccgggagaaggaggttgcagtgagctgaggttgtgccactgcactccagcctggggatcctatctcaaaaaaaaaaaaaaaaaaaaaaaaaaaaaaaaaaaaaaagacaagcaaaagtacacccatataaggcacataccatgcataaatagagcttgcaggactggaagttgccctgagtttgtcagcaagtgggtggtgaatgaatgtgaaggcctagggcattattgtttaccactgtagactttataaacactgtatacataagcaacattcattttatttaaattttttttcttcaataataaattaaccttagcttactataactcttttactttataaacttcttatttttaacattttcactctttccaaataacacttagcctaaaacacaaacgcggccaggcgcggtggctcatgcctgtaatcctggcactttgggaggccaaggcaggcagatcacctgaggtcaggagtttaagatcagcctggccaacacggtgaaaccctgtctctactgaaaatacaaaaattagccgggcatggtggtgggcacctataattccggctacttgggaggctgaggcaggagaattgcttgaactcaggaagcggaggttgcagtgagccgagatcgtgccactacattccagcctgggcgacaaggcaagactctgtctcaaaaaaaaaaaaaaaaaaacccacaaaaccacaaacaaacacatagtatggctgtacaaaaatattttgtttctttacatgtttattctataagcttttttctatttttaaaattttaaacttttttttttaacttttaaactttgttgtaaaaaattaaatcatggttgggcatagcggttcatgcctgggatgtcgaggagccatgattgtgccactgtactccagcctgggtgacagagtgagaccctgtctcaaaacaaaacaaaacaaaacaaaggctgggtgtggtggttcatgcctgtagtcccagcactttggtaggtcaaggtaggtggatcacttgaatttgggagtttgagattagcctaggcaacatggtgaaaccctgtctgtactaaaaacacaaaacattagccgggcttggtggcatgtgcctgtagttccagctactcaggaggctaggcgggaggatcacgtgcctgagaggtcagggctgcagtgagctgtgatcttctgactgcactccagcctgggcaacagagcaagaccctgtctcaaaaaaaaaaaagaaagaaaaaaaattacaacacaaacacacacatcagcctaggcctacacagcgtcaggatcatctacatcaccatcttccacctccagattttgtccctctggaaagtgttcaggagcaataacatacatggaggtgtcatctcctattgtagcaattccttcttttggattacctaccgaaggacctgcctgaggctgttttacagtttacttttttttttttaagtagaaggagtaacttctaaaataatgataaaaaaagtatagtaaatatataaaccagtaagttacttatcattatccagtattatgtactatacataattgtgtgtgctagacttttttataagactgtagaacagtagatttgtttacagtagtgtcaccacaaatgtgtgagtaatgcattgtgctgtaacccaggagtttaaaattatcctgggcaatatggcgaaatgctgtctgtactaaaaatatgaaatttagccattacagtggctatgacctcattagatgacagtaattttttagctccattataatcttatgggaccactgtcatatatgcagtccattgttgaccaaaatgtgattatgtagtacatgattatcctttagatcatctctagattacttataatatctctaatacaatgtaaatgctatgtaaatagtttttttgttgttgttgttgtcgttttttgagacagggtcgtactctgtcacccaggctggagtgcagtggcatgatcaagggtcactgcagcctcaatctccccaggctcaggtgatcctcccaccttagcatcccaactggctgggactacaggcacgagccaccacacctggccaatttttgcattttttgtagcgatggagtctcactatgttgcccaggctggtcttgaactcctggactcaagcaatctgcccacctcagcctcccaaagtgctaggattgcaggcatgagccaccacacccagctataagtagttgttatgctgtattgtttagggaataatacaagaaaaaaaatctgcatatatttagtacagatgcaaccatcattttttttccaaatatttttgatccatgattggttgaatccagggatttgaaacccgtggatatagcgagccaagtgtttacagagagcaggtaatggagaaccaatatacatgtgactggtatcccggaaaataagaacagagtaaatagtgcagaagaaaatgatctgaagagatttcagcagacaatgtttatgaaataaagaaagacttgactgcagattaaaacaacttaatagatacaggaaaatttagaaccacccagaccaacattgattcttttttttttttttttttgagacagagtctcgctctgttgtccaggctggagtgcagtggcacaatctcactgcaacctccgcctcccatgttcaagcaattctctgcctcagcctcctgagtagctgagattacaggcacccaccaccacggccagctaattttttgatatttttagtagagacagggtttcactatgttggccaggctggtgtttaactcctgacctcgtgatccactcgctttggtctcccaaagtgctgggattacaggtgtgagccaccgcgcccggccccaacattgattcttatgaaagtactgtgctccagagatgaggaaagaattttataagcatctagagagaagaggaaaactatgtaaaatgtaaaaatttttaaaatttcatgctgtgcacagcaacattataaaccaggagatagtgtagcaatgcttataaaatgaaacatgaagtcatttacattttagacaccagagggccattctcagatttggaaaatgttgggaaaatttaggtttcaaggttctttcttgaaaaatctacttaaagatacccttctaaccaatttttttttaactcaagcaaaagtgcaaagtataattattaatgaggtagaaaattgagtcaagaagttagaaaaaacaaaaaacagaatgttttacccccaaaaagcagaagaaagaaaataacaatggttgaaattactataaaagaaataaaaaataaaaaaaaaagatcaataaaaccaaaagctagttttttgacaagattaataaaatagcaaaactcagccgggtgtggtggctcacacctctaatcctagcattttggaaggctgaggcgggcagataacttgagcttaggagttcgagaacagcctgggcaatatggccaaacgctgtctctacaaaaaatacaaaaaaattacccaggcatggtggtgtgtgcctgtagttccaggtgcttgtgaggctgagacaggaagatggtttgaacccaggaggtcaaggctgcagtgagctgaggttgcaccactgcactctagcctgggtgacaaagtgacaccctgtctgaaaaaaattaaaaaaatatcaaaactttggacaagatttttgtcggactaagaaaaaaaggtagagataataatagtagaaatgatgctattatattcatctttttcattaagttatgatccagtatacagctttactgtaatatctcttgccttgttttttgagattagaaagggtataacaagctagaaagtgttatagtactttccaaggacaaacaagaaaaagtgacttctttcctattgttaaaatctatcttcgtcgatttttttctggtagagggagatacgtagtcacacttttgctcaaggtaatataataggaaaatatataacatccaagttgtctttcaaattgctcatttagtaattttattagaagaatgatttttaaaaggttaaatctttgttgtcatttatattaaacaggaattttttttctttgtaggcagttagtcctttattattgacaacaacgaattcttcagaaggattatccatggggaattacataggccttatcaatagaattgcccagaagaaaagactaactgtaaattatgaacagtgtgcatcgggggtgcatgggccagaagggtaagacataatttggcttttctttctgtttcattgtatttaagcaataaagttggtttattttcgtgtctaattttccagaaatatgtgtccttttaagcattctgtatgcaaggttttacatgattgataagtaattggatttataatttgtaattaaaatgcttaattgctgaagccatggaacccatttaccataattgatcaaattagggtaatcctttatttcagagaagtagctggatggtttagtctgtggaacacccaagagagtacagggtgccactgctcgaagaatacagaaatcttttcatcattgaggacatgatggtggtaactgtctgaaaacctctctgccacatgtatagaatcactcttcacccttgtcagatcagggagctctttgtccaggtatttgtccttcaaatttgattaaatgaacaaataccatgtatcagaaggaatgagctttagccctagactatgaggagaccgggatttgagggatctgatgagacagatgaactagagtttcaaagttactgagaacatcaccagtgagctaagatgtgtggaaataggataaagaatggattggaactgaaaaaagcagaaatcaaatgagtatgaggcaattgtttttcaactacaaccaaccagttaaagagaaagaagaaaaaaaatatctacatggcaaatagtttaaatcatcactttaggatacacttctatgaattgactcagctatttacagtcatggcttttgagccaaaaccaggaagagaaaaatgttatagtattcattggaatgaaatagtcaaaagtgaatctgtgagtcaatctcaataattaagagatgattttattttctgtagctcacttttttggtttctttaaattatgctaacattagatacctaaaagaaagaagaaatctgtttgcgggggggggcagtatctgaaaaaaataggagctatagaaatgatccagtcactcaacccagctatttaattcagggtctagcggggaagactcaccctgtttggatgtgtttctctcgatggcttccaacagaaacataaagcaaaaggagttcaaatactggaatcatttttcagtaatagatagtaaccctgtgatataaattgccatgtccattgttttatcccttaaaaatagttattatataattgtccaagtatccttgcctaaccacaaatgtccttacatctaataggaggagagtgtggactttagtatagggaatctgcactgtggggattttctcaaatttttgtgcacatgagcagatggcagacaatggtgaagttagagcagaatccatgctttgctcttcccctacactataacctcatagcttctcctgtggaagcctactttctctgctggctttttccttcccatttgagcacctctgaaaaaattcactggatctctttctttcttttctacctccgtatcttttgacctttggggaattaaaaaaaaaaaatcaccacttagtgcctttgtgccagatctttcagcaaagcaacaaaaaattagaaattgcctggaaaatgcaagctcagatgtcagctgatcctgggtattcagagaaattggtcaggcatgttactgagggtttaaattatgcaagatatgaactataaatctatctaataaattggtgttatcttaagatctctgttaatatgttattttttttgaatcctaagttggatttgctatatttttcatgtttggataagtaccttctatgatttctcctagatttcattataaatgcaaaatgggacagaaagaatatagtattggtacaggttctactaaacaggaagcaaaacaattggccgctaaacttgcatatcttcagatattatcagaagaaacctcagtggtacgtattgcctttggattaaatttttatgttttaaaattccctctgaagttgacttgaggttagactgtgttaacattatgccaagacagccagtgatttagcaaaatgattcctccattctgtgtcgtaccgatgagccatgcaccatggggccatgaggcctcagagggataaaatttctggtggcaactcagggtagtttttaaactccaggctgggctgggtgtggtggctcacacctgtaatcccagcactttgggaggccaaggcaggtggatctcctgagttcaggagtttttttttttttttttttgagatggaatctcgctctgttgcccaggctagagtgcagtggcacgatctcggctcactgcaacctccgcctcccatgttcaagcaattctcctgcctcagcctactgagtagctgggactacaagcgcctgctaccgtgcccggctaattttttatttttagtagagatggggtttcactatgttggccaggctggtcttgaactcctgacctcatgatccacccacctcagcctcctaaagtgctggggtttacaggcttgagccactgcacctggccgaactcaggagtttcagaccacctggccggggcaacacagcaaaaccatgtcgctacaaaaaaaaaaaaaaattagacgggtgtggtggcatgtacctgtagtcctagctactcaggaggctgaggcgggaggattgcctgagcctgggagatggaggttgcagtgagccaagattgtgccactgcacttcaacctagacaacagagccagatcctgtctgaaaagaaagaaacaaacaaaatatctgccctgtgatccagaaaagtaaaataaaaaataaaataaaatccagaccaaacatccaaaaaatgttattaatcttgtaattgtttatggttgtggatttggtaaatgtgttgaaataaatgtgatagtacatagaaactgagcctctgtagagaaataattagttgtatttaagcctactaagggatactttttctttcagaaatctgactacctgtcctctggttcttttgctactacgtgtgagtcccaaagcaactctttagtgaccagcacactgtaagtgtagacaaacaattgagatacttaacatattcatatttctgtctgaaagacagatttttatgtttaaggagaatttagggaaagaaataagtgataaaaacagaattaataaactaatagttacacccttttcttctagcgcttctgaatcatcatctgaaggtgacttctcagcagatacatcagagataaattctaacagtgacagtttaaacagttcttcgttgcttatggtatcgtattagtctcgaagcttcctacttaatcttatttttctgtgcgtttcctcatttaaaaataacttccagtattccaccataatttttatattttttatcttatgcactcttactaaatgataatacctcagtagactttttttttttttttttttgagatggagtctccctctgttgcccaggctggagtgcagtggtgagatcttggctaattaccacctccacctcctggttcaagcgattctcctgcctcagcctcctgagtagctgggattacatgcgcgtgtaccacacctggctaatttttgtacttttagtagagacggggtttcaccatgttgttcaggctggtctcgaactcctgacctcgtgttctgcccacctcggcctccccaagtgctgggattacaggcatgagccaccgcgcccggctcggcagctttttgactttttttaaaattaagttccattccttacccttccacacgtcacttctgtctttcctcactcatccttatattttagtatattcctatgattttgcttttctctcctaccaatgggataatatttaaagattcactaatatagttcgtttctgtttttaaaaattagaattaaacttaaaagtaaacttgaaatcagataattttttaggctggtgcagtggcacatgcctgtagcctgcagcacttgagaggccaaggtaggaggatcgctttagcccaggagtttgagaccagcctaggcaacatagtgagaccctcatcgcaaaaacaaacaaacaaacaaaaaccagacaatttttttgtgcacataagcaggcaatgttgaacttagagcaaaatccatgcttttggtgattagtgttacaagagtattctgttataaagaactacaaatcaataagaaaatggcaagcagctcagtagaaaagtgtacaaaatgtataaacagatattcagagaagagatacccaaatgggcaacaaatattaaaagctgctttactaggaatcaggaaaatttaaatcaaaacaattagatactattttaaactcattagattggcaaaaagttaagtcttacaatactaagtgttgatacagggcttgatgagagtacagacattgatggactaagaaattggtcagagagccatctagatatacaggaggaaggaaaacgggaaaggaagatgactgatttagtcatctgaaactatttctcattttcttttgttatagaatggtctcagaaataatcaaaggaaggcaaaaaggtgagtatcattatgcattgaacatattttgatctgaagttttatttcagacttatttattgttcttaatacttgtagagtattgtacacccttatttgagcagagtttcagaagcagaaagcttgaaatctataaacaaataattttagatgtgtcgagaaatctttgactatgtgcacatgctacactgtaaacataaagcactttgggggtatcgctagagtaattaggttaagggcattattt

SEQ ID NO: 11307 - DNA, 8462 bp, Homo sapiens
tcttccttttttccgcctctcgttcgcttttgtcttacgaggcttccggaacacggcccagaattacagagaaaacacactgcgcacgcgcactctctcgtcaccgctgtgcggcttctgtttggttggccagttcgtcccaatttccgactcacagggctgcggagcagcaactctcacgatatttgctgcgacccgcaggcgctatccgctgccgggttctggcgcgccctttcagttctgcttgctgtcggcaccgctgcgttacccggaaccgccgggccgaacagcatgacgtccgctttggagaactacatcaaccgtatcctcaagctggccgccgcgggcgtgagccggggtcgcggagaggccgcggtcggggatcggtgggaggttgggaggcctggcctcggcgggatcctgggggcgggcgaggagatgagggccccggaacgacccagagttcgccggcggcgcctcgagccttcccgctgctgcgggcccaggggtcctttccattttgcctgcaaaacccaaataaaaacccagtgtgattattccgaacttttctgtcttaaaaaaaatgtacgctcttgattcttacttactatttccctatggcataagtgttaaagtttgtgaataagatgaacagtcgtcctggcggcgacaacagttttgcaaatctttgtacttgttttattcacataatttgctcgttcgaggatagcaaaaagtttaacgatggttcacagactgtttctgtccctttaccacttgaagtcccaacttgttggtagaatgaaaaaaaatggttgctgttgtaatggattatagtgaggagcaagtaacaaccccatgggaagtcttaaaatagactttacaagtgttaccgttttaaagtcttaggacaaaaacactacgttaagctcaggtacaaactgggtgacaaaaattaaataccgaatgcttttaatgatgcgttattggtaccctgtgacactgcttatatagtttctttacttttgaattacagaagcctgtcctggaagacagttttttaacatgctggaaaatcgtccaacatcgattaatttagtactcatccacttttcattttagaaataaacaggcctaagaaacgaaatatcctgcctgaaataatagattggtaaccttcctagtagaaaagtgtcaaaaatccaggatattttgagataagatacaccgatcacatacagaaagaggttttctttttctattttttcccttttttaatcatgtaattatcacaaagacaaaaacagaagctttttttaagtttttttttttttttctttttttgagtcgagggtctcactctgttgcccaggctggagtgcagtggcttgatcatggctcaatgcaaccttgaactcctgagcccaagcaatcctcctgcctctgcctctgcctcctgagtagctgggactataggtcaccaggccagggtaatagagatgggggtatcgctgtgttgcccaagctggtctcacctcaagtgatcctcctgccttggcgtctaagaaacttttaacgtttttatgtagtgaacttagtggctgtgttgaatacttatacctagttgtcatatttattctaaaaattcaaatcattcccttgccagagtctgttttcaatttgcattccctaagaaacactttctttgattcagttatcaggaactgttgccgttattacatcagatgggagaatgattgtggtaagtctttggaattttcattctctgctttcctgtaggtttattggttgcaagttttatgtgaaacctctaatctctaatgcctagacagcacattacacccgtagtgcaattttattataattcagctctttatcactttgctgtcaatccatgttttcctcactaataaacattgtgtgttacctacaaggtttctcggagctagaataatagattctgccctcagagagctcctagtctgtagacctttattaaacttacttttcttcttccatttttatttccttccccattcagcaccacatgaatcagaatttttttgaaattttgcatatgcttagtaactttttaatgatttagatactattaatatctagataacatttaaggcttgtatacaatcttaatattctttgtttttaggttgtgtgacatgtcttctgtaggacacattatgatgattgactctctatatatacacatatatatgtaaaattggcttgttccttgaagttgtttctcccttgctaatttatgtcatataactaagataaaacgttcctatagtgatacttgtatttggaatttgatctgaggaattcatctcaagatttttgggtacttggttatttcttcacttacaattcatactttgaatgctttcaaaagaattttaaggctactgaactttctctattttctaaccttacctagtttctttaaataatttgatcccttatttttccattcttcagttttgcttttgttcattttctttttaagccttgtgattttttttcactgggtccttagtgactattattagtcaaagttctagctttgtcctttactaaatttatatcatgtgccaggtgcatatatgttacattatttaatgtacagtaaaaacttatgaagaataagtacccctgtattctagattaggaaacaagttcagagaaggtgactcactttctcagagtcacaagggtagcaagtgacagaaccaaactgggatttaaatttggtttgacatcaaagccaaggccagttgcctggcttctttcttaaggaagcaatgatgtttgcttaggcacctcacattgtattttttcaaatatggacagtttgacatattttaatttcaacacttcaggaagcctattgctgttaatagatatttgcatttttttttaatttggtgaaaaccttaagtttaaattttcttatttttgttgacagggtagataataaactgagaaattatttttaattttaaagaagaatgaaagtgatataaaaagcatcttaagttctaaagttcagtagttctgtatttctttgacacataatttatttgatgggataatgtgtaaaatgaagtcaagaagttatgaatggatgtttatgataacaaccatttgctaactagttcaataaatactccatattttgtttctcttccaagttacagatttcattctcattttatttcattctcttttttatttcattctcattttatatattttgactttcagaagataaaacagtttaagaacttgagaggtttaaccatcaaaaccaatgttagttgatatttcttcagaaacttgaataccatgtgagttactctgttatgctagacccatgtcttcttttattcaatactaagctttcataaaactctccctgattatttccttcaagttctggttttaattagtatagtcacatttgtatctaccttactgggagaattaaacaataaatccatatgatacacattaaacaatacatgtgagacacacagaacactggtaactagtatgtactcattaggtgttacatgtaactactagttaaatttttagtatatttatgggactgatttgaatctgaaaaatggcaaattatatttacttgtgtataatagtatagaatgttatggtttagtggtctggctcaggagctagccttttgtggttcatctcctggctctgccacttactacccatgtgatcataagacacaccattctgtgcctcagtttcttctttgaaatggggctaattatagtactaaatcaaagggtagagatgagttgagaaaatgtgtacagtgtgtttagcacactgcctagtgctggcatatagcatatagtgatactattacattgctgtagttggtatgtatggttcttccttatttatgtatatttggctatcattttcccttaaatatcctttgtcttagtttatacctttagctgctggtctacataagcttttatgctacttacttggagatagtcacattagtacataggtgtcctttgcaactgctgtcaactctacatatgagtgagatgtgtggtgcaggtccccccaccccagccaaataaccaagaggtaaattgtgtaccctcgaatactgttggttataaaaaaggcattttatttgccgtcgtataggtacttgtattggaatacctggcaactaaaatgactgtgaggttaaatttacactttcaggtaaaccagaatatttctctttttctcctgaatattttctttacagggaacactgaaaggttttgaccagaccattaatttgattttggatgaaagccatgaacgagtattcagctcttcacagggggtagaacaagtggtactaggattatacattgtaagaggtgacaacgtgtaagtaaaatatatctgttaaaattataaatgatactgccttactttatggagaagaggctttccccaaaataccctactgtattgtccatacatagttaatagaatcttgcattcatttctttcgtaaatataccttttcttatgtttgtgtaaaataaggcatatgtatacattttatgtcagcacttctttaggtttcaaccaaagctgtctctctacaaattaaacttttacctgagatttgcccatttttctactagttaagtagcctgggtagagtccagaaagggctctgccttatattaaatacttcattagagagacttcttaaaacgttctttcaaatacccagaattttagaggaacatatttctagagtccaaggccaaagtttgaaaaatgttttgaaatctctgatttgaacaatattaattcatgctcaataacataggtgtatttataaataagtacttactcgttattcattttcttttaattttttagtatcattgacacacttaagatgtccctgtggcctcagtttacttgggacagacagatataaaagttcaagagtaattggccaggcatggtgcctgtaatcccagcactttgggagtctgaggcaagtggatcaggtcaggagttcaagaccggcctcgccaacatggcaaaacactgtctctactaaaaatacaaaaattagccaggcttggtggcgtgcgcctgtagttccagctacttgggaggctgaggtgggagaatcacttgaacccaggaggtagaggttgcagtgagccgagatcaccctactgcactccagcctgggtgacagattgagacaccaattcaaaaaaaaaaaggccgggcacagtggttcaagcatgtaatcccagcactttgggaggtggaggcgggtggatcacttgaggtcaggagttcgagaccaacttggccaatgtggtgaaaccgcgtctttactaaaaatataaaaattagccaggcgtggtggcgcaagcctgtaatcccagctactcgggaggctgagtcaggagaattcgcctgggaggtggaagttgcagtgagccgagatcgcagcactgcattccagcctgggcaacaagagcaaaactccgtgtcaaaaaataaaaaagaaaagtggctaatgtggttcacgtgccgtggctcatgcctataatctcagcactttgagaggccaaggtgggtggatcacctgagcccaggagttcaagaccagcctggccagcatagtgaaaccccgtctctccttaaaatagaaaaattagcctggtgtggtggtgcatgcctgtaatcccagctacttgggaggctgaggcagaagaatttcttgaacctggtagatggaggttgcagtgagccaaggttgcgcctttgcactccagcctgggcaaaaagagtgaaactccatcttgaaaaaaaaaagaaaagtggctgatgtgacagaggaactgaattttaaattttatttaattgtaattaattttaatagttacatgtggccagtattagtatagttatagaggctagaagaatgccaaatcagttttctagtgagtactacactgaatcaaaatatagttggaaagaagcaaaagatacattagcaattttaagctagaacatttaacaaattctaggggactaactgtcccctggaataacttaaaaagtgcaggaataatttactcatttaagttgtttatgttagcatcacctttagatgaataaataatttgatctgtaatcaaaaatcaagagtttataaaatattttagagatgacttttaggtggagttacaaggtgagctgtaagtaatgagagagagacagagcagatagggcccaggtctctggatcagaacaacactgtttatattggagctgtgcatagtaattgattttaaggtttctcctacttaaaacaatttttttttcttgaacttcagtgaaaaaagtcttgtgctagagccagcttctactggcccatgaaagcatattgttatattttaaggaattttacaagctggttaattgatgtcttgttagtagcttgaaattggccgtggtgggagtgtttgcacaatggatattagtaaatgcagcaaatcagtctcccgctttttttccagagagctggtttttaaaaatgtatcagcatttccctgcttaccatagggattttaaatgatactgaatattatcatttaaaatttaagaatatttaagagtggaattgaggcctttagtttgagaaaacttaattcattctgccagagtttcatatttttcatttattagatgatttaagactttatatactttaaagcaaaatttggcaaatcccttattactagtattcgtctttagaatttggccgggcacagtggctcacacctgtagtcccagcactttgggaggctgaggctggcgaattaccagaggtcagaggttcgagacctgcctagccaacgtggtgaaaccctgtctctactaaaaatacaaaaattagccgggtgtggtggcatgcgcctgtaatcccagctactcgggaggctgaagcatgagaatcgcttgaacctggtaagtagaggttggagtgagtcaagatcgtgccactgcactccagcctgtgcaacaagagcgaaactctatctcaaaaaaaaaaaaaaagaatttactctcattaaaaccaaacaaatgtaaacccaaccaatactttttaaaaataatatttcatagacatcttgtggtctgagtgataacattgaatatttccagttagagggctatgggttggttatctagcgtggtattaatgaatttaaagttatagatactatgttagtgttgaacaagaaaaaattttctagcttttaacctgagccaatcacgtcaaaaatgatttgttagataccaaagtacttgttcctactattatttttgtatatgaagaactggctttggatttaactgaaaacttaggaaaacaatctaatcgctgttgtctatatcattgatttaattcatcaaagttactcaaatgattgatatttttacttgctaattattttaggagtgattttgtgaaatttatttttaatacagtcctagaattgaattgaaatatggtttggaagtttgagggttttttactgtgtctatccttgtgtgtctgtttcctttaaagattcatgatacaatcactgtgtacaatgtgtcctttaatattggttcctgtaataatgtgccttcaaattatttcttgagttttgtgacttaaatatgcagttcactgactcacgccaatgttgtttgctttttaccttaattctttttactgtgctctctcagttttattttttggaagaatggtactcagtgctttgatttgattagtaagatttttgaaacacatgtaatttatttcagaaatgtgattgttttaactctgacttttttagtgcagtcattggagaaatcgatgaagaaacagattctgcgcttgatttggggaatattcgagcagaacctttaaattctgtagcacactgaggaaaaactacatacttggacatctgtaaatctttgtacagaaactgattattctgaggatgatatatggagtttttatgagtgtgtcactggattttgactccttattgattcattgtaatatgtaaattaaaatatttctacattttattgaaaaaaaaacctttttttttgcctaaatataagtttggtagcttggtttcttttttttattaaatagtgtgaaaatataatgggcattttgaaaacttttagaaaaaagtagtactttttgatactttagtatttatggaaactagtggaaaagagaaattagtgtgctatataaatcaggcattcaagtaacagtaatacaggatatatgtgttttctttccctgatgtttaggaaaa

SEQ ID NO: 11308 - DNA, 2147 bp, Homo sapiens
ccctagcactgagaggtgtgggtaggtaaaaatgtgtttgcttgagaaaagcaaaaatgctaacaaggttttgatagattggcccaaaattctaacttgaatattaagaatgactaggaatggtagaattgacagagatgattagtaaagtctcttgatgcccaattggttaggtatgaaagtaatatgaacacattaatgttgaattttacagacagtatatttgaaaaaaattgattccatgtagtcttcaatttttaatttttaagaattggagaatttctaatgttaaagttagtttataaatgtgagtaaataaactctaagtttgtattgaagtagtgctagctattattgtcagcaattttccatgattcattatccataaacctgatttcagaagacgtcaactcagttttttaaataattgaaagaaacaatgtaagtagtgtttagatattcaggctagtccataaaatttctgatcaactcatgtataggcccaagtgtgtgtctttgtgatgagaagaacatagaaaaatatttacatccttgtaattgaaacaaatttaaatagtttatttgttttgtttttatgaaagtgcttaaaaatagtagttggcaagctttttctatgaagatccagatagtcttttaggctttgaaggccatgtggtctgtcacagctactcacctctgctattgtggcctacaaataaccatagataatacataaatgaatagtggctgtcttccagtaaaacttcatttataaaaatggaggtgggggttggattgggcttgaaggcatagttgctgacccttggcttaatacaagttcaataagaaaaaatgaacaatttgtataaattctggaatagatccttatagagagtttagaggtgggtttcattcatattttaaaatattttaaacttcatacttattaaacataatagctttttgggggaggaaaatatcttcactcaaatcagccttataaggggagaagcactattctctagaattatttggttgatgttaagggctgtctctgggagaattagagaagttagctagtattggctattcataagtacttgacttgtagtataatgttttataatcaatttattaataaaatgatggaaagtgggtaaggcaaacaggcaaatttagggactgtgaatgaaatattgtagtatatggcattttgaattggtaaagtaattccaaaaattaaataagaatacacattgttcagttgctaagaaaaatgcattctaacagtacaaatgaagtccagagtcagatcttttctcaaaatacttggcatatcaacacattacacataaacaaataaaaaccagtcctgtccctcatgataatgggtttctaatgtgatgtattcttgcaatctgaaacaccttataaagctgtattttcctgattgatgttggaaaaagcattcccaaaatgtgaattattgtttttatgaatagttacagaggatgtgatgacaatatgccagataatctatgtaattctttattcctggatacaagcacatggtggactgttttctcacaaccgattaaaattggatttatttttgcatgagaattgtaagggagccacaaccatgagtagtaacataattaatatacagtgtcaatattttatatttaatgagacatttattctataatcagttcttatttataaagaggcgcaaatcaatttcaacctgtaattacctctgtgctttgtgactcaggcacaatctaaacccagcttaatgaatcaaagagatgtttcttggcaagatattttcattaaagttatttggaaagggcaattaactgcaaaagggacttttttttttttaactgacaagatactatctaaactaatagtttaaaataacattgcttttatgtcaaagcactttggtaacttggcctcacatgctgacagttttggctaaatattacaaatcttgatcccagaagagcaagagagaaagttttactaatatttgcttaaacatcctgtttaacaactttataacatccttcggaatttttaaggtaataatgtgagatataagtatgataaaaacaacttttaaatggtatttaatgcaa

SEQ ID NO: 11309 - DNA, 1916 bp, Homo sapiens
gaggtggaggttgcaggtagctgtgattgtgccaccacactcctgcctgggcaagagagtgagactctcaaaaagaaaacataatagtatcatctaacacatattgtggttagtatattaaaagcactattctaagtgcttacccacattaactcttaatcttcacaaccatcccattggaatattatccatgttatatagaatgtatctgcttataaaactttacaattagattcattatttaagagaaagaagcaaagtcacaatttcactcttgaaaacagtagtaattgtcctagaaacaaacagccctttaccaaatagtttacagtggtcataggcagtaatattttgctgattttgtcctttaccctctggctctgaactcattttatcttattctatggtgagttttcagttgaattccgaccactctcttaccttctgcctgcagaaggacatcacagaacacatcactctgctgctggtgatgaagctgcagaaaagctaacctgaggaaccgggggttcctgtataggattttgggactggcaggagagcacatgttggcaagagtcttaacaaaccttctaggttttcacagatcagactcctgtaggtgagataatacatttcagaggcatggttacatctaatttgttttttgtctttgaaatggcaggggaattttgaaagtgagagataatagtatgagttgaggaaacatcagcccagaaattgtgccaaggatatctcaagaaagaaaattatcatagtggttacatgtgggagctcagagataagcctaggtttgggtcttggctctatttattagcctggctgtataatctcacacaggtgacctaacttctctgagtctcactttcctatccatgaaatagaataatagtacttaccttgtagggttgttttaaagattaaatgagtcagtgaaggtaaagttgcttagcacagtgagtgcctggcacaaaataactaccaagccccaaatggtaactattattatccttcaaccttcctcatttccattaccactgagactcaactgctacaatgctgactacttatattcttcctgagcaccacatcccagctccacaggtataatcttcaagttaacacttttaaggaaacattactgggtataaaattatctctagtaagtcgtatgcgccttttctctgagctcactgtatcacactaaccagcagagggtgcacaataaagaagagaagcctctgactctgcgggaaggtctctcacagaaccaaggacgttgccacccttggctgggtgtacttgaccaaagcgagcctgactgaccctggtagtaggcaaagaatttggcctttacgtttgtatagttaattaccaggctaacaatgcagcaaggatagtaaagcattttacccctcccaaaacaaactgagtattctgacttcaggcttatgtccagctttttagctccgaaacccccccactcactgcacagctgtgttcctttcctggaatgcagttttctatcaggtagcactgagggtccgaacagttcacgtcaaaactatcaggaaagaagaatgaaaaggtaaattaagagaaggcgggcttggctgggcggggtggctcacgcctgtaatcccagcactttgggaggccgaggcgggtggatcacctgaggttaggagtttgagaccagcctggccaacatggtgactccccgtctctacaaaaatacgaaaattagccgggcatggtggcaggcgcctgtaatctcagctactcaggaggctgaggtgggagaatcgcttgaacctgggaggcagaggttgtagatagagccactgcactccagcctgggcgacagagcgagactccgtctcaaaaaaaaaaaaaaa

SEQ ID NO: 11310 - DNA, 3044 bp, Homo sapiens
gtaatcccagcactttgagaggccaaggcaggtggatcacctgaggtcaggagttcaagaccagcctggccaacatggtgaaacccggtctctactaaaaaatacaaaaattagccaggtgtggtggcatatccctgtaatcccagctactcaggagactgagggaggagaatcgcttgaacccagaaggcggagacagcagtgagctgagaccgcgcaattgcacttcagcctgggcgacagcgcaagaatctcaaaaaaaaaaaaaaaaaaaaaaaaaaaatcaaatgagacactatactgtatgtaatccacaaactgtagagtggtatacaatattggttatcataattattttttataaatgaagacattgagccccagagagatgaagttacctgcccatttcttgggcctttatatatcaggatctacttagtaactctgactcctaatcttgggccttgtacattatatatcagggtctactttatgctgaattaacatttccagtgtgaagtgaaggggtggaaataacctatacatttttagttctagcaacaaacaacaaaagtcatcaatttgaagattaaataaattaagcaggccgggcaacgtggctcacgcctgtaatcccagcactttgggaggctgaggcaggtgaatcatgaggtcaggagttcgagaccagtctggccaacatagtgaaaccccatctctactaaaaatacaaaaaattttccgggtgtggtggcacgcacctgtagtcccagctactcgggaggctgaggcggcagaatcgcttgaacgcgggaggtggaggttgcagtgagctgagaccgtgccattgcactccagcctgggagacagagagagactctgtctcaaaaacaaaacaacaacaaaaaagaaaatgggaaaagggtcggacgtggtggctcacgcctataatcccagcactttggcaagcccaggcgggtggatcacttgaggccaggagtttgagaccagcctggccatcatggcaaaacctcatctctactaaaaatacaaaagttagctgggcgtagtggcgcatgcctgtaatctcagctacttgagaaagctaaggcatgagaatcacttgaacccaggaggtggaggttgcaggtagctgtgattgtgccaccacactcctgcctgggcaagagagtgagactctcaaaaagaaaacataatagtatcatctaacacatattgtggttagtatattaaaagcactattctaagtgcttacccacattaactcttaatcttcacaaccatcccattggaatattatccatgttatatagaatgtatctgcttataaaactttacaattagattcattatttaagagaaagaagcaaagtcacaatttcactcttgaaaacagtagtaattgtcctagaaacaaacagccctttaccaaatagtttacagtggtcataggcagtaatattttgctgattttgtcctttaccctctggctctgaactcattttatcttattctatggtgagttttcagttgaattccgaccactctcttaccttctgcctgcagaaggacatcacagaacacatcactctgctgctggtgatgaagctgcagaaaagctaacctgaggaaccgggggttcctgtataggattttgggactggcaggagagcacatgttggcaagagtcttaacaaaccttctaggttttcacagatcagactcctgtaggtgagataatacatttcagaggcatggttacatctaatttgttttttgtctttgaaatggcaggggaattttgaaagtgagagataatagtatgagttgaggaaacatcagcccagaaattgtgccaaggatatctcaagaaagaaaattatcatagtggttacatgtgggagctcagagataagcctaggtttgggtcttggctctatttattagcctggctgtataatctcacacaggtgacctaacttctctgagtctcactttcctatccatgaaatagaataatagtacttaccttgtagggttgttttaaagattaaatgagtcagtgaaggtaaagttgcttagcacagtgagtgcctggcacaaaataactaccaagccccaaatggtaactattattatccttcaaccttcctcatttccattaccactgagactcaactgctacaatgctgactacttatattcttcctgagcaccacatcccagctccacaggtataatcttcaagttaacacttttaaggaaacattactgggtataaaattatctctagtaagtcgtatgcgccttttctctgagctcactgtatcacactaaccagcagagggtgcacaataaagaagagaagcctctgactctgcgggaaggtctctcacagaaccaaggacgttgccacccttggctgggtgtacttgaccaaagcgagcctgactgaccctggtagtaggcaaagaatttggcctttacgtttgtatagttaattaccaggctaacaatgcagcaaggatagtaaagcattttacccctcccaaaacaaactgagtattctgacttcaggcttatgtccagctttttagctccgaaacccccccactcactgcacagctgtgttcctttcctggaatgcagttttctatcaggtagcactgagggtccgaacagttcacgtcaaaactatcaggaaagaagaatgaaaaggtaaattaagagaaggcgggcttggctgggcggggtggctcacgcctgtaatcccagcactttgggaggccgaggcgggtggatcacctgaggttaggagtttgagaccagcctggccaacatggtgactccccgtctctacaaaaatacgaaaattagccgggcatggtggcaggcgcctgtaatctcagctactcaggaggctgaggtgggagaatcgcttgaacctgggaggcagaggttgtagatagagccactgcactccagcctgggcgacagagcgagactccgtctcaaaaaaaaaa

SEQ ID NO: 11311 - DNA, 1917 bp, Homo sapiens
gaggtggaggttgcaggtagctgtgattgtgccaccacactcctgcctgggcaagagagtgagactctcaaaaagaaaacataatagtatcatctaacacatattgtggttagtatattaaaagcactattctaagtgcttacccacattaactcttaatcttcacaaccatcccattggaatattatccatgttatatagaatgtatctgcttataaaactttacaattagattcattatttaagagaaagaagcaaagtcacaatttcactcttgaaaacagtagtaattgtcctagaaacaaacagccctttaccaaatagtttacagtggtcataggcagtaatattttgctgattttgtcctttaccctctggctctgaactcattttatcttattctatggtgagttttcagttgaattccgaccactctcttaccttctgcctgcagaaggacatcacagaacacatcactctgctgctggtgatgaagctgcagaaaagctaacctgaggaaccgggggttcctgtataggattttgggactggcaggagagcacatgttggcaagagtcttaacaaaccttctaggttttcacagatcagactcctgtaggtgagataatacatttcagaggcatggttacatctaatttgttttttgtctttgaaatggcaggggaattttgaaagtgagagataatagtatgagttgaggaaacatcagcccagaaattgtgccaaggatatctcaagaaagaaaattatcatagtggttacatgtgggagctcagagataagcctaggtttgggtcttggctctatttattagcctggctgtataatctcacacaggtgacctaacttctctgagtctcactttcctatccatgaaatagaataatagtacttaccttgtagggttgttttaaagattaaatgagtcagtgaaggtaaagttgcttagcacagtgagtgcctggcacaaaataactaccaagccccaaatggtaactattattatccttcaaccttcctcatttccattaccactgagactcaactgctacaatgctgactacttatattcttcctgagcaccacatcccagctccacaggtataatcttcaagttaacacttttaaggaaacattactgggtataaaattatctctagtaagtcgtatgcgccttttctctgagctcactgtatcacactaaccagcagagggtgcacaataaagaagagaagcctctgactctgcgggaaggtctctcacagaaccaaggacgttgccacccttggctgggtgtacttgaccaaagcgagcctgactgaccctggtagtaggcaaagaatttggcctttacgtttgtatagttaattaccaggctaacaatgcagcaaggatagtaaagcattttacccctcccaaaacaaactgagtattctgacttcaggcttatgtccagctttttagctccgaaacccccccactcactgcacagctgtgttcctttcctggaatgcagttttctatcaggtagcactgagggtccgaacagttcacgtcaaaactatcaggaaagaagaatgaaaaggtaaattaagagaaggcgggcttggctgggcggggtggctcacgcctgtaatcccagcactttgggaggccgaggcgggtggatcacctgaggttaggagtttgagaccagcctggccaacatggtgactccccgtctctacaaaaatacgaaaattagccgggcatggtggcaggcgcctgtaatctcagctactcaggaggctgaggtgggagaatcgcttgaacctgggaggcagaggttgtagatagagccactgcactccagcctgggcgacagagcgagactccgtctcaaaaaaaaaaaaaaaa

SEQ ID NO: 11312 - DNA, 312 bp, Homo sapiens
ctgtatacgtgctgctgtctgccaggaaaaatccctgcttcctcccacttgtttgtctttcagatctcacctaaggggttattccaagaaaagttccctaacccttgtctcccagtctcctcaagtctgtgaaggatgtttcttttttatcctcctaagtctgcctatgacttacccaattatatttttaatatattgcacagttacttgaatgcactggatttttgaatgtcttccccttataagatttccttaagaagaggaacttttgtatgaccacggtagcagtgtttagcatacaacaggcaactg

SEQ ID NO: 11313 - DNA, 761 bp, Homo sapiens
aaccaggcagaagtggcttgagggggtgtgacctacagggttggtctcacagatgtttccctgcagggggatacgtcaggggtctgggctaaaatgcccgatgtttcagaggtcgctctgaaggtgacccaggtgggtggctcttcaccctattcttgtaccccgtttgacgatcacctaatcatcccgttgacccaaatcgatgccagtattttctgcagttttgtctttggtgagtgtgatccatgtcactgtgtggtgaggtttattcacagtcagtctggtctgtaaaatagaacctgcagacagtgaacctgaaaagcatactaggatcatccaggcctccctccccagccttggagctgggaccctcaaagcagggacatagaaggacttggagtgagccacccacaaactccagggtgaaggagagtgtgagttcagaaaagcccccttttggctggttgtggtggctcatgcctggaaacccagcactttgggaagccaaggcaagcagatcacttgaggtcaggacttcgagaccagcctggccaacatggtgaaaccctgtctctactaaaaatacaaaacttagctgggcatggtggcacatgcctgtaatcccagttactcgggaagctgaggtgggagaatcttttggaccccggaggcggagattgcagtgagccgagatcgtgccactgtactctagcctgggcgacagagcaagactccatctcaaaaaaaaaaaaaaaaaagaa

SEQ ID NO: 11314 - DNA, 534 bp, Homo sapiens
catggagataggatgtgagccagagaaggcattaaaatttttccaatagaaaaatactaaagagtaaaaaggtaaagagaggccaggcacggtggctcatgcctgtagtcccagcactttgggaggccaaagtcagaggatcgcttgagcccaggagtttgaggccagccctggcaacatagggagacctcatctctacaaaaaaaaattttattttattttatttattttatttcattttatttatttattattatttttttttgagatggagtcttgctctgttgcccaggctggagtgcagtggtgcagtctcggctcactgcaagctctgcctcccgggttcacgccattctcctgcctcagcctcctgagtagctgggactacaggcgcccgccaccacgcccggctaatggtttttttgtatttttagtagagaccaggtttcaccgtgttagccaggatggtcttgatctcctgacctcgtgatccacccgccttggcctcccaaagcactgggattacaggcatga

SEQ ID NO: 11315 - DNA, 2626 bp, Homo sapiens
aagcttcatctgcccaccaagttttaaattgtaagaactgagcaggagttagacaagctcgagtaagagcatcccagtcagtaggaatcatccaactggaaacagcaacattctttaacagtcccattacaaaaggagaacctggtccatactgattaacagcttgtttaaattctttaaataatttaaaaggaaaaggctcaaatgtaactataatatttccctgttgatctggggggtgtattctaacagggaattgccaagcctctaaatcgccctctcatctagcttgctgaattcctgcctgaatagaactaagagcagttgctcaaggcattgctcagtcactggggcaactacttttcacccaatgtcctctggaaaagaaagatctggagggtctttttcttcaaaataataaggagggggtgcagaagggtagggatgaacctctccctcctttgccgcttgagctttagctggcaaattggcaaataaacctgctctgtaacctcttctgttacttcgttttactctccttcctcctcatcatcagtgtgaaaaagttccaagggagaacgcaccagaccccacatttgtcccactgttaccctgatgcttgtgagctccccttactcaccacagggatggctttaagagtacttgggtgtcctccagcttagttccacattctccgttgctccagtgacccttcaacctggattcgagcccccacaatggacgccacttgccgagaccagttcagtcagggagaccctaacccagcagcactagaggaattaaagacatacacacagaaatatagaggtgtgaggtggaaaatcaggggtctcacagccttcagagctgagagccccaaccggagatttacccatgtatttattaacagcaagccagtcattagcattgtttctatagttattaaattaactaaaagtatcccttatgagaaatgaagggatgggccaagttaaaggaataggttgggctagttaactgcagcaggagcatgtccttaaggcacagatcgctcatgctattgtttgtggtttaagaatgcctttaagcggttttccgccctgggtgggccaggtattccttgccctcattcctgtaaacctgcaaccttccagcgtgggcgttatggccatcatgaaaatgtcacagtgctacagagattttgtttatggccagttttggggccagtttatggccagattttggggggcctgttcccaacaccaggagatgtgttgatttgctccagcaatgaaaccacatctggtacggcagctgcaattggagtcactacttagttaagctcatcataatccactgtcatcctccaagatccatctgtcttctgcacaggccaaatgggagagttgaacagggagatggtgggaatcaccacccctgtgtccttcaagtccttgatagtagcactaatctccacgttccctccagggattcaatattgtttttgatttactacttttctaggtacagccagctctaatggcttccatttggcgtttccaaccataatagcctttaccagtcaaggagccaatgtgggggttctgccagctgctaagtatgtctatgccaattatgcatcctggcacttggaaaatgaccacaggatgagtctggggacccactggacccgctgtaagttggacctgagctaaaactccattaattacctgacctcaggtgatccacccaccttggcctacctgtagggaccagccccacagggtcggtgggtttttctccccgtgtgcggagatgagagagcatagaaataaagacacaagacaaagagaaaagaaaagacacctgggcccaggggaccactaccaccaagacgcagagaccggtagtggtcccaaatgccaggctgcactgatatttattagatacaagacaaaggggcagggtaaggagtgtgagccatctccaatgataggtaaggccacgtgggtcatgtgtccactgaacagggggcccttccctgcctggcagccgaggcagagagagagggagagagagagacagcttacaccattatttctgcatatcagagacttttagtactttcactaattttctactgctatctaaaaggcagagccaggtgtacaggatggaacacgaaagcagactaggagcgtgaccactgaaacacagcatcacagggagacggttaggcccctggataactgcgggcaggcctgactgatgtcaggccctccacaagaggtggaggactagagtcttctctaaactcccccagggaaagggacactccctttcccggtctgctaagtagcaggtatttttccttggcactgacgctactgctagaccacggtctacttggcaacaggcgttttcccagatgctggcgttaccgctagaccaaggagccctctggtggccctgtctgggcataacagaaggctcacactcatgtcttctggtcacttctcactatgtcccctcagctcctatatctgtatggcctggtttttcctaggttatgattatagagtgaggattattataatattggaataaagagtaattgctacaaact

SEQ ID NO: 11316 - DNA, 2626 bp, Homo sapiens
aagcttcatctgcccaccaagttttaaattgtaagaactgagcaggagttagacaagctcgagtaagagcatcccagtcagtaggaatcatccaactggaaacagcaacattctttaacagtcccattacaaaaggagaacctggtccatactgattaacagcttgtttaaattctttaaataatttaaaaggaaaaggctcaaatgtaactataatatttccctgttgatctggggggtgtattctaacagggaattgccaagcctctaaatcgccctctcatctagcttgctgaattcctgcctgaatagaactaagagcagttgctcaaggcattgctcagtcactggggcaactacttttcacccaatgtcctctggaaaagaaagatctggagggtctttttcttcaaaataataaggagggggtgcagaagggtagggatgaacctctccctcctttgccgcttgagctttagctggcaaattggcaaataaacctgctctgtaacctcttctgttacttcgttttactctccttcctcctcatcatcagtgtgaaaaagttccaagggagaacgcaccagaccccacatttgtcccactgttaccctgatgcttctgagctccccttactcaccacagggatggctttaagagtacttgggtgtcctccagcttagttccacattctccgttgctccagtgacccttcaacctggattcgagcccccacaatggacgtcacttgccgagaccagttcagtcagggagaccctaacccagcagcactagaggaattaaagacatacacacagaaatatagaggtgtgaggtggaaaatcaggggtctcacagccttcagagctgagagccccaaccggagatttacccatgtatttattaacagcaagccagtcattagcattgtttctatagttattaaattaactaaaagtatcccttatgagaaatgaagggatgggccaagttaaaggaataggttgggctagttaactgcagcaggagcatgtccttaaggcacagatcgctcatgctattgtttgtggtttaagaatgcctttaagcggttttccgccctgggtgggccaggtattccttgccctcattcctgtaaacctgcaaccttccagcgtgggcgttatggccatcatgaaaatgtcacagtgctacagagattttgtttatggccagttttggggccagtttatggccagattttggggggcctgttcccaacaccaggagatgtgttgatttgctccagcaatgaaaccacatctggtacggcagctgcaattggagtcactacttagttaagctcatcataatccactgtcatcctccaagatccatctgtcttctgcacaggccaaatgggagagttgaacagggagatggtgggaatcaccacccctgtgtccttcaagtccttgatagtagcactaatctccatgttccctccagggattcaatattgtttttgatttactacttttctaggtacagccagctctaatggcttccatttggcgtttccaaccataatagcctttaccagtcaaggagccaatgtgggggttctgccagctgctaagtatgtctatgccaattatgcatcctggcacttggaaaatgaccacaggatgagtctggggacccactggacccgctgtaagttggacctgagctaaaactccattaattacctgacctcaggtgatccacccaccttggcctacctgtagggaccagccccacagggtcggtgggtttttctccccgtgtgcggagatgagagagcatagaaataaagacacaagacaaagagaaaagaaaagacacctgggcccaggggaccactaccaccaagacgcagagaccggtagtggtcccaaatgccaggctgcactgatatttattagatacaagacaaaggggcagggtaaggagtgtgagccatctccaatgataggtaaggccacgtgggtcatgtgtccactgaacagggggcccttccctgcctggcagccgaggcagagagagagggagagagagagacagcttacaccattatttctgcatatcagagacttttagtactttcactaattttctactgctatctaaaaggcagagccaggtgtacaggatggaacacgaaagcagactaggagcgtgaccactgaagcacagcatcacagggagacggttaggcccctggataactgcgggcaggcctgactgatgtcaggccctccacaagaggtggaggactagagtcttctctaaactcccccagggaaagggacactccctttcccggtctgctaagtagcaggtatttttccttggcactgacgctactgctagaccacggtctacttggcaacaggcgttttcccagatgctggcgttaccactagaccaaggagccctctggtggccctgtctgggcataacagaaggctcacactcatgtcttctggtcacttctcactatgtcccctcagctcctatatctgtatggcctggtttttcctaggttatgattatagagtgaggattattataatattggaataaagagtaattgctacaaact

SEQ ID NO: 11317 - DNA, 109 bp, Homo sapiens
cagtgtgggcgttatggccatcatgaacatgtcacagtgctgcagagattttgtttatggccagttttggggccagtttatggccaaattttggggggcttgttcccaa

SEQ ID NO: 11318 - DNA, 2627 bp, Homo sapiens
aagcttcatctgcccaccaagttttaaattgtaagaactgagcaggagttagacaagctcgagtaagagcatcccagtcagtaggaatcatccaactggaaacagcaacattctttaacagtcccattacaaaaggagaacctggtccatactgattaacagcttgtttaaattctttaaataatttaaaaggaaaaggctcaaatgtaactataatatttccctgttgatctggggggtgtattctaacagggaattgccaagcctctaaatcgccctctcatctagcttgctgaattcctgcctgaatagaactaagagcagttgctcaaggcattgctcagtcactggggcaactacttttcacccaatgtcctctggaaaagaaagatctggagggtctttttcttcaaaataataaggagggggtgcagaagggtagggatgaacctctccctcctttgccgcttgagctttagctggcaaattggcaaataaacctgctctgtaacctcttctgttacttcgttttactctccttcctcctcatcatcagtgtgaaaaagttccaagggagaacgcaccagaccccacatttgtcccactgttaccctgatgcttctgagctccccttactcaccacagggatggctttaagagtacttgggtgtcctccagcttagttccacattctccgttgctccagtgacccttcaacctggattcgagcccccacaatggacgtcacttgccgagaccagttcagtcagggagaccctaacccagcagcactagaggaattaaagacatacacacagaaatatagaggtgtgaggtggaaaatcaggggtctcacagccttcagagctgagagccccaaccggagatttacccatgtatttattaacagcaagccagtcattagcattgtttctatagttattaaattaactaaaagtatcccttatgagaaatgaagggatgggccaagttaaaggaataggttgggctagttaactgcagcaggagcatgtccttaaggcacagatcgctcatgctattgtttgtggtttaagaatgcctttaaccggttttccgccctgggtgggccaggtattccttgccctcattcctgtaaacctgcaaccttccagcgtgggcgttatggccatcatgaaaatgtcacagtgctacagaaattttgtttatggccagttttggggccagtttatggccagattttggggggcctgttcccaacaccaggagatgtgttgatttgctccagcaatgaaaccacatctggtacggcagctgcaattggagtcactacgtacttaagctcatcataatccactgtaatcctccaagatcaatctgtcttctgcacaggccaaatgggagagttgaacagggagatggtgggaatccccacccctgtgtccttcaagtccttgatagtaacactaatctccatgttccctccagggattcaatattgtttttgatttactacttttctaggtacagccagctctaatggcttccatttggcgtttccaaccataatagcctttaccagtcaaggagccaatgtgggggttctgccagctgctaagtatgtctatgccaattatgcatcctggcacttggaaaatgaccacaggatgagtctggggacccactggacccgctgtaagttggacctgagctaaaactccattaattacctgacctcaggtgatccacccaccttggcctacctgtagggaccagccccacagggtcggtgggtttttctcccccgtgtgcggagatgagagagcatagaaataaagacacaagacaaagagaaaagaaaagacacctgggcccaggggaccactaccaccaagacgcagagaccggtagtggtcccaaatgccagggtgcactgatatttattagatacaagacaaaggggcagggtaaggagtgtgagccatctccaatgataggtaaggccacgtgggtcatgtgtccactgaacagggggcccttccctgcctggcagccgaggcagagagagagggagagagagagaccgcttacaccattatttctgcatatcagagacttttagtactttcactaattttctactgctatctaaaaggcagagccaggtgtacaggatggaacacgaaagcagactaggagcgtgaccactgaagcacagcatcacagggagacggttaggcccctggataactgcgggcaggcctgactgatgtcaggccctccacaagaggtggaggactagagtcttctctaaactcccccagggaaagggacactccctttcccggtctgctaagtagcaggtatttttccttggcactgacgctactgctagaccacggtctacttggcaacaggcgttttcccagatgctggcgttaccactagaccaaggagccctctggtggccctgtctgggcataacagaaggctcacactcatgtcttctggtcacttctcactatgtcccctcagctcctatatctgtatggcctggtttttcctaggttatgattatagagtgaggattattataatattggaataaagagtaattgctacaaact

SEQ ID NO: 11319 - DNA, 422 bp, Homo sapiens
atagtaccaggttgtccatcaggccctacacaatgcaaaatataactactttgatatacttcaggggctttaccaattccaactatgttaaattgggtgggttgaattggccacatggacggccactgctgtacagaaatgattgaaatgtccactcctgtatctaccaaacctttaaatttctttccctgaatagttatttcacaggtaggacgtttatcagtaacttgctttacccgataagctgctttgccttgtttatttgtgcttccaaatcctcctgttcatgtaacttcactttttcccattcccacatatggcacaatcaggagctgtgctatgcactctcctggctctgctttccagggaacagaagtagatataacaatttgaatttccccattgtaatctgaatcaatgac

SEQ ID NO: 11320 - DNA, 299 bp, Homo sapiens
tttttttttttgtttttttttttttttgaggcggagtctcgctctgtcacccaggctggagtgcagtggtgcgaactcagctcactgcaagctccacctcctgggttcatgccattctcctgcctcagccttccgagtagctgggactacaggcgcctgccaccacgcctggctaattttttgtatttttagtagagatggggtttcactgtgttagccaggatggtcttgatctcctgacctcatgatcctcccacctcagcctcccaaagtgctgggattacagacgtgagccactg

SEQ ID NO: 11321 - DNA, 422 bp, Homo sapiens
atagtaccaggttgtccatcaggccctacacaatgcaaaatataactactttgatatacttcaggggctttaccaattccaactatgttaaattgggtgggttgaattggccacgtggacggccactgctgtacagaaatgattgaaatgtccactcctgtatctaccaaacctttaaatttctttccctgaatagttatttcacaggtaggacgtttatcagtaacttgctttacccgataagctgctttgccttgtttatttgtgcttccaaatcctcctgttcatgtaacttcactttttcccattcccacatatggcacaatcaggagctgtgctatgcactctcctggctctgctttccagggaacagaagtagatataacaatttgaatttccccattgtaatctgaatcaatgac

SEQ ID NO: 11322 - DNA, 260 bp, Homo sapiens
tttttttttttgtttttttttttttttgaggcggagtctcgctctgtcacccaggctggagtgcagtggtgcgaactcagctcactgcaagctccacctcctgggttcatgccattctcctgcctcagccttccgagtagctgggactacaggcgcctgccaccacgcctggctaattttttgtatttttagtagagatggggtttcactgtgttagccaggatggtcttgatctcctgacctcatgatcctcccacctc

SEQ ID NO: 11323 - DNA, 391 bp, Homo sapiens
tttctttctttcgttcgttctctctttctgccgagaccagctcggtcgggggagaccctaacccagcggtgctagaggaattaaagacacacacacagaaatatagaggtgtgaagtgagaaaccaggggtctcacagccttcagagctgagagccccgaacagagatttacccacgtatttattaacagcaagccagtcattagcattgtttctatagatattaaattaactaaaagtatcccttatgggaaacgaagggatgggctgaattaaaggaataggttgggctagttaactgcagcaggagcatgtccttaaggcacagatcactcatgctattgtttgtggcttaagaatgcctttaagcggttttccgccctgggcggggc

SEQ ID NO: 11324 - DNA, 422 bp, Homo sapiens; identical to SEQ ID NO: 11321

SEQ ID NO: 11325 - DNA, 252 bp, Homo sapiens
tctttttttttttgtttttttttttttttgaggcggagtctcgctctgtcacccaggctggagtgcagtggtgcgaactcagctcactgcaagctccacctcctgggttcatgccattctcctgcctcagccttccgagtagctgggactacaggcgcctgccaccacgcctggctaattttttgtatttttagtagagatggggtttcactgtgttagccaggatggtcttgatctcctgacctcatgatc

SEQ ID NO: 11326 - DNA, 1218 bp, Homo sapiens
ggatcacaggtgctcaccaccatgtccggcgaatttttgtattttttgtagagacgaggtttcgccatgttgcccaggctggtctcgaactcctgaccaggtgatccacctgccacggcctcccaaagtggtaggattacaggcatgagccactgcacccggctaatttttgtattttttgtagagatggggttttaccaggttggccaggctgtcccctgatctttaccttagtaagtaacagatttcttcatggatttatcaatttgtagacatcatctgctgatttcttgtcacggctgttgagatcttctccctcccatccacccactgcaccttcaccttccatatcctgaatgagtttatgtcatgagcatagttggtcattggttgtgttttctaaataagatgcaaaatattgttggctgctaaaacaagtaatatgttcagctaggcttttcttgtaccattctatcttcccttaaagctaattaactttgtttttaccatgagcctgattttcttttacctgctgtttgttttttccccacaaagctcccacctctcacacacctatcagttgtattttgcataggtttaaataaattgatctcccctcaccacttccctccaagacccccttatcctcctcctccaaatgggactggttgtgctctgacctggaagtggagctgttgtcccaaaccttcctgtccttgctcccctgtgctgacctctgtttccagtgtggtcatctctttcccttcatgctgtccgagcaaaacttctgggagcttttgaagaaacagatgatttttttcggggggtgggggaagtccttgattgtctgaaaacgagtttatttaccctcatagttagaagtttggtggggtataaaaatctagattgaaaatctgtatttgtaggccgggcgtggtggctcacgcctgtaatcccagcactttgggaggctgaggcgggcggatgacctgagtttgggagtttgagaccagcctcgccaacctggcgaaatcccatctccactaaaaatataaaaatttgccaggcgttttggcatgtgcctgtaatctcagctactcgggaggctaaggcaggagaatggcttgaacctgggaggtggaggttgcagtgagccaagatcgagctactgcctgggcgacagagcgagaatccgtctcaaaaaaaaaaaaaaaaaaa

SEQ ID NO: 11327 - DNA, 388 bp, Homo sapiens
ctcccctccctcctcccgtgagcgtccggccttgtgcatcctgaggccccgcgctgggcgggcctggagggtcgggcccgccaggaactctatttccaaactcctgttgggaggccgcgcgcggggcctcacgcctgtaatctcactgctcagggaggccttggcgggaggatcgcttgaggccaggagttcgagaccagcctggacaacacaccgagacccccatctctacaaaaaattttaaaaaattagccaggagtggtggttgtacctgtaggcccagctactcgagaggatcgcttgagctcggaatgtcgaggctgcagtgagccatgatcccaccactgcactccagcctgggcaacatagcgagaccccatcactgcaa

SEQ ID NO: 11328 - DNA, 294 bp, Homo sapiens
tcttgctaatgttcttatgttatttctgtgataatatttttcctgttttattttgttgggtgttttttcagttctcactctggaatgtcctctaggttcttgcttttcctcctgtttttttaacttttgactttcctttatgaaagatttgtttggctcagcttccaactctggtatggaattttttgtttggatcgtcctgtctgtatttttcaagggctttttgttttaattcagcttgtcattcagcttcctgttctgggtttgtggtgcagtggcttcccccgataatga

SEQ ID NO: 11329 - DNA, 574 bp, Homo sapiens
tatactttaagttttagggatctgtggggttttaagccatggttagtgatagcatgtcatttgaagatgtacccccttaatgacttacaggctcatagtgattttttcttttttgttgttgttatttagattagatttgggtaagtctccgggttggttggaaggactcaggtttatgtggagttttgtcttttagttaatgtgccagtaacagagtttgcccgtttgtgctatgggatactcatgaggtgcccccaaacccagctggctacatatacagcctcttgcttcctcttcactgtctcctgggctcttcctccagctctcctcatgccaaactcgtgactgcatggacacaacatagggaggtgattaggaccatgtattttggaggcaaactgtctgtatttgagtcctgcctaccctggttattagtgaagtggtttgagtaagttacttcaaacttctgtgcacttcagtttcttgatctggaaactgaaggtaatatacctaccttacagggatattgtgaggattaaaatagataatgtaaaatgaaaaaaaaagaaaaaaa

SEQ ID NO: 11330 - DNA, 942 bp, Homo sapiens
tggtgaacctcaactccagtatagtcacttgtttttttcatttttaaaagacgtcatcaaaagagttgtggttataaaaacagttgtaagcacattgcagaaaatttgaaaaacagagaaaaggaaacctataacctcaacatcgtaacgcatgttactgtcattgttttatttccttccagccttcttctttttttattaaaatctcttttgaaaatatgtatcagccagtatcagctggatgcctaccatgtgcctagcgttaagtcttttgggggattgttagaagcaagcaagatccttctaggtccttataatctaggttttgagatagataattattaaaattaatgagagagtattgtcaacattaaaaaacaaaaacccagactccttccagtaaggatttgaagcagttttcaataataggttagaaccaaaagatacacatattctcacacatacacattataatggtataaaggagcaataatcaagtaataggggctaggaaatgtacagtaactgacaaaaagtctgaattgctacttcttattgaaattgagtagaaaccttagctttgagcttcttagcagtagggcagaaagggaaggaaacactgagagtaacgtggggtaaatgatagctgagaaggaaggggatgctggaggcacaggaaggcatgagactgtgtacacgagtttatatgttcttacttgtatagcatgcaattctttgtttgagtgttgcttggtattcatttgttagtgttttattgtgtttggtttcctgatctagaagggaagctgcttgctgcttaattattcatatgctacccaaaacctgtatgttgctttatatatgatgaataattatgttatatataataatcattacactagaaacttatatttatagcataggcagtgagattgaatagct

SEQ ID NO: 11331 - DNA, 292 bp, Homo sapiens
taactttgctcccaacttattttttcctttcatggaagatattggggtcatcctgccactttcattcatacaaaagaactttaactactttgcaacttggttaaacacatacacacaaaatacatattataatttatttgtaatatctgcaaatacttatcagtatttcatttgcttggttctattagagccatcatccttatcccacccaagtaattcaaggcaaaatctccaggccactttttgaattcagcccatattcactacaattgctaagtcttctcctctgtgg

SEQ ID NO: 11332 - DNA, 1288 bp, Homo sapiens
cagaaaccagttctttcaaaacattttacctctgatgtcacccagcttcctgaggctgctccccctttttgcagtttcagcacaacaactgaccagcattccttcctgataagagaccaccaaccacagagtagttctgaccagtctacagaggatgagtagtgtggattttcatgtcctctcttcaccttttgacatcagagggctgaaaactccacccttggatcatgctaacactgccattttttgtgcctgggttccatagagagtcacgaagctctgtgcatgtgcttgtttctcctttcataaatactcatgactcctcctctagcttatttttatttttatttttgagacagagtcttgctctgacgcccaggctggagcgcagtggagcaatcttggctcactgcaaactccgtctcctgggttcaagtgattcttctgcctcagcctcccaagtagctgggattataggtgcccaccaccatgcctggctaatttttataattttagtagagatggggtttcaccatgttggccaggctggtcatctcaaactcctgacctcaggtgatccacccgccttggcctcccaaagtgttgggattagaggcatgagccactgcatccgggcctcctctagcttattgaatatgtatatttggccaccctgttcatcataaattcttgttccccttgcccttcccatgaagtgtgtttctggcttctggctgggggatacactttcccagactgttagaaaggccaccctgcaggctgcaagcctttatatgtataaaaaaagctctctttttcaaatttatgaaactcatgattcttcagttgacagactggatgagaaggaactctccaggtaaggcatatgggattttgaagcttccagatccaggggaaggaacatgccttgaagctagaaaaaccttgctttgtttaagatatagaaagtagggctggaacagagtgaaggagggaaagactttctaggacaaagttagagaggtaagctgaagccaaataatccaggtcagtgtcaatccttgatgatgggataaatacagaaattgaaaataagcttgtaaagccttttaaatgatttgacatagtggtttgatagctcttcaatctaatgaaaaaattggacttatattttgatgtcttatttctggtttcattttttctagtaattcatttttattttatcttataaaagtatccatcagagaggaattgaaaattgaaaagaaaaaaaaaaaaagaaaaacaa

SEQ ID NO: 11333 - DNA, 1297 bp, Homo sapiens
cagaaaccagttctttcaaaacattttacctctgatgtcacccagcttcctgaggctgctccccctttttgcagtttcagcacaacaactgaccagcattccttcctgataagagaccaccaaccacagagtagttctgaccagtctacagaggatgagtagtgtggattttcatgtcctctcttcaccttttgacatcagagggctgaaaactccacccttggatcatgctaacactgccattttttgtgcctgggttccatagagagtcacgaagctctgtgcatgtgcttgtttctcctttcataaatactcatgactcctcctctagcttatttttatttttatttttgagacagagtcttgctctgacgcccaggctggagcgcagtggagcaatcttggctcactgcaaactccgtctcctgggttcaagtgattcttctgcctcagcctcccaagtagctgggattataggtgcccaccaccatgcctggctaatttttatatttatagtagagatggggtttcaccatgtgggccaggctggtcatctcaaactcctgacctcaggtgatccacccgccttggcctcccaaagtgttgggattagaggcgtgagccactgcatccgggcctcctctagcttattgaatatgtatatttggccaccctgttcatcataaattcttgttccccttgcccttcccatgaagtgtgtttctggcttctggctgggggatacactttcccagactgttagaaaggccaccctgcaggctgcaagcctttatatgtataaaaaaagctctctttttcaaatttatgaaactcatgattcttcagttgacagactggatgagaaggaactctccaggtaaggcatatgggattttgaagcttccagatccaggggaaggaacatgccttgaagctagaaaaaccttgctttgtttaagatatagaaagtagggctggaacagagtgaaggagggaaagactttctaggacaaagttagagaggtaagctgaagccaaataatccaggtcagtgtcaatccttgaactagcttatgatgggataaatacagaaattgaaaataagcttgtaaagccttttaaatgatttgacatagtggtttgatagctcttcaatctaatgaaaaaattggacttatattttgatgtcttatttctggtttcattttttctagtaattcatttttattttatcttataaaagtatccatcagagaggaattgaaaattgaaaagaaaaaaaaaaaaagaaaaacaa

SEQ ID NO: 11334 - DNA, 313 bp, Homo sapiens
cttaaagtgtttacccctgtgggtaatggtatcatctgaagggaatataagtgccacatgcttacactaagtgagtaaaagagtatctgtgaagttattcaaaaggatagaagagatgaaattttttttttttttttggcacacaaaccccatgaaggtcagttaatagcagacagttgtgtcattaaataattttggatttagtactattttttagaaaattcctgatttaaattgagaaaaaagaaatagcccagagcagtctgagctatgtgaggtgtgcaacatttataaggcctggagattcatgaat

SEQ ID NO: 11335 - DNA, 313 bp, Homo sapiens; identical to SEQ ID NO: 11334

SEQ ID NO: 11336 - DNA, 38771 bp, Homo sapiens; identical to SEQ ID NO: 7561
  SITE (7892): n equals a,t,g, or c
  SITE (7893): n equals a,t,g, or c
  SITE (7894): n equals a,t,g, or c
  SITE (7895): n equals a,t,g, or c
  SITE (7896): n equals a,t,g, or c
  SITE (7897): n equals a,t,g, or c
  SITE (7898): n equals a,t,g, or c
  SITE (7899): n equals a,t,g, or c
  SITE (7900): n equals a,t,g, or c
  SITE (7901): n equals a,t,g, or c
  SITE (7902): n equals a,t,g, or c
  SITE (7903): n equals a,t,g, or c
  SITE (7904): n equals a,t,g, or c
  SITE (7905): n equals a,t,g, or c
  SITE (7906): n equals a,t,g, or c
  SITE (7907): n equals a,t,g, or c
  SITE (7908): n equals a,t,g, or c
  SITE (7909): n equals a,t,g, or c
  SITE (7910): n equals a,t,g, or c
  SITE (7911): n equals a,t,g, or c
  SITE (7912): n equals a,t,g, or c
  SITE (7913): n equals a,t,g, or c
  SITE (7914): n equals a,t,g, or c
  SITE (7915): n equals a,t,g, or c
  SITE (7916): n equals a,t,g, or c
  SITE (7917): n equals a,t,g, or c
  SITE (7918): n equals a,t,g, or c
  SITE (7919): n equals a,t,g, or c
  SITE (7920): n equals a,t,g, or c
  SITE (7921): n equals a,t,g, or c
  SITE (7922): n equals a,t,g, or c
  SITE (7923): n equals a,t,g, or c
  SITE (7924): n equals a,t,g, or c
  SITE (7925): n equals a,t,g, or c
  SITE (7926): n equals a,t,g, or c
  SITE (7927): n equals a,t,g, or c
  SITE (7928): n equals a,t,g, or c
  SITE (7929): n equals a,t,g, or c
  SITE (7930): n equals a,t,g, or c
  SITE (7931): n equals a,t,g, or c
  SITE (7932): n equals a,t,g, or c
  SITE (7933): n equals a,t,g, or c
  SITE (7934): n equals a,t,g, or c
  SITE (7935): n equals a,t,g, or c
  SITE (7936): n equals a,t,g, or c
  SITE (7937): n equals a,t,g, or c
  SITE (7938): n equals a,t,g, or c
  SITE (7939): n equals a,t,g, or c
  SITE (7940): n equals a,t,g, or c
  SITE (7941): n equals a,t,g, or c
  SITE (7942): n equals a,t,g, or c
  SITE (7943): n equals a,t,g, or c
  SITE (7944): n equals a,t,g, or c
  SITE (7945): n equals a,t,g, or c
  SITE (7946): n equals a,t,g, or c
  SITE (7947): n equals a,t,g, or c
  SITE (7948): n equals a,t,g, or c
  SITE (7949): n equals a,t,g, or c
  SITE (7950): n equals a,t,g, or c
  SITE (7951): n equals a,t,g, or c
  SITE (7952): n equals a,t,g, or c
  SITE (7953): n equals a,t,g, or c
  SITE (7954): n equals a,t,g, or c
  SITE (7955): n equals a,t,g, or c
  SITE (7956): n equals a,t,g, or c
  SITE (7957): n equals a,t,g, or c
  SITE (7958): n equals a,t,g, or c
  SITE (7959): n equals a,t,g, or c
  SITE (7960): n equals a,t,g, or c
  SITE (7961): n equals a,t,g, or c
  SITE (7962): n equals a,t,g, or c
  SITE (7963): n equals a,t,g, or c
  SITE (7964): n equals a,t,g, or c
  SITE (7965): n equals a,t,g, or c
  SITE (7966): n equals a,t,g, or c
  SITE (7967): n equals a,t,g, or c
  SITE (7968): n equals a,t,g, or c
  SITE (7969): n equals a,t,g, or c
  SITE (7970): n equals a,t,g, or c
  SITE (7971): n equals a,t,g, or c
  SITE (7972): n equals a,t,g, or c
  SITE (7973): n equals a,t,g, or c
  SITE (7974): n equals a,t,g, or c
  SITE (7975): n equals a,t,g, or c
  SITE (7976): n equals a,t,g, or c
  SITE (7977): n equals a,t,g, or c
  SITE (7978): n equals a,t,g, or c
  SITE (7979): n equals a,t,g, or c
  SITE (7980): n equals a,t,g, or c
  SITE (7981): n equals a,t,g, or c
  SITE (7982): n equals a,t,g, or c
  SITE (7983): n equals a,t,g, or c
  SITE (7984): n equals a,t,g, or c
  SITE (7985): n equals a,t,g, or c
  SITE (7986): n equals a,t,g, or c
  SITE (7987): n equals a,t,g, or c
  SITE (7988): n equals a,t,g, or c
  SITE (7989): n equals a,t,g, or c
  SITE (7990): n equals a,t,g, or c
  SITE (7991): n equals a,t,g, or c
  SITE (7992): n equals a,t,g, or c
  SITE (7993): n equals a,t,g, or c
  SITE (7994): n equals a,t,g, or c
  SITE (7995): n equals a,t,g, or c
  SITE (7996): n equals a,t,g, or c
  SITE (7997): n equals a,t,g, or c
  SITE (7998): n equals a,t,g, or c
  SITE (7999): n equals a,t,g, or c
  SITE (8000): n equals a,t,g, or c
  SITE (8001): n equals a,t,g, or c
  SITE (8002): n equals a,t,g, or c
  SITE (8003): n equals a,t,g, or c
  SITE (8004): n equals a,t,g, or c
  SITE (8005): n equals a,t,g, or c
  SITE (8006): n equals a,t,g, or c
  SITE (8007): n equals a,t,g, or c
  SITE (8008): n equals a,t,g, or c
  SITE (8009): n equals a,t,g, or c
  SITE (8010): n equals a,t,g, or c
  SITE (8011): n equals a,t,g, or c
  SITE (8012): n equals a,t,g, or c
  SITE (8013): n equals a,t,g, or c
  SITE (8014): n equals a,t,g, or c
  SITE (8015): n equals a,t,g, or c
  SITE (8016): n equals a,t,g, or c
  SITE (8017): n equals a,t,g, or c
  SITE (8018): n equals a,t,g, or c
  SITE (8019): n equals a,t,g, or c
  SITE (8020): n equals a,t,g, or c
  SITE (8021): n equals a,t,g, or c
  SITE (8022): n equals a,t,g, or c
  SITE (8023): n equals a,t,g, or c
  SITE (8024): n equals a,t,g, or c
  SITE (8025): n equals a,t,g, or c
  SITE (8026): n equals a,t,g, or c
  SITE (8027): n equals a,t,g, or c
  SITE (8028): n equals a,t,g, or c
  SITE (8029): n equals a,t,g, or c
  SITE (8030): n equals a,t,g, or c
  SITE (8031): n equals a,t,g, or c
  SITE (8032): n equals a,t,g, or c
  SITE (8033): n equals a,t,g, or c
  SITE (8034): n equals a,t,g, or c
  SITE (8035): n equals a,t,g, or c
  SITE (8036): n equals a,t,g, or c
  SITE (8037): n equals a,t,g, or c
  SITE (8038): n equals a,t,g, or c
  SITE (8039): n equals a,t,g, or c
  SITE (8040): n equals a,t,g, or c
  SITE (8041): n equals a,t,g, or c
  SITE (8042): n equals a,t,g, or c
  SITE (8043): n equals a,t,g, or c
  SITE (8044): n equals a,t,g, or c
  SITE (8045): n equals a,t,g, or c
  SITE (8046): n equals a,t,g, or c
  SITE (8047): n equals a,t,g, or c
  SITE (8048): n equals a,t,g, or c
  SITE (8049): n equals a,t,g, or c
  SITE (8050): n equals a,t,g, or c
  SITE (8051): n equals a,t,g, or c
  SITE (8052): n equals a,t,g, or c
  SITE (8053): n equals a,t,g, or c
  SITE (8054): n equals a,t,g, or c
  SITE (8055): n equals a,t,g, or c
  SITE (8056): n equals a,t,g, or c
  SITE (8057): n equals a,t,g, or c
  SITE (8058): n equals a,t,g, or c
  SITE (8059): n equals a,t,g, or c
  SITE (8060): n equals a,t,g, or c
  SITE (8061): n equals a,t,g, or c
  SITE (8062): n equals a,t,g, or c
  SITE (8063): n equals a,t,g, or c
  SITE (8064): n equals a,t,g, or c
  SITE (8065): n equals a,t,g, or c
  SITE (8066): n equals a,t,g, or c
  SITE (8067): n equals a,t,g, or c
  SITE (8068): n equals a,t,g, or c
  SITE (8069): n equals a,t,g, or c
  SITE (8070): n equals a,t,g, or c
  SITE (8071): n equals a,t,g, or c
  SITE (8072): n equals a,t,g, or c
  SITE (8073): n equals a,t,g, or c
  SITE (8074): n equals a,t,g, or c
  SITE (8075): n equals a,t,g, or c
  SITE (8076): n equals a,t,g, or c
  SITE (8077): n equals a,t,g, or c
  SITE (8078): n equals a,t,g, or c
  SITE (8079): n equals a,t,g, or c
  SITE (8080): n equals a,t,g, or c
  SITE (8081): n equals a,t,g, or c
  SITE (8082): n equals a,t,g, or c
  SITE (8083): n equals a,t,g, or c
  SITE (8084): n equals a,t,g, or c
  SITE (8085): n equals a,t,g, or c
  SITE (8086): n equals a,t,g, or c
  SITE (8087): n equals a,t,g, or c
  SITE (8088): n equals a,t,g, or c
  SITE (8089): n equals a,t,g, or c
  SITE (8090): n equals a,t,g, or c
  SITE (8091): n equals a,t,g, or c
  SITE (8092): n equals a,t,g, or c
  SITE (8093): n equals a,t,g, or c
  SITE (8094): n equals a,t,g, or c
  SITE (8095): n equals a,t,g, or c
  SITE (8096): n equals a,t,g, or c
  SITE (8097): n equals a,t,g, or c
  SITE (8098): n equals a,t,g, or c
  SITE (8099): n equals a,t,g, or c
  SITE (8100): n equals a,t,g, or c
  SITE (8101): n equals a,t,g, or c
  SITE (8102): n equals a,t,g, or c
  SITE (8103): n equals a,t,g, or c
  SITE (8104): n equals a,t,g, or c
  SITE (8105): n equals a,t,g, or c
  SITE (8106): n equals a,t,g, or c
  SITE (8107): n equals a,t,g, or c
  SITE (8108): n equals a,t,g, or c
  SITE (8109): n equals a,t,g, or c
  SITE (8110): n equals a,t,g, or c
  SITE (8111): n equals a,t,g, or c
  SITE (8112): n equals a,t,g, or c
  SITE (8113): n equals a,t,g, or c
  SITE (8114): n equals a,t,g, or c
  SITE (8115): n equals a,t,g, or c
  SITE (8116): n equals a,t,g, or c
  SITE (8117): n equals a,t,g, or c
  SITE (8118): n equals a,t,g, or c
  SITE (8119): n equals a,t,g, or c
  SITE (8120): n equals a,t,g, or c
  SITE (8121): n equals a,t,g, or c
  SITE (8122): n equals a,t,g, or c
  SITE (8123): n equals a,t,g, or c
  SITE (8124): n equals a,t,g, or c
  SITE (8125): n equals a,t,g, or c
  SITE (8126): n equals a,t,g, or c
  SITE (8127): n equals a,t,g, or c
  SITE (8128): n equals a,t,g, or c
  SITE (8129): n equals a,t,g, or c
  SITE (8130): n equals a,t,g, or c
  SITE (8131): n equals a,t,g, or c
  SITE (8132): n equals a,t,g, or c
  SITE (8133): n equals a,t,g, or c
  SITE (8134): n equals a,t,g, or c
  SITE (8135): n equals a,t,g, or c
  SITE (8136): n equals a,t,g, or c
  SITE (8137): n equals a,t,g, or c
  SITE (8138): n equals a,t,g, or c
  SITE (8139): n equals a,t,g, or c
  SITE (8140): n equals a,t,g, or c
  SITE (8141): n equals a,t,g, or c
  SITE (8142): n equals a,t,g, or c
  SITE (8143): n equals a,t,g, or c
  SITE (8144): n equals a,t,g, or c
  SITE (8145): n equals a,t,g, or c
  SITE (8146): n equals a,t,g, or c
  SITE (8147): n equals a,t,g, or c
  SITE (8148): n equals a,t,g, or c
  SITE (8149): n equals a,t,g, or c
  SITE (8150): n equals a,t,g, or c
  SITE (8151): n equals a,t,g, or c
  SITE (8152): n equals a,t,g, or c
  SITE (8153): n equals a,t,g, or c
  SITE (8154): n equals a,t,g, or c
  SITE (8155): n equals a,t,g, or c
  SITE (8156): n equals a,t,g, or c
  SITE (8157): n equals a,t,g, or c
  SITE (8158): n equals a,t,g, or c
  SITE (8159): n equals a,t,g, or c
  SITE (8160): n equals a,t,g, or c
  SITE (8161): n equals a,t,g, or c
  SITE (8162): n equals a,t,g, or c
  SITE (8163): n equals a,t,g, or c
  SITE (8164): n equals a,t,g, or c
  SITE (8165): n equals a,t,g, or c
  SITE (8166): n equals a,t,g, or c
  SITE (8167): n equals a,t,g, or c
  SITE (8168): n equals a,t,g, or c
  SITE (8169): n equals a,t,g, or c
  SITE (8170): n equals a,t,g, or c
  SITE (8171): n equals a,t,g, or c
  SITE (8172): n equals a,t,g, or c
  SITE (8173): n equals a,t,g, or c
  SITE (8174): n equals a,t,g, or c
  SITE (8175): n equals a,t,g, or c
  SITE (8176): n equals a,t,g, or c
  SITE (8177): n equals a,t,g, or c
  SITE (8178): n equals a,t,g, or c
  SITE (8179): n equals a,t,g, or c
  SITE (8180): n equals a,t,g, or c
  SITE (8181): n equals a,t,g, or c
  SITE (8182): n equals a,t,g, or c
  SITE (8183): n equals a,t,g, or c
  SITE (8184): n equals a,t,g, or c
  SITE (8185): n equals a,t,g, or c
  SITE (8186): n equals a,t,g, or c
  SITE (8187): n equals a,t,g, or c
  SITE (8188): n equals a,t,g, or c
  SITE (8189): n equals a,t,g, or c
  SITE (8190): n equals a,t,g, or c
  SITE (8191): n equals a,t,g, or c
  SITE (8192): n equals a,t,g, or c
  SITE (8193): n equals a,t,g, or c
  SITE (8194): n equals a,t,g, or c
  SITE (8195): n equals a,t,g, or c
  SITE (8196): n equals a,t,g, or c
  SITE (8197): n equals a,t,g, or c
  SITE (8198): n equals a,t,g, or c
  SITE (8199): n equals a,t,g, or c
  SITE (8200): n equals a,t,g, or c
  SITE (8201): n equals a,t,g, or c
  SITE (8202): n equals a,t,g, or c
  SITE (8203): n equals a,t,g, or c
  SITE (8204): n equals a,t,g, or c
  SITE (8205): n equals a,t,g, or c
  SITE (8206): n equals a,t,g, or c
  SITE (8207): n equals a,t,g, or c
  SITE (8208): n equals a,t,g, or c
  SITE (8209): n equals a,t,g, or c
  SITE (8210): n equals a,t,g, or c
  SITE (8211): n equals a,t,g, or c
  SITE (8212): n equals a,t,g, or c
  SITE (8213): n equals a,t,g, or c
  SITE (8214): n equals a,t,g, or c
  SITE (8215): n equals a,t,g, or c
  SITE (8216): n equals a,t,g, or c
  SITE (8217): n equals a,t,g, or c
  SITE (8218): n equals a,t,g, or c
  SITE (8219): n equals a,t,g, or c
  SITE (8220): n equals a,t,g, or c
  SITE (8221): n equals a,t,g, or c
  SITE (8222): n equals a,t,g, or c
  SITE (8223): n equals a,t,g, or c
  SITE (8224): n equals a,t,g, or c
  SITE (8225): n equals a,t,g, or c
  SITE (8226): n equals a,t,g, or c
  SITE (8227): n equals a,t,g, or c
  SITE (8228): n equals a,t,g, or c
  SITE (8229): n equals a,t,g, or c
  SITE (8230): n equals a,t,g, or c
  SITE (8231): n equals a,t,g, or c
  SITE (8232): n equals a,t,g, or c
  SITE (8233): n equals a,t,g, or c
  SITE (8234): n equals a,t,g, or c
  SITE (8235): n equals a,t,g, or c
  SITE (8236): n equals a,t,g, or c
  SITE (8237): n equals a,t,g, or c
  SITE (8238): n equals a,t,g, or c
  SITE (8239): n equals a,t,g, or c
  SITE (8240): n equals a,t,g, or c
  SITE (8241): n equals a,t,g, or c
  SITE (8242): n equals a,t,g, or c
  SITE (8243): n equals a,t,g, or c
  SITE (8244): n equals a,t,g, or c
  SITE (8245): n equals a,t,g, or c
  SITE (8246): n equals a,t,g, or c
  SITE (8247): n equals a,t,g, or c
  SITE (8248): n equals a,t,g, or c
  SITE (8249): n equals a,t,g, or c
  SITE (8250): n equals a,t,g, or c
  SITE (8251): n equals a,t,g, or c
  SITE (8252): n equals a,t,g, or c
  SITE (8253): n equals a,t,g, or c
  SITE (8254): n equals a,t,g, or c
  SITE (8255): n equals a,t,g, or c
  SITE (8256): n equals a,t,g, or c
  SITE (8257): n equals a,t,g, or c
  SITE (8258): n equals a,t,g, or c
  SITE (8259): n equals a,t,g, or c
  SITE (8260): n equals a,t,g, or c
  SITE (8261): n equals a,t,g, or c
  SITE (8262): n equals a,t,g, or c
  SITE (8263): n equals a,t,g, or c
  SITE (8264): n equals a,t,g, or c
  SITE (8265): n equals a,t,g, or c
  SITE (8266): n equals a,t,g, or c
  SITE (8267): n equals a,t,g, or c
  SITE (8268): n equals a,t,g, or c
  SITE (8269): n equals a,t,g, or c
  SITE (8270): n equals a,t,g, or c
  SITE (8271): n equals a,t,g, or c
  SITE (8272): n equals a,t,g, or c
  SITE (8273): n equals a,t,g, or c
  SITE (8274): n equals a,t,g, or c
  SITE (8275): n equals a,t,g, or c
  SITE (8276): n equals a,t,g, or c
  SITE (8277): n equals a,t,g, or c
  SITE (8278): n equals a,t,g, or c
  SITE (8279): n equals a,t,g, or c
  SITE (8280): n equals a,t,g, or c
  SITE (8281): n equals a,t,g, or c
  SITE (8282): n equals a,t,g, or c
  SITE (8283): n equals a,t,g, or c
  SITE (8284): n equals a,t,g, or c
  SITE (8285): n equals a,t,g, or c
  SITE (8286): n equals a,t,g, or c
  SITE (8287): n equals a,t,g, or c
  SITE (8288): n equals a,t,g, or c
  SITE (8289): n equals a,t,g, or c
  SITE (8290): n equals a,t,g, or c
  SITE (8291): n equals a,t,g, or c
  SITE (8292): n equals a,t,g, or c
  SITE (8293): n equals a,t,g, or c
  SITE (8294): n equals a,t,g, or c
  SITE (8295): n equals a,t,g, or c
  SITE (8296): n equals a,t,g, or c
  SITE (8297): n equals a,t,g, or c
  SITE (8298): n equals a,t,g, or c
  SITE (8299): n equals a,t,g, or c
  SITE (8300): n equals a,t,g, or c
  SITE (8301): n equals a,t,g, or c
  SITE (8302): n equals a,t,g, or c
  SITE (8303): n equals a,t,g, or c
  SITE (8304): n equals a,t,g, or c
  SITE (8305): n equals a,t,g, or c
  SITE (8306): n equals a,t,g, or c
  SITE (8307): n equals a,t,g, or c
  SITE (8308): n equals a,t,g, or c
  SITE (8309): n equals a,t,g, or c
  SITE (8310): n equals a,t,g, or c
  SITE (8311): n equals a,t,g, or c
  SITE (8312): n equals a,t,g, or c
  SITE (8313): n equals a,t,g, or c
  SITE (8314): n equals a,t,g, or c
  SITE (8315): n equals a,t,g, or c
  SITE (8316): n equals a,t,g, or c
  SITE (8317): n equals a,t,g, or c
  SITE (8318): n equals a,t,g, or c
  SITE (8319): n equals a,t,g, or c
  SITE (8320): n equals a,t,g, or c
  SITE (8321): n equals a,t,g, or c
  SITE (8322): n equals a,t,g, or c
  SITE (8323): n equals a,t,g, or c
  SITE (8324): n equals a,t,g, or c
  SITE (8325): n equals a,t,g, or c
  SITE (8326): n equals a,t,g, or c
  SITE (8327): n equals a,t,g, or c
  SITE (8328): n equals a,t,g, or c
  SITE (8329): n equals a,t,g, or c
  SITE (8330): n equals a,t,g, or c
  SITE (8331): n equals a,t,g, or c
  SITE (8332): n equals a,t,g, or c
  SITE (8333): n equals a,t,g, or c
  SITE (8334): n equals a,t,g, or c
  SITE (8335): n equals a,t,g, or c
  SITE (8336): n equals a,t,g, or c
  SITE (8337): n equals a,t,g, or c
  SITE (8338): n equals a,t,g, or c
  SITE (8339): n equals a,t,g, or c
  SITE (8340): n equals a,t,g, or c
  SITE (8341): n equals a,t,g, or c
  SITE (8342): n equals a,t,g, or c
  SITE (8343): n equals a,t,g, or c
  SITE (8344): n equals a,t,g, or c
  SITE (8345): n equals a,t,g, or c
  SITE (8346): n equals a,t,g, or c
  SITE (8347): n equals a,t,g, or c
  SITE (8348): n equals a,t,g, or c
  SITE (8349): n equals a,t,g, or c
  SITE (8350): n equals a,t,g, or c
  SITE (8351): n equals a,t,g, or c
  SITE (8352): n equals a,t,g, or c
  SITE (8353): n equals a,t,g, or c
  SITE (8354): n equals a,t,g, or c
  SITE (8355): n equals a,t,g, or c
  SITE (8356): n equals a,t,g, or c
  SITE (8357): n equals a,t,g, or c
  SITE (8358): n equals a,t,g, or c
  SITE (8359): n equals a,t,g, or c
  SITE (8360): n equals a,t,g, or c
  SITE (8361): n equals a,t,g, or c
  SITE (8362): n equals a,t,g, or c
  SITE (8363): n equals a,t,g, or c
  SITE (8364): n equals a,t,g, or c
  SITE (8365): n equals a,t,g, or c
  SITE (8366): n equals a,t,g, or c
  SITE (8367): n equals a,t,g, or c
  SITE (8368): n equals a,t,g, or c
  SITE (8369): n equals a,t,g, or c
  SITE (8370): n equals a,t,g, or c
  SITE (8371): n equals a,t,g, or c
  SITE (8372): n equals a,t,g, or c
  SITE (8373): n equals a,t,g, or c
  SITE (8374): n equals a,t,g, or c
  SITE (8375): n equals a,t,g, or c
  SITE (8376): n equals a,t,g, or c
  SITE (8377): n equals a,t,g, or c
  SITE (8378): n equals a,t,g, or c
  SITE (8379): n equals a,t,g, or c
  SITE (8380): n equals a,t,g, or c
  SITE (8381): n equals a,t,g, or c
  SITE (8382): n equals a,t,g, or c
  SITE (8383): n equals a,t,g, or c
  SITE (8384): n equals a,t,g, or c
  SITE (8385): n equals a,t,g, or c
  SITE (8386): n equals a,t,g, or c
  SITE (8387): n equals a,t,g, or c
  SITE (8388): n equals a,t,g, or c
  SITE (8389): n equals a,t,g, or c
  SITE (8390): n equals a,t,g, or c
  SITE (8391): n equals a,t,g, or c
  SITE (8392): n equals a,t,g, or c
  SITE (8393): n equals a,t,g, or c
  SITE (8394): n equals a,t,g, or c
  SITE (8395): n equals a,t,g, or c
  SITE (8396): n equals a,t,g, or c
  SITE (8397): n equals a,t,g, or c
  SITE (8398): n equals a,t,g, or c
  SITE (8399): n equals a,t,g, or c
  SITE (8400): n equals a,t,g, or c
  SITE (8401): n equals a,t,g, or c
  SITE (8402): n equals a,t,g, or c
  SITE (8403): n equals a,t,g, or c
  SITE (8404): n equals a,t,g, or c
  SITE (8405): n equals a,t,g, or c
  SITE (8406): n equals a,t,g, or c
  SITE (8407): n equals a,t,g, or c
  SITE (8408): n equals a,t,g, or c
  SITE (8409): n equals a,t,g, or c
  SITE (8410): n equals a,t,g, or c
  SITE (8411): n equals a,t,g, or c
  SITE (8412): n equals a,t,g, or c
  SITE (8413): n equals a,t,g, or c
  SITE (8414): n equals a,t,g, or c
  SITE (8415): n equals a,t,g, or c
  SITE (8416): n equals a,t,g, or c
  SITE (8417): n equals a,t,g, or c
  SITE (8418): n equals a,t,g, or c
  SITE (8419): n equals a,t,g, or c
  SITE (8420): n equals a,t,g, or c
  SITE (8421): n equals a,t,g, or c
  SITE (8422): n equals a,t,g, or c
  SITE (8423): n equals a,t,g, or c
  SITE (8424): n equals a,t,g, or c
  SITE (8425): n equals a,t,g, or c
  SITE (8426): n equals a,t,g, or c
  SITE (8427): n equals a,t,g, or c
  SITE (8428): n equals a,t,g, or c
  SITE (8429): n equals a,t,g, or c
  SITE (8430): n equals a,t,g, or c
  SITE (8431): n equals a,t,g, or c
  SITE (8432): n equals a,t,g, or c
  SITE (8433): n equals a,t,g, or c
  SITE (8434): n equals a,t,g, or c
  SITE (8435): n equals a,t,g, or c
  SITE (8436): n equals a,t,g, or c
  SITE (8437): n equals a,t,g, or c
  SITE (8438): n equals a,t,g, or c
  SITE (8439): n equals a,t,g, or c
  SITE (8440): n equals a,t,g, or c
  SITE (8441): n equals a,t,g, or c
  SITE (8442): n equals a,t,g, or c
  SITE (8443): n equals a,t,g, or c
  SITE (8444): n equals a,t,g, or c
  SITE (8445): n equals a,t,g, or c
  SITE (8446): n equals a,t,g, or c
  SITE (8447): n equals a,t,g, or c
  SITE (8448): n equals a,t,g, or c
  SITE (8449): n equals a,t,g, or c
  SITE (8450): n equals a,t,g, or c
  SITE (8451): n equals a,t,g, or c
  SITE (8452): n equals a,t,g, or c
  SITE (8453): n equals a,t,g, or c
  SITE (8454): n equals a,t,g, or c
  SITE (8455): n equals a,t,g, or c
  SITE (8456): n equals a,t,g, or c
  SITE (8457): n equals a,t,g, or c
  SITE (8458): n equals a,t,g, or c
  SITE (8459): n equals a,t,g, or c
  SITE (8460): n equals a,t,g, or c
  SITE (8461): n equals a,t,g, or c
  SITE (8462): n equals a,t,g, or c
  SITE (8463): n equals a,t,g, or c
  SITE (8464): n equals a,t,g, or c
  SITE (8465): n equals a,t,g, or c
  SITE (8466): n equals a,t,g, or c
  SITE (8467): n equals a,t,g, or c
  SITE (8468): n equals a,t,g, or c
  SITE (8469): n equals a,t,g, or c
  SITE (8470): n equals a,t,g, or c
  SITE (8471): n equals a,t,g, or c
  SITE (8472): n equals a,t,g, or c
  SITE (8473): n equals a,t,g, or c
  SITE (8474): n equals a,t,g, or c
  SITE (8475): n equals a,t,g, or c
  SITE (8476): n equals a,t,g, or c
  SITE (8477): n equals a,t,g, or c
  SITE (8478): n equals a,t,g, or c
  SITE (8479): n equals a,t,g, or c
  SITE (8480): n equals a,t,g, or c
  SITE (8481): n equals a,t,g, or c
  SITE (8482): n equals a,t,g, or c
  SITE (8483): n equals a,t,g, or c
  SITE (8484): n equals a,t,g, or c
  SITE (8485): n equals a,t,g, or c
  SITE (8486): n equals a,t,g, or c
  SITE (8487): n equals a,t,g, or c
  SITE (8488): n equals a,t,g, or c
  SITE (8489): n equals a,t,g, or c
  SITE (8490): n equals a,t,g, or c
  SITE (8491): n equals a,t,g, or c
  SITE (8492): n equals a,t,g, or c
  SITE (8493): n equals a,t,g, or c
  SITE (8494): n equals a,t,g, or c
  SITE (8495): n equals a,t,g, or c
  SITE (8496): n equals a,t,g, or c
  SITE (8497): n equals a,t,g, or c
  SITE (8498): n equals a,t,g, or c
  SITE (8499): n equals a,t,g, or c
  SITE (8500): n equals a,t,g, or c
  SITE (8501): n equals a,t,g, or c
  SITE (8502): n equals a,t,g, or c
  SITE (8503): n equals a,t,g, or c
  SITE (8504): n equals a,t,g, or c
  SITE (8505): n equals a,t,g, or c
  SITE (8506): n equals a,t,g, or c
  SITE (8507): n equals a,t,g, or c
  SITE (8508): n equals a,t,g, or c
  SITE (8509): n equals a,t,g, or c
  SITE (8510): n equals a,t,g, or c
  SITE (8511): n equals a,t,g, or c
  SITE (8512): n equals a,t,g, or c
  SITE (8513): n equals a,t,g, or c
  SITE (8514): n equals a,t,g, or c
  SITE (8515): n equals a,t,g, or c
  SITE (8516): n equals a,t,g, or c
  SITE (8517): n equals a,t,g, or c
  SITE (8518): n equals a,t,g, or c
  SITE (8519): n equals a,t,g, or c
  SITE (8520): n equals a,t,g, or c
  SITE (8521): n equals a,t,g, or c
  SITE (8522): n equals a,t,g, or c
  SITE (8523): n equals a,t,g, or c
  SITE (8524): n equals a,t,g, or c
  SITE (8525): n equals a,t,g, or c
  SITE (8526): n equals a,t,g, or c
  SITE (8527): n equals a,t,g, or c
  SITE (8528): n equals a,t,g, or c
  SITE (8529): n equals a,t,g, or c
  SITE (8530): n equals a,t,g, or c
  SITE (8531): n equals a,t,g, or c
  SITE (8532): n equals a,t,g, or c
  SITE (8533): n equals a,t,g, or c
  SITE (8534): n equals a,t,g, or c
  SITE (8535): n equals a,t,g, or c
  SITE (8536): n equals a,t,g, or c
  SITE (8537): n equals a,t,g, or c
  SITE (8538): n equals a,t,g, or c
  SITE (8539): n equals a,t,g, or c
  SITE (8540): n equals a,t,g, or c
  SITE (8541): n equals a,t,g, or c
  SITE (8542): n equals a,t,g, or c
  SITE (8543): n equals a,t,g, or c
  SITE (8544): n equals a,t,g, or c
  SITE (8545): n equals a,t,g, or c
  SITE (8546): n equals a,t,g, or c
  SITE (8547): n equals a,t,g, or c
  SITE (8548): n equals a,t,g, or c
  SITE (8549): n equals a,t,g, or c
  SITE (8550): n equals a,t,g, or c
  SITE (8551): n equals a,t,g, or c
  SITE (8552): n equals a,t,g, or c
  SITE (8553): n equals a,t,g, or c
  SITE (8554): n equals a,t,g, or c
  SITE (8555): n equals a,t,g, or c
  SITE (8556): n equals a,t,g, or c
  SITE (8557): n equals a,t,g, or c
  SITE (8558): n equals a,t,g, or c
  SITE (8559): n equals a,t,g, or c
  SITE (8560): n equals a,t,g, or c
  SITE (8561): n equals a,t,g, or c
  SITE (8562): n equals a,t,g, or c
  SITE (8563): n equals a,t,g, or c
  SITE (8564): n equals a,t,g, or c
  SITE (8565): n equals a,t,g, or c
  SITE (8566): n equals a,t,g, or c
  SITE (8567): n equals a,t,g, or c
  SITE (8568): n equals a,t,g, or c
  SITE (8569): n equals a,t,g, or c
  SITE (8570): n equals a,t,g, or c
  SITE (8571): n equals a,t,g, or c
  SITE (8572): n equals a,t,g, or c
  SITE (8573): n equals a,t,g, or c
  SITE (8574): n equals a,t,g, or c
  SITE (8575): n equals a,t,g, or c
  SITE (8576): n equals a,t,g, or c
  SITE (8577): n equals a,t,g, or c
  SITE (8578): n equals a,t,g, or c
  SITE (8579): n equals a,t,g, or c
  SITE (8580): n equals a,t,g, or c
  SITE (8581): n equals a,t,g, or c
  SITE (8582): n equals a,t,g, or c
  SITE (8583): n equals a,t,g, or c
  SITE (8584): n equals a,t,g, or c
  SITE (8585): n equals a,t,g, or c
  SITE (8586): n equals a,t,g, or c
  SITE (8587): n equals a,t,g, or c
  SITE (8588): n equals a,t,g, or c
  SITE (8589): n equals a,t,g, or c
  SITE (8590): n equals a,t,g, or c
  SITE (8591): n equals a,t,g, or c
  SITE (8592): n equals a,t,g, or c
  SITE (8593): n equals a,t,g, or c
  SITE (8594): n equals a,t,g, or c
  SITE (8595): n equals a,t,g, or c
  SITE (8596): n equals a,t,g, or c
  SITE (8597): n equals a,t,g, or c
  SITE (8598): n equals a,t,g, or c
  SITE (8599): n equals a,t,g, or c
  SITE (8600): n equals a,t,g, or c
  SITE (8601): n equals a,t,g, or c
  SITE (8602): n equals a,t,g, or c
  SITE (8603): n equals a,t,g, or c
  SITE (8604): n equals a,t,g, or c
  SITE (8605): n equals a,t,g, or c
  SITE (8606): n equals a,t,g, or c
  SITE (8607): n equals a,t,g, or c
  SITE (8608): n equals a,t,g, or c
  SITE (8609): n equals a,t,g, or c
  SITE (8610): n equals a,t,g, or c
  SITE (8611): n equals a,t,g, or c
  SITE (8612): n equals a,t,g, or c
  SITE (8613): n equals a,t,g, or c
  SITE (8614): n equals a,t,g, or c
  SITE (8615): n equals a,t,g, or c
  SITE (8616): n equals a,t,g, or c
  SITE (8617): n equals a,t,g, or c
  SITE (8618): n equals a,t,g, or c
  SITE (8619): n equals a,t,g, or c
  SITE (8620): n equals a,t,g, or c
  SITE (8621): n equals a,t,g, or c
  SITE (8622): n equals a,t,g, or c
  SITE (8623): n equals a,t,g, or c
  SITE (8624): n equals a,t,g, or c
  SITE (8625): n equals a,t,g, or c
  SITE (8626): n equals a,t,g, or c
  SITE (8627): n equals a,t,g, or c
  SITE (8628): n equals a,t,g, or c
  SITE (8629): n equals a,t,g, or c
  SITE (8630): n equals a,t,g, or c
  SITE (8631): n equals a,t,g, or c
  SITE (8632): n equals a,t,g, or c
  SITE (8633): n equals a,t,g, or c
  SITE (8634): n equals a,t,g, or c
  SITE (8635): n equals a,t,g, or c
  SITE (8636): n equals a,t,g, or c
  SITE (8637): n equals a,t,g, or c
  SITE (8638): n equals a,t,g, or c
  SITE (8639): n equals a,t,g, or c
  SITE (8640): n equals a,t,g, or c
  SITE (8641): n equals a,t,g, or c
  SITE (8642): n equals a,t,g, or c
  SITE (8643): n equals a,t,g, or c
  SITE (8644): n equals a,t,g, or c
  SITE (8645): n equals a,t,g, or c
  SITE (8646): n equals a,t,g, or c
  SITE (8647): n equals a,t,g, or c
  SITE (8648): n equals a,t,g, or c
  SITE (8649): n equals a,t,g, or c
  SITE (8650): n equals a,t,g, or c
  SITE (8651): n equals a,t,g, or c
  SITE (8652): n equals a,t,g, or c
  SITE (8653): n equals a,t,g, or c
  SITE (8654): n equals a,t,g, or c
  SITE (8655): n equals a,t,g, or c
  SITE (8656): n equals a,t,g, or c
  SITE (8657): n equals a,t,g, or c
  SITE (8658): n equals a,t,g, or c
  SITE (8659): n equals a,t,g, or c
  SITE (8660): n equals a,t,g, or c
  SITE (8661): n equals a,t,g, or c
  SITE (8662): n equals a,t,g, or c
  SITE (8663): n equals a,t,g, or c
  SITE (8664): n equals a,t,g, or c
  SITE (8665): n equals a,t,g, or c
  SITE (8666): n equals a,t,g, or c
  SITE (8667): n equals a,t,g, or c
  SITE (8668): n equals a,t,g, or c
  SITE (8669): n equals a,t,g, or c
  SITE (8670): n equals a,t,g, or c
  SITE (8671): n equals a,t,g, or c
  SITE (8672): n equals a,t,g, or c
  SITE (8673): n equals a,t,g, or c
  SITE (8674): n equals a,t,g, or c
  SITE (8675): n equals a,t,g, or c
  SITE (8676): n equals a,t,g, or c
  SITE (8677): n equals a,t,g, or c
  SITE (8678): n equals a,t,g, or c
  SITE (8679): n equals a,t,g, or c
  SITE (8680): n equals a,t,g, or c
  SITE (8681): n equals a,t,g, or c
  SITE (8682): n equals a,t,g, or c
  SITE (8683): n equals a,t,g, or c
  SITE (8684): n equals a,t,g, or c
  SITE (8685): n equals a,t,g, or c
  SITE (8686): n equals a,t,g, or c
  SITE (8687): n equals a,t,g, or c
  SITE (8688): n equals a,t,g, or c
  SITE (8689): n equals a,t,g, or c
  SITE (8690): n equals a,t,g, or c
  SITE (8691): n equals a,t,g, or c
  SITE (8692): n equals a,t,g, or c
  SITE (8693): n equals a,t,g, or c
  SITE (8694): n equals a,t,g, or c
  SITE (8695): n equals a,t,g, or c
  SITE (8696): n equals a,t,g, or c
  SITE (8697): n equals a,t,g, or c
  SITE (8698): n equals a,t,g, or c
  SITE (8699): n equals a,t,g, or c
  SITE (8700): n equals a,t,g, or c
  SITE (8701): n equals a,t,g, or c
  SITE (8702): n equals a,t,g, or c
  SITE (8703): n equals a,t,g, or c
  SITE (8704): n equals a,t,g, or c
  SITE (8705): n equals a,t,g, or c
  SITE (8706): n equals a,t,g, or c
  SITE (8707): n equals a,t,g, or c
  SITE (8708): n equals a,t,g, or c
  SITE (8709): n equals a,t,g, or c
  SITE (8710): n equals a,t,g, or c
  SITE (8711): n equals a,t,g, or c
  SITE (8712): n equals a,t,g, or c
  SITE (8713): n equals a,t,g, or c
  SITE (8714): n equals a,t,g, or c
  SITE (8715): n equals a,t,g, or c
  SITE (8716): n equals a,t,g, or c
  SITE (8717): n equals a,t,g, or c
  SITE (8718): n equals a,t,g, or c
  SITE (8719): n equals a,t,g, or c
  SITE (8720): n equals a,t,g, or c
  SITE (8721): n equals a,t,g, or c
  SITE (8722): n equals a,t,g, or c
  SITE (8723): n equals a,t,g, or c
  SITE (8724): n equals a,t,g, or c
  SITE (8725): n equals a,t,g, or c
  SITE (8726): n equals a,t,g, or c
  SITE (8727): n equals a,t,g, or c
  SITE (8728): n equals a,t,g, or c
  SITE (8729): n equals a,t,g, or c
  SITE (8730): n equals a,t,g, or c
  SITE (8731): n equals a,t,g, or c
  SITE (8732): n equals a,t,g, or c
  SITE (8733): n equals a,t,g, or c
  SITE (8734): n equals a,t,g, or c
  SITE (8735): n equals a,t,g, or c
  SITE (8736): n equals a,t,g, or c
  SITE (8737): n equals a,t,g, or c
  SITE (8738): n equals a,t,g, or c
  SITE (8739): n equals a,t,g, or c
  SITE (8740): n equals a,t,g, or c
  SITE (8741): n equals a,t,g, or c
  SITE (8742): n equals a,t,g, or c
  SITE (8743): n equals a,t,g, or c
  SITE (8744): n equals a,t,g, or c
  SITE (8745): n equals a,t,g, or c
  SITE (8746): n equals a,t,g, or c
  SITE (8747): n equals a,t,g, or c
  SITE (8748): n equals a,t,g, or c
  SITE (8749): n equals a,t,g, or c
  SITE (8750): n equals a,t,g, or c
  SITE (8751): n equals a,t,g, or c
  SITE (8752): n equals a,t,g, or c
  SITE (8753): n equals a,t,g, or c
  SITE (8754): n equals a,t,g, or c
  SITE (8755): n equals a,t,g, or c
  SITE (8756): n equals a,t,g, or c
  SITE (8757): n equals a,t,g, or c
  SITE (8758): n equals a,t,g, or c
  SITE (8759): n equals a,t,g, or c
  SITE (8760): n equals a,t,g, or c
  SITE (8761): n equals a,t,g, or c
  SITE (8762): n equals a,t,g, or c
  SITE (8763): n equals a,t,g, or c
  SITE (8764): n equals a,t,g, or c
  SITE (8765): n equals a,t,g, or c
  SITE (8766): n equals a,t,g, or c
  SITE (8767): n equals a,t,g, or c
  SITE (8768): n equals a,t,g, or c
  SITE (8769): n equals a,t,g, or c
  SITE (8770): n equals a,t,g, or c
  SITE (8771): n equals a,t,g, or c
  SITE (8772): n equals a,t,g, or c
  SITE (8773): n equals a,t,g, or c
  SITE (8774): n equals a,t,g, or c
  SITE (8775): n equals a,t,g, or c
  SITE (8776): n equals a,t,g, or c
  SITE (8777): n equals a,t,g, or c
  SITE (8778): n equals a,t,g, or c
  SITE (8779): n equals a,t,g, or c
  SITE (8780): n equals a,t,g, or c
  SITE (8781): n equals a,t,g, or c
  SITE (8782): n equals a,t,g, or c
  SITE (8783): n equals a,t,g, or c
  SITE (8784): n equals a,t,g, or c
  SITE (8785): n equals a,t,g, or c
  SITE (8786): n equals a,t,g, or c
  SITE (8787): n equals a,t,g, or c
  SITE (8788): n equals a,t,g, or c
  SITE (8789): n equals a,t,g, or c
  SITE (8790): n equals a,t,g, or c
  SITE (8791): n equals a,t,g, or c
  SITE (8792): n equals a,t,g, or c
  SITE (8793): n equals a,t,g, or c
  SITE (8794): n equals a,t,g, or c
  SITE (8795): n equals a,t,g, or c
  SITE (8796): n equals a,t,g, or c
  SITE (8797): n equals a,t,g, or c
  SITE (8798): n equals a,t,g, or c
  SITE (8799): n equals a,t,g, or c
  SITE (8800): n equals a,t,g, or c
  SITE (8801): n equals a,t,g, or c
  SITE (8802): n equals a,t,g, or c
  SITE (8803): n equals a,t,g, or c
  SITE (8804): n equals a,t,g, or c
  SITE (8805): n equals a,t,g, or c
  SITE (8806): n equals a,t,g, or c
  SITE (8807): n equals a,t,g, or c
  SITE (8808): n equals a,t,g, or c
  SITE (8809): n equals a,t,g, or c
  SITE (8810): n equals a,t,g, or c
  SITE (8811): n equals a,t,g, or c
  SITE (8812): n equals a,t,g, or c
  SITE (8813): n equals a,t,g, or c
  SITE (8814): n equals a,t,g, or c
  SITE (8815): n equals a,t,g, or c
  SITE (8816): n equals a,t,g, or c
  SITE (8817): n equals a,t,g, or c
  SITE (8818): n equals a,t,g, or c
  SITE (8819): n equals a,t,g, or c
  SITE (8820): n equals a,t,g, or c
  SITE (8821): n equals a,t,g, or c
  SITE (8822): n equals a,t,g, or c
  SITE (8823): n equals a,t,g, or c
  SITE (8824): n equals a,t,g, or c
  SITE (8825): n equals a,t,g, or c
  SITE (8826): n equals a,t,g, or c
  SITE (8827): n equals a,t,g, or c
  SITE (8828): n equals a,t,g, or c
  SITE (8829): n equals a,t,g, or c
  SITE (8830): n equals a,t,g, or c
  SITE (8831): n equals a,t,g, or c
  SITE (8832): n equals a,t,g, or c
  SITE (8833): n equals a,t,g, or c
  SITE (8834): n equals a,t,g, or c
  SITE (8835): n equals a,t,g, or c
  SITE (8836): n equals a,t,g, or c
  SITE (8837): n equals a,t,g, or c
  SITE (8838): n equals a,t,g, or c
  SITE (8839): n equals a,t,g, or c
  SITE (8840): n equals a,t,g, or c
  SITE (8841): n equals a,t,g, or c
  SITE (8842): n equals a,t,g, or c
  SITE (8843): n equals a,t,g, or c
  SITE (8844): n equals a,t,g, or c
  SITE (8845): n equals a,t,g, or c
  SITE (8846): n equals a,t,g, or c
  SITE (8847): n equals a,t,g, or c
  SITE (8848): n equals a,t,g, or c
  SITE (8849): n equals a,t,g, or c
  SITE (8850): n equals a,t,g, or c
  SITE (8851): n equals a,t,g, or c
  SITE (8852): n equals a,t,g, or c
  SITE (8853): n equals a,t,g, or c
  SITE (8854): n equals a,t,g, or c
  SITE (8855): n equals a,t,g, or c
  SITE (8856): n equals a,t,g, or c
  SITE (8857): n equals a,t,g, or c
  SITE (8858): n equals a,t,g, or c
  SITE (8859): n equals a,t,g, or c
  SITE (8860): n equals a,t,g, or c
  SITE (8861): n equals a,t,g, or c
  SITE (8862): n equals a,t,g, or c
  SITE (8863): n equals a,t,g, or c
  SITE (8864): n equals a,t,g, or c
  SITE (8865): n equals a,t,g, or c
  SITE (8866): n equals a,t,g, or c
  SITE (8867): n equals a,t,g, or c
  SITE (8868): n equals a,t,g, or c
  SITE (8869): n equals a,t,g, or c
  SITE (8870): n equals a,t,g, or c
  SITE (8871): n equals a,t,g, or c
  SITE (8872): n equals a,t,g, or c
  SITE (8873): n equals a,t,g, or c
  SITE (8874): n equals a,t,g, or c
  SITE (8875): n equals a,t,g, or c
  SITE (8876): n equals a,t,g, or c
  SITE (8877): n equals a,t,g, or c
  SITE (8878): n equals a,t,g, or c
  SITE (8879): n equals a,t,g, or c
  SITE (8880): n equals a,t,g, or c
  SITE (8881): n equals a,t,g, or c
  SITE (8882): n equals a,t,g, or c
  SITE (8883): n equals a,t,g, or c
  SITE (8884): n equals a,t,g, or c
  SITE (8885): n equals a,t,g, or c
  SITE (8886): n equals a,t,g, or c
  SITE (8887): n equals a,t,g, or c
  SITE (8888): n equals a,t,g, or c
  SITE (8889): n equals a,t,g, or c
  SITE (8890): n equals a,t,g, or c
  SITE (8891): n equals a,t,g, or c
  SITE (8892): n equals a,t,g, or c
  SITE (8893): n equals a,t,g, or c
  SITE (8894): n equals a,t,g, or c
  SITE (8895): n equals a,t,g, or c
  SITE (8896): n equals a,t,g, or c
  SITE (8897): n equals a,t,g, or c
  SITE (8898): n equals a,t,g, or c
  SITE (8899): n equals a,t,g, or c
  SITE (8900): n equals a,t,g, or c
  SITE (8901): n equals a,t,g, or c
  SITE (8902): n equals a,t,g, or c
  SITE (8903): n equals a,t,g, or c
  SITE (8904): n equals a,t,g, or c
  SITE (8905): n equals a,t,g, or c
  SITE (8906): n equals a,t,g, or c
  SITE (8907): n equals a,t,g, or c
  SITE (8908): n equals a,t,g, or c
  SITE (8909): n equals a,t,g, or c
  SITE (8910): n equals a,t,g, or c
  SITE (8911): n equals a,t,g, or c
  SITE (8912): n equals a,t,g, or c
  SITE (8913): n equals a,t,g, or c
  SITE (8914): n equals a,t,g, or c
  SITE (8915): n equals a,t,g, or c
  SITE (8916): n equals a,t,g, or c
  SITE (8917): n equals a,t,g, or c
  SITE (8918): n equals a,t,g, or c
  SITE (8919): n equals a,t,g, or c
  SITE (8920): n equals a,t,g, or c
  SITE (8921): n equals a,t,g, or c
  SITE (8922): n equals a,t,g, or c
  SITE (8923): n equals a,t,g, or c
  SITE (8924): n equals a,t,g, or c
  SITE (8925): n equals a,t,g, or c
  SITE (8926): n equals a,t,g, or c
  SITE (8927): n equals a,t,g, or c
  SITE (8928): n equals a,t,g, or c
  SITE (8929): n equals a,t,g, or c
  SITE (8930): n equals a,t,g, or c
  SITE (8931): n equals a,t,g, or c
  SITE (8932): n equals a,t,g, or c
  SITE (8933): n equals a,t,g, or c
  SITE (8934): n equals a,t,g, or c
  SITE (8935): n equals a,t,g, or c
  SITE (8936): n equals a,t,g, or c
  SITE (8937): n equals a,t,g, or c
  SITE (8938): n equals a,t,g, or c
  SITE (8939): n equals a,t,g, or c
  SITE (8940): n equals a,t,g, or c
  SITE (8941): n equals a,t,g, or c
  SITE (8942): n equals a,t,g, or c
  SITE (8943): n equals a,t,g, or c
  SITE (8944): n equals a,t,g, or c
  SITE (8945): n equals a,t,g, or c
  SITE (8946): n equals a,t,g, or c
  SITE (8947): n equals a,t,g, or c
  SITE (8948): n equals a,t,g, or c
  SITE (8949): n equals a,t,g, or c
  SITE (8950): n equals a,t,g, or c
  SITE (8951): n equals a,t,g, or c
  SITE (8952): n equals a,t,g, or c
  SITE (8953): n equals a,t,g, or c
  SITE (8954): n equals a,t,g, or c
  SITE (8955): n equals a,t,g, or c
  SITE (8956): n equals a,t,g, or c
  SITE (8957): n equals a,t,g, or c
  SITE (8958): n equals a,t,g, or c
  SITE (8959): n equals a,t,g, or c
  SITE (8960): n equals a,t,g, or c
  SITE (8961): n equals a,t,g, or c
  SITE (8962): n equals a,t,g, or c
  SITE (8963): n equals a,t,g, or c
  SITE (8964): n equals a,t,g, or c
  SITE (8965): n equals a,t,g, or c
  SITE (8966): n equals a,t,g, or c
  SITE (8967): n equals a,t,g, or c
  SITE (8968): n equals a,t,g, or c
  SITE (8969): n equals a,t,g, or c
  SITE (8970): n equals a,t,g, or c
  SITE (8971): n equals a,t,g, or c
  SITE (8972): n equals a,t,g, or c
  SITE (8973): n equals a,t,g, or c
  SITE (8974): n equals a,t,g, or c
  SITE (8975): n equals a,t,g, or c
  SITE (8976): n equals a,t,g, or c
  SITE (8977): n equals a,t,g, or c
  SITE (8978): n equals a,t,g, or c
  SITE (8979): n equals a,t,g, or c
  SITE (8980): n equals a,t,g, or c
  SITE (8981): n equals a,t,g, or c
  SITE (8982): n equals a,t,g, or c
  SITE (8983): n equals a,t,g, or c
  SITE (8984): n equals a,t,g, or c
  SITE (8985): n equals a,t,g, or c
  SITE (8986): n equals a,t,g, or c
  SITE (8987): n equals a,t,g, or c
  SITE (8988): n equals a,t,g, or c
  SITE (8989): n equals a,t,g, or c
  SITE (8990): n equals a,t,g, or c
  SITE (8991): n equals a,t,g, or c
  SITE (8992): n equals a,t,g, or c
  SITE (8993): n equals a,t,g, or c
  SITE (8994): n equals a,t,g, or c
  SITE (8995): n equals a,t,g, or c
  SITE (8996): n equals a,t,g, or c
  SITE (8997): n equals a,t,g, or c
  SITE (8998): n equals a,t,g, or c
  SITE (8999): n equals a,t,g, or c
  SITE (9000): n equals a,t,g, or c
  SITE (9001): n equals a,t,g, or c
  SITE (9002): n equals a,t,g, or c
  SITE (9003): n equals a,t,g, or c
  SITE (9004): n equals a,t,g, or c
  SITE (9005): n equals a,t,g, or c
  SITE (9006): n equals a,t,g, or c
  SITE (9007): n equals a,t,g, or c
  SITE (9008): n equals a,t,g, or c
  SITE (9009): n equals a,t,g, or c
  SITE (9010): n equals a,t,g, or c
  SITE (9011): n equals a,t,g, or c
  SITE (9012): n equals a,t,g, or c
  SITE (9013): n equals a,t,g, or c
  SITE (9014): n equals a,t,g, or c
  SITE (9015): n equals a,t,g, or c
  SITE (9016): n equals a,t,g, or c
  SITE (9017): n equals a,t,g, or c
  SITE (9018): n equals a,t,g, or c
  SITE (9019): n equals a,t,g, or c
  SITE (9020): n equals a,t,g, or c
  SITE (9021): n equals a,t,g, or c
  SITE (9022): n equals a,t,g, or c
  SITE (9023): n equals a,t,g, or c
  SITE (9024): n equals a,t,g, or c
  SITE (9025): n equals a,t,g, or c
  SITE (9026): n equals a,t,g, or c
  SITE (9027): n equals a,t,g, or c
  SITE (9028): n equals a,t,g, or c
  SITE (9029): n equals a,t,g, or c
  SITE (9030): n equals a,t,g, or c
  SITE (9031): n equals a,t,g, or c
  SITE (9032): n equals a,t,g, or c
  SITE (9033): n equals a,t,g, or c
  SITE (9034): n equals a,t,g, or c
  SITE (9035): n equals a,t,g, or c
  SITE (9036): n equals a,t,g, or c
  SITE (9037): n equals a,t,g, or c
  SITE (9038): n equals a,t,g, or c
  SITE (9039): n equals a,t,g, or c
  SITE (9040): n equals a,t,g, or c
  SITE (9041): n equals a,t,g, or c
  SITE (9042): n equals a,t,g, or c
  SITE (9043): n equals a,t,g, or c
  SITE (9044): n equals a,t,g, or c
  SITE (9045): n equals a,t,g, or c
  SITE (9046): n equals a,t,g, or c
  SITE (9047): n equals a,t,g, or c
  SITE (9048): n equals a,t,g, or c
  SITE (9049): n equals a,t,g, or c
  SITE (9050): n equals a,t,g, or c
  SITE (9051): n equals a,t,g, or c
  SITE (9052): n equals a,t,g, or c
  SITE (9053): n equals a,t,g, or c
  SITE (9054): n equals a,t,g, or c
  SITE (9055): n equals a,t,g, or c
  SITE (9056): n equals a,t,g, or c
  SITE (9057): n equals a,t,g, or c
  SITE (9058): n equals a,t,g, or c
  SITE (9059): n equals a,t,g, or c
  SITE (9060): n equals a,t,g, or c
  SITE (9061): n equals a,t,g, or c
  SITE (9062): n equals a,t,g, or c
  SITE (9063): n equals a,t,g, or c
  SITE (9064): n equals a,t,g, or c
  SITE (9065): n equals a,t,g, or c
  SITE (9066): n equals a,t,g, or c
  SITE (9067): n equals a,t,g, or c
  SITE (9068): n equals a,t,g, or c
  SITE (9069): n equals a,t,g, or c
  SITE (9070): n equals a,t,g, or c
  SITE (9071): n equals a,t,g, or c
  SITE (9072): n equals a,t,g, or c
  SITE (9073): n equals a,t,g, or c
  SITE (9074): n equals a,t,g, or c
  SITE (9075): n equals a,t,g, or c
  SITE (9076): n equals a,t,g, or c
  SITE (9077): n equals a,t,g, or c
  SITE (9078): n equals a,t,g, or c
  SITE (9079): n equals a,t,g, or c
  SITE (9080): n equals a,t,g, or c
  SITE (9081): n equals a,t,g, or c
  SITE (9082): n equals a,t,g, or c
  SITE (9083): n equals a,t,g, or c
  SITE (9084): n equals a,t,g, or c
  SITE (9085): n equals a,t,g, or c
  SITE (9086): n equals a,t,g, or c
  SITE (9087): n equals a,t,g, or c
  SITE (9088): n equals a,t,g, or c
  SITE (9089): n equals a,t,g, or c
  SITE (9090): n equals a,t,g, or c
  SITE (9091): n equals a,t,g, or c
  SITE (9092): n equals a,t,g, or c
  SITE (9093): n equals a,t,g, or c
  SITE (9094): n equals a,t,g, or c
  SITE (9095): n equals a,t,g, or c
  SITE (9096): n equals a,t,g, or c
  SITE (9097): n equals a,t,g, or c
  SITE (9098): n equals a,t,g, or c
  SITE (9099): n equals a,t,g, or c
  SITE (9100): n equals a,t,g, or c
  SITE (9101): n equals a,t,g, or c
  SITE (9102): n equals a,t,g, or c
  SITE (9103): n equals a,t,g, or c
  SITE (9104): n equals a,t,g, or c
  SITE (9105): n equals a,t,g, or c
  SITE (9106): n equals a,t,g, or c
  SITE (9107): n equals a,t,g, or c
  SITE (9108): n equals a,t,g, or c
  SITE (9109): n equals a,t,g, or c
  SITE (9110): n equals a,t,g, or c
  SITE (9111): n equals a,t,g, or c
  SITE (9112): n equals a,t,g, or c
  SITE (9113): n equals a,t,g, or c
  SITE (9114): n equals a,t,g, or c
  SITE (9115): n equals a,t,g, or c
  SITE (9116): n equals a,t,g, or c
  SITE (9117): n equals a,t,g, or c
  SITE (9118): n equals a,t,g, or c
  SITE (9119): n equals a,t,g, or c
  SITE (9120): n equals a,t,g, or c
  SITE (9121): n equals a,t,g, or c
  SITE (9122): n equals a,t,g, or c
  SITE (9123): n equals a,t,g, or c
  SITE (9124): n equals a,t,g, or c
  SITE (9125): n equals a,t,g, or c
  SITE (9126): n equals a,t,g, or c
  SITE (9127): n equals a,t,g, or c
  SITE (9128): n equals a,t,g, or c
  SITE (9129): n equals a,t,g, or c
  SITE (9130): n equals a,t,g, or c
  SITE (9131): n equals a,t,g, or c
  SITE (9132): n equals a,t,g, or c
  SITE (9133): n equals a,t,g, or c
  SITE (9134): n equals a,t,g, or c
  SITE (9135): n equals a,t,g, or c
  SITE (9136): n equals a,t,g, or c
  SITE (9137): n equals a,t,g, or c
  SITE (9138): n equals a,t,g, or c
  SITE (9139): n equals a,t,g, or c
  SITE (9140): n equals a,t,g, or c
  SITE (9141): n equals a,t,g, or c
  SITE (9142): n equals a,t,g, or c
  SITE (9143): n equals a,t,g, or c
  SITE (9144): n equals a,t,g, or c
  SITE (9145): n equals a,t,g, or c
  SITE (9146): n equals a,t,g, or c
  SITE (9147): n equals a,t,g, or c
  SITE (9148): n equals a,t,g, or c
  SITE (9149): n equals a,t,g, or c
  SITE (9150): n equals a,t,g, or c
  SITE (9151): n equals a,t,g, or c
  SITE (9152): n equals a,t,g, or c
  SITE (9153): n equals a,t,g, or c
  SITE (9154): n equals a,t,g, or c
  SITE (9155): n equals a,t,g, or c
  SITE (9156): n equals a,t,g, or c
  SITE (9157): n equals a,t,g, or c
  SITE (9158): n equals a,t,g, or c
  SITE (9159): n equals a,t,g, or c
  SITE (9160): n equals a,t,g, or c
  SITE (9161): n equals a,t,g, or c
  SITE (9162): n equals a,t,g, or c
  SITE (9163): n equals a,t,g, or c
  SITE (9164): n equals a,t,g, or c
  SITE (9165): n equals a,t,g, or c
  SITE (9166): n equals a,t,g, or c
  SITE (9167): n equals a,t,g, or c
  SITE (9168): n equals a,t,g, or c
  SITE (9169): n equals a,t,g, or c
  SITE (9170): n equals a,t,g, or c
  SITE (9171): n equals a,t,g, or c
  SITE (9172): n equals a,t,g, or c
  SITE (9173): n equals a,t,g, or c
  SITE (9174): n equals a,t,g, or c
  SITE (9175): n equals a,t,g, or c
  SITE (9176): n equals a,t,g, or c
  SITE (9177): n equals a,t,g, or c
  SITE (9178): n equals a,t,g, or c
  SITE (9179): n equals a,t,g, or c
  SITE (9180): n equals a,t,g, or c
  SITE (9181): n equals a,t,g, or c
  SITE (9182): n equals a,t,g, or c
  SITE (9183): n equals a,t,g, or c
  SITE (9184): n equals a,t,g, or c
  SITE (9185): n equals a,t,g, or c
  SITE (9186): n equals a,t,g, or c
  SITE (9187): n equals a,t,g, or c
  SITE (9188): n equals a,t,g, or c
  SITE (9189): n equals a,t,g, or c
  SITE (9190): n equals a,t,g, or c
  SITE (9191): n equals a,t,g, or c
  SITE (9192): n equals a,t,g, or c
  SITE (9193): n equals a,t,g, or c
  SITE (9194): n equals a,t,g, or c
  SITE (9195): n equals a,t,g, or c
  SITE (9196): n equals a,t,g, or c
  SITE (9197): n equals a,t,g, or c
  SITE (9198): n equals a,t,g, or c
  SITE (9199): n equals a,t,g, or c
  SITE (9200): n equals a,t,g, or c
  SITE (9201): n equals a,t,g, or c
  SITE (9202): n equals a,t,g, or c
  SITE (9203): n equals a,t,g, or c
  SITE (9204): n equals a,t,g, or c
  SITE (9205): n equals a,t,g, or c
  SITE (9206): n equals a,t,g, or c
  SITE (9207): n equals a,t,g, or c
  SITE (9208): n equals a,t,g, or c
  SITE (9209): n equals a,t,g, or c
  SITE (9210): n equals a,t,g, or c
  SITE (9211): n equals a,t,g, or c
  SITE (9212): n equals a,t,g, or c
  SITE (9213): n equals a,t,g, or c
  SITE (9214): n equals a,t,g, or c
  SITE (9215): n equals a,t,g, or c
  SITE (9216): n equals a,t,g, or c
  SITE (9217): n equals a,t,g, or c
  SITE (9218): n equals a,t,g, or c
  SITE (9219): n equals a,t,g, or c
  SITE (9220): n equals a,t,g, or c
  SITE (9221): n equals a,t,g, or c
  SITE (9222): n equals a,t,g, or c
  SITE (9223): n equals a,t,g, or c
  SITE (9224): n equals a,t,g, or c
  SITE (9225): n equals a,t,g, or c
  SITE (9226): n equals a,t,g, or c
  SITE (9227): n equals a,t,g, or c
  SITE (9228): n equals a,t,g, or c
  SITE (9229): n equals a,t,g, or c
  SITE (9230): n equals a,t,g, or c
  SITE (9231): n equals a,t,g, or c
  SITE (9232): n equals a,t,g, or c
  SITE (9233): n equals a,t,g, or c
  SITE (9234): n equals a,t,g, or c
  SITE (9235): n equals a,t,g, or c
  SITE (9236): n equals a,t,g, or c
  SITE (9237): n equals a,t,g, or c
  SITE (9238): n equals a,t,g, or c
  SITE (9239): n equals a,t,g, or c
  SITE (9240): n equals a,t,g, or c
  SITE (9241): n equals a,t,g, or c
  SITE (9242): n equals a,t,g, or c
  SITE (9243): n equals a,t,g, or c
  SITE (9244): n equals a,t,g, or c
  SITE (9245): n equals a,t,g, or c
  SITE (9246): n equals a,t,g, or c
  SITE (9247): n equals a,t,g, or c
  SITE (9248): n equals a,t,g, or c
  SITE (9249): n equals a,t,g, or c
  SITE (9250): n equals a,t,g, or c
  SITE (9251): n equals a,t,g, or c
  SITE (9252): n equals a,t,g, or c
  SITE (9253): n equals a,t,g, or c
  SITE (9254): n equals a,t,g, or c
  SITE (9255): n equals a,t,g, or c
  SITE (9256): n equals a,t,g, or c
  SITE (9257): n equals a,t,g, or c
  SITE (9258): n equals a,t,g, or c
  SITE (9259): n equals a,t,g, or c
  SITE (9260): n equals a,t,g, or c
  SITE (9261): n equals a,t,g, or c
  SITE (9262): n equals a,t,g, or c
  SITE (9263): n equals a,t,g, or c
  SITE (9264): n equals a,t,g, or c
  SITE (9265): n equals a,t,g, or c
  SITE (9266): n equals a,t,g, or c
  SITE (9267): n equals a,t,g, or c
  SITE (9268): n equals a,t,g, or c
  SITE (9269): n equals a,t,g, or c
  SITE (9270): n equals a,t,g, or c
  SITE (9271): n equals a,t,g, or c
  SITE (9272): n equals a,t,g, or c
  SITE (9273): n equals a,t,g, or c
  SITE (9274): n equals a,t,g, or c
  SITE (9275): n equals a,t,g, or c
  SITE (9276): n equals a,t,g, or c
  SITE (9277): n equals a,t,g, or c
  SITE (9278): n equals a,t,g, or c
  SITE (9279): n equals a,t,g, or c
  SITE (9280): n equals a,t,g, or c
  SITE (9281): n equals a,t,g, or c
  SITE (9282): n equals a,t,g, or c
  SITE (9283): n equals a,t,g, or c
  SITE (9284): n equals a,t,g, or c
  SITE (9285): n equals a,t,g, or c
  SITE (9286): n equals a,t,g, or c
  SITE (9287): n equals a,t,g, or c
  SITE (9288): n equals a,t,g, or c
  SITE (9289): n equals a,t,g, or c
  SITE (9290): n equals a,t,g, or c
  SITE (9291): n equals a,t,g, or c
  SITE (9292): n equals a,t,g, or c
  SITE (9293): n equals a,t,g, or c
  SITE (9294): n equals a,t,g, or c
  SITE (9295): n equals a,t,g, or c
  SITE (9296): n equals a,t,g, or c
  SITE (9297): n equals a,t,g, or c
  SITE (9298): n equals a,t,g, or c
  SITE (9299): n equals a,t,g, or c
  SITE (9300): n equals a,t,g, or c
  SITE (9301): n equals a,t,g, or c
  SITE (9302): n equals a,t,g, or c
  SITE (9303): n equals a,t,g, or c
  SITE (9304): n equals a,t,g, or c
  SITE (9305): n equals a,t,g, or c
  SITE (9306): n equals a,t,g, or c
  SITE (9307): n equals a,t,g, or c
  SITE (9308): n equals a,t,g, or c
  SITE (9309): n equals a,t,g, or c
  SITE (9310): n equals a,t,g, or c
  SITE (9311): n equals a,t,g, or c
  SITE (9312): n equals a,t,g, or c
  SITE (9313): n equals a,t,g, or c
  SITE (9314): n equals a,t,g, or c
  SITE (9315): n equals a,t,g, or c
  SITE (9316): n equals a,t,g, or c
  SITE (9317): n equals a,t,g, or c
  SITE (9318): n equals a,t,g, or c
  SITE (9319): n equals a,t,g, or c
  SITE (9320): n equals a,t,g, or c
  SITE (9321): n equals a,t,g, or c
  SITE (9322): n equals a,t,g, or c
  SITE (9323): n equals a,t,g, or c
  SITE (9324): n equals a,t,g, or c
  SITE (9325): n equals a,t,g, or c
  SITE (9326): n equals a,t,g, or c
  SITE (9327): n equals a,t,g, or c
  SITE (9328): n equals a,t,g, or c
  SITE (9329): n equals a,t,g, or c
  SITE (9330): n equals a,t,g, or c
  SITE (9331): n equals a,t,g, or c
  SITE (9332): n equals a,t,g, or c
  SITE (9333): n equals a,t,g, or c
  SITE (9334): n equals a,t,g, or c
  SITE (9335): n equals a,t,g, or c
  SITE (9336): n equals a,t,g, or c
  SITE (9337): n equals a,t,g, or c
  SITE (9338): n equals a,t,g, or c
  SITE (9339): n equals a,t,g, or c
  SITE (9340): n equals a,t,g, or c
  SITE (9341): n equals a,t,g, or c
  SITE (9342): n equals a,t,g, or c
  SITE (9343): n equals a,t,g, or c
  SITE (9344): n equals a,t,g, or c
  SITE (9345): n equals a,t,g, or c
  SITE (9346): n equals a,t,g, or c
  SITE (9347): n equals a,t,g, or c
  SITE (9348): n equals a,t,g, or c
  SITE (9349): n equals a,t,g, or c
  SITE (9350): n equals a,t,g, or c
  SITE (9351): n equals a,t,g, or c
  SITE (9352): n equals a,t,g, or c
  SITE (9353): n equals a,t,g, or c
  SITE (9354): n equals a,t,g, or c
  SITE (9355): n equals a,t,g, or c
  SITE (9356): n equals a,t,g, or c
  SITE (9357): n equals a,t,g, or c
  SITE (9358): n equals a,t,g, or c
  SITE (9359): n equals a,t,g, or c
  SITE (9360): n equals a,t,g, or c
  SITE (9361): n equals a,t,g, or c
  SITE (9362): n equals a,t,g, or c
  SITE (9363): n equals a,t,g, or c
  SITE (9364): n equals a,t,g, or c
  SITE (9365): n equals a,t,g, or c
  SITE (9366): n equals a,t,g, or c
  SITE (9367): n equals a,t,g, or c
  SITE (9368): n equals a,t,g, or c
  SITE (9369): n equals a,t,g, or c
  SITE (9370): n equals a,t,g, or c
  SITE (9371): n equals a,t,g, or c
  SITE (9372): n equals a,t,g, or c
  SITE (9373): n equals a,t,g, or c
  SITE (9374): n equals a,t,g, or c
  SITE (9375): n equals a,t,g, or c
  SITE (9376): n equals a,t,g, or c
  SITE (9377): n equals a,t,g, or c
  SITE (9378): n equals a,t,g, or c
  SITE (9379): n equals a,t,g, or c
  SITE (9380): n equals a,t,g, or c
  SITE (9381): n equals a,t,g, or c
  SITE (9382): n equals a,t,g, or c
  SITE (9383): n equals a,t,g, or c
  SITE (9384): n equals a,t,g, or c
  SITE (9385): n equals a,t,g, or c
  SITE (9386): n equals a,t,g, or c
  SITE (9387): n equals a,t,g, or c
  SITE (9388): n equals a,t,g, or c
  SITE (9389): n equals a,t,g, or c
  SITE (9390): n equals a,t,g, or c
  SITE (9391): n equals a,t,g, or c
  SITE (9392): n equals a,t,g, or c
  SITE (9393): n equals a,t,g, or c
  SITE (9394): n equals a,t,g, or c
  SITE (9395): n equals a,t,g, or c
  SITE (9396): n equals a,t,g, or c
  SITE (9397): n equals a,t,g, or c
  SITE (9398): n equals a,t,g, or c
  SITE (9399): n equals a,t,g, or c
  SITE (9400): n equals a,t,g, or c
  SITE (9401): n equals a,t,g, or c
  SITE (9402): n equals a,t,g, or c
  SITE (9403): n equals a,t,g, or c
  SITE (9404): n equals a,t,g, or c
  SITE (9405): n equals a,t,g, or c
  SITE (9406): n equals a,t,g, or c
  SITE (9407): n equals a,t,g, or c
  SITE (9408): n equals a,t,g, or c
  SITE (9409): n equals a,t,g, or c
  SITE (9410): n equals a,t,g, or c
  SITE (9411): n equals a,t,g, or c
  SITE (9412): n equals a,t,g, or c
  SITE (9413): n equals a,t,g, or c
  SITE (9414): n equals a,t,g, or c
  SITE (9415): n equals a,t,g, or c
  SITE (9416): n equals a,t,g, or c

SEQ ID NO: 11337 - DNA, 295 bp, Homo sapiens; identical to SEQ ID NO: 8907

SEQ ID NO: 11338 - DNA, 274 bp, Homo sapiens
caggcacggtggctcacgcctgtaatcccatcactttgggacgccgaggtgggcggatcatgaggtcaggagatcgagaccatcctggctaacacggtgaaaccccatctctactaaaaatacaaaaaatgagccgtgcgtggtggtgggcgcctgtagtcccaggtactcaggaggctgaggcaggagaatggtgtgaacccgagaggcggagcttgcagtgagccgagattgcgccactgcactccagcctgggcaacagagcgagactccg

SEQ ID NO: 11339 - DNA, 200 bp, Homo sapiens; identical to SEQ ID NO: 8908

SEQ ID NO: 11340 - DNA, 295 bp, Homo sapiens; identical to SEQ ID NO: 5401

SEQ ID NO: 11341 - DNA, 270 bp, Homo sapiens
cccagcactttgggaggacgaggcgggcagatcatgaggtcaggagatcgagaccatcctggctaacacggtgaaaccccatctctactaaaagtacaaaaaattagccaggcgtggtggggggtgcctgtagtcccagctacttgggaggctgaggcaggagaatggtgtgaacccggggaggcagagcttgcagtgagcccggatggcaccactgcactccagcctgggtgacagagcaagactccgtctcaaaaaaagaaaaaagaa

SEQ ID NO: 11342 - DNA, 116 bp, Homo sapiens
  SITE (76): n equals a,t,g, or c
cagcactttggaaggccgaggagggcagatcacaaggtcaggagatcgagaccatcctggctaacacggtgaaacnccgtccctactaaaaatacaaaacattagcccgcgtggtg

SEQ ID NO: 11343 - DNA, 279 bp, Homo sapiens
cctgtaatcccagtactttgggaggctgaggtgggtggatcacgagatcaggagatcgagaccatcctggataaaacggtgaaaccccgtctctactaaaaatacaaaaaattagctgggcgtggtggtgggcgcccgtagtcccagctactcaggggggctgaggcaggagaatggcgtgaacccaggaggcggagcttgcagtgagccgagatagcgccactacactccagcctgggcgaaagagagagactccgtctcaaaaaaaaaaaaagaaga

SEQ ID NO: 11344 - DNA, 316 bp, Homo sapiens; identical to SEQ ID NO: 5403

SEQ ID NO: 11345 - DNA, 305 bp, Homo sapiens; identical to SEQ ID NO: 5407

SEQ ID NO: 11346 - DNA, 300 bp, Homo sapiens; identical to SEQ ID NO: 7804

SEQ ID NO: 11347 - DNA, 284 bp, Homo sapiens; identical to SEQ ID NO: 5408

SEQ ID NO: 11348 - DNA, 150 bp, Homo sapiens
aagacctggcacggtggctcacgcctgtaatcccagcactttgggaggccgaggtgagcagattacgaggtcaggagatggagaccatcctggcaagcacggtgaaaccccatctctactaaaaatacaaaaaattagccgggcgtggtg

SEQ ID NO: 11349 - DNA, 283 bp, Homo sapiens; identical to SEQ ID NO: 5410

SEQ ID NO: 11350 - DNA, 1052 bp, Homo sapiens; identical to SEQ ID NO: 8920

SEQ ID NO: 11351 - DNA, 203 bp, Homo sapiens; identical to SEQ ID NO: 8921

SEQ ID NO: 11352 - DNA, 293 bp, Homo sapiens; identical to SEQ ID NO: 5412

SEQ ID NO: 11353 - DNA, 295 bp, Homo sapiens; identical to SEQ ID NO: 5413

SEQ ID NO: 11354 - DNA, 263 bp, Homo sapiens; identical to SEQ ID NO: 5416

SEQ ID NO: 11355 - DNA, 294 bp, Homo sapiens; identical to SEQ ID NO: 5420

SEQ ID NO: 11356 - DNA, 149 bp, Homo sapiens
tcacgcctgtaatcccagcactttgggaggccaaggtgggcagatcactaggtcaggagattgagaccatcctggctaacatggtgaaaccccgtctctactaaaaatacaacaattagccgggtgtggtggcgggtgcctgtagtccc

SEQ ID NO: 11357 - DNA, 305 bp, Homo sapiens; identical to SEQ ID NO: 5422

SEQ ID NO: 11358 - DNA, 316 bp, Homo sapiens; identical to SEQ ID NO: 5429

SEQ ID NO: 11359 - DNA, 130 bp, Homo sapiens; identical to SEQ ID NO: 8935

SEQ ID NO: 11360 - DNA, 246 bp, Homo sapiens
gaggctgaggcaggcggatcacgaggtcaggagatcgagaccatcctgggtaacacggtgaaaccccgtctctactaaaaatacaaaaaaattagccaggcatggtgcggcgcctgtagtcctagctacttgggaggctgaggcaggagaatggcatgaacccgggaagcggagcttgcagtgagccaagatcgcgccactgcactccagcctgggcgacagagcaagactccatcaaaaaaaaaa

SEQ ID NO: 11361 - DNA, 257 bp, Homo sapiens; identical to SEQ ID NO: 7817

SEQ ID NO: 11362 - DNA, 298 bp, Homo sapiens; identical to SEQ ID NO: 5442

SEQ ID NO: 11363 - DNA, 140 bp, Homo sapiens; identical to SEQ ID NO: 8940

SEQ ID NO: 11364 - DNA, 306 bp, Homo sapiens; identical to SEQ ID NO: 5445

SEQ ID NO: 11365 - DNA, 143 bp, Homo sapiens; identical to SEQ ID NO: 8943

SEQ ID NO: 11366 - DNA, 170 bp, Homo sapiens
cacacctgtaatcccagcactttgggaggctgaggtgggcagatcacgaggtcaggagattgagaccatcttggctaacatggtgaaaccccgtctctactaaaactacaaaaaattagccaggcatggtggtgggtacctatagtcccagctactcaggaggctgaggc

SEQ ID NO: 11367 - DNA, 279 bp, Homo sapiens; identical to SEQ ID NO: 8945

SEQ ID NO: 11368 - DNA, 95 bp, Homo sapiens
ttgggaggctgaggtgggcagatcatgaggtcaggagatcgagaccatcctggctaacacggtgaaaccccgtctctacaaaaaatacgaaaaat

SEQ ID NO: 11369 - DNA, 271 bp, Homo sapiens; identical to SEQ ID NO: 5448

SEQ ID NO: 11370 - DNA, 296 bp, Homo sapiens; identical to SEQ ID NO: 5450

SEQ ID NO: 11371 - DNA, 285 bp, Homo sapiens
acacctgtaatcccagcactttgggaggccaaggtgggcagatcacaaggtcaggggatcgacaccatcctggctaacatggtgaaaccccgtctctactaaaaatacaaaaaattagctgggcgtggtggcgggcacctgtagtctcagctactcaggaggctgaggcaggagaatggtgtgaatccaggaggcggagcttgcagtgagccaagatagcgccactgcactccagcctgggcgaaagagcgagactccatctcaaaaaaaaaaaaaaaaaaaaaa

SEQ ID NO: 11372 - DNA, 230 bp, Homo sapiens
gtggctcacgcctgtaatccagcattttgggaggccgaggcgggcggatcacgaggtcaggagatcaagaccatcctggctaacacggtgaaactccgtctttactaaaaatacaaaaaattagccaggtgtggtggcgagcacctgtagtcccagctactccgaaggctgaggcaggagaatggcgtgaacccgggaggcggagcttgcagtgagccgagatcgcacca

SEQ ID NO: 11373 - DNA, 100 bp, Homo sapiens; identical to SEQ ID NO: 8951

SEQ ID NO: 11374 - DNA, 281 bp, Homo sapiens; identical to SEQ ID NO: 8952

SEQ ID NO: 11375 - DNA, 226 bp, Homo sapiens
cacgcctataatcccagcactttgggaggctgaggcgggcggatcacgaggtcaggagctcgagaccatcctggctaacacggtgaaaccctgtctctactaaaaaatacaaaaaattagccgggcgtggtggcgggcgcctgtagtcccacctacttgggaggctgaggcaggagaatggcatgaacccgggaggtggagcgtgcagtgagctgagatcgcgcca

SEQ ID NO: 11376 - DNA, 300 bp, Homo sapiens; identical to SEQ ID NO: 5461

SEQ ID NO: 11377 - DNA, 165 bp, Homo sapiens
taatcccagcactttgggaggttgaggtgggcggatcacaaggtcaggagatcgagaccatcctggctaacacggtgaaaccccgtctctactaaaattacaaaaaattacccgggcatggtggcgggcacctgtagtcccagctactccggaggttgaggcagg

SEQ ID NO: 11378 - DNA, 140 bp, Homo sapiens; identical to SEQ ID NO: 8958

SEQ ID NO: 11379 - DNA, 252 bp, Homo sapiens
ttgggaggccaaggagggcagatcatgaggtcaggagatcgagaccagcctggctaacacggtgaaaccccgtctctactaaaaatacaaaaaattagccaggtgcggtggcggacgcctgtagtcccagctactcgggaggctgaggcaggagaatggcatgaacccaggaggcagagcttgagtgagccgagatcgcgccactgcactccagcctgggctacagagcgagactctgtctcaaaaaaaaaa

SEQ ID NO: 11380 - DNA, 301 bp, Homo sapiens; identical to SEQ ID NO: 5468

SEQ ID NO: 11381 - DNA, 2548 bp, Homo sapiens; identical to SEQ ID NO: 5470

SEQ ID NO: 11382 - DNA, 6141 bp, Homo sapiens; identical to SEQ ID NO: 5471

SEQ ID NO: 11383 - DNA, 205 bp, Homo sapiens; identical to SEQ ID NO: 8965

SEQ ID NO: 11384 - DNA, 299 bp, Homo sapiens; identical to SEQ ID NO: 8967

SEQ ID NO: 11385 - DNA, 288 bp, Homo sapiens; identical to SEQ ID NO: 5476

SEQ ID NO: 11386 - DNA, 282 bp, Homo sapiens; identical to SEQ ID NO: 5477

SEQ ID NO: 11387 - DNA, 275 bp, Homo sapiens; identical to SEQ ID NO: 5478

SEQ ID NO: 11388 - DNA, 133 bp, Homo sapiens; identical to SEQ ID NO: 8971

SEQ ID NO: 11389 - DNA, 139 bp, Homo sapiens
  SITE (80): n equals a,t,g, or c
tggctcacgcctgtaatcccagcactttgggaggccaaggtgggcggttcgcaaggtcaggagatcgagaccatcctggntaacacggtgaaaccccgtctctactaaaaatacaaaaaaattagccggatgtggtggc

SEQ ID NO: 11390 - DNA, 292 bp, Homo sapiens
ggctacgcacggtggctcacgcctgtaatcccagcactttgggaggccgaggtgggtggatcacgaggtcgggagatcgagaccatcctggctaacacggtgaaaccccgtctctactaaaaaatacaaaaaattagccgggcgtggtggcgggctccggtagtcccagctacacgggaggctgaggcaggagaatggcctgaacccggaaggcggagcttgcagtgagctgagatcgtgccactgaactccagcctgggagacagagtgagactccgtctcaaaaaaataa

SEQ ID NO: 11391 - DNA, 254 bp, Homo sapiens
cagcactttgggaggccgaggcgggcagatcacgaggtcaggaggtcgagaccatcctggctaacacagtgaaaccccgtctctgctaaaaatacaaaaaattagccgggcgtggtggcgggcgcccgtagtcccagctactcgggaggctgaggcaggagaatggcatgaacccgggaggcggaggttgcagatcgcgccactgcactccagcctgggcgacagagcgagactccgtctcaaaaaaaaaaaaa

SEQ ID NO: 11392 - DNA, 97 bp, Homo sapiens
cactttgggaggctaaggcaggcagatctcgaggtcaggagatcgagaccatcctggctaacgcggtgaaaccccgtctctactaaaaatacaaaaa

SEQ ID NO: 11393 - DNA, 183 bp, Homo sapiens
ctgggcgcggtggctcacgcctgtaatcctagcactttgggaggctgaggcaggcagatcatgaggtcaggagatcgagaccatcctggctaacatggtgaaaccccgtctctactaaaaatacaaaaaaattagccaggtgtggtggtgggcacctgtagtcccagctactcgggaggctga

SEQ ID NO: 11394 - DNA, 301 bp, Homo sapiens; identical to SEQ ID NO: 5486
  SITE (98): n equals a,t,g, or c

SEQ ID NO: 11395 - DNA, 301 bp, Homo sapiens; identical to SEQ ID NO: 5488

SEQ ID NO: 11396 - DNA, 182 bp, Homo sapiens; identical to SEQ ID NO: 6521

SEQ ID NO: 11397 - DNA, 300 bp, Homo sapiens; identical to SEQ ID NO: 8977

SEQ ID NO: 11398 - DNA, 611 bp, Homo sapiens; identical to SEQ ID NO: 5489

SEQ ID NO: 11399 - DNA, 110 bp, Homo sapiens
tgtaatcctagcactttgggagggcaaggcgggcagatcacgaggtcagaagatcgagaccatcctggctaacacggtgaatctccgtctctactaaaaatacaaaaaaa

SEQ ID NO: 11400 - DNA, 291 bp, Homo sapiens; identical to SEQ ID NO: 5490

SEQ ID NO: 11401 - DNA, 192 bp, Homo sapiens
ggggctggcgcggtgactcacgcctgtaatcccagcactttgggaggctgaggtgggcggatcacgaggtcaggagattgagaccatcctggctaacaaggtgaaaccccatctctactaaaaatacaaaaaattagccaggcgtggtggcgggtgcctgtagtcccagctactcgggagggtgaggcagaa

SEQ ID NO: 11402 - DNA, 197 bp, Homo sapiens; identical to SEQ ID NO: 8981

SEQ ID NO: 11403 - DNA, 257 bp, Homo sapiens
cagcactttgggaggtcgaggcgggcagatcacgaggtcaggagatcaagaccatcctgcctaacacggtgaaaccccgtctctactaaaaatacaaaaaattagccgggcgtggtggcaggcgcgctgtagtcccagctactctggaggctgaggcaggagaatggcgtgaacccgggaagcagagcttgcagtgagccgagatcatgccactgcactccagcctgggtgacagagcgagactccatctcaaaaaa

SEQ ID NO: 11404 - DNA, 135 bp, Homo sapiens
aggctgggcgcggtggctaacgcctgtaatcccagcactttgggaggctgaggcgggcagatcacgaggtccggagatcgagacgatcctggctaacacggtgaaaccccgtctctactaaaaataaaaaaaaaa

SEQ ID NO: 11405 - DNA, 297 bp, Homo sapiens; identical to SEQ ID NO: 5498

SEQ ID NO: 11406 - DNA, 292 bp, Homo sapiens; identical to SEQ ID NO: 5501

SEQ ID NO: 11407 - DNA, 134 bp, Homo sapiens
ggctcacccccgtaatcccagcactttgggaggctgaggcgggcagatcaccaggtcaggagattgagaccatcctggctaacacggtgaaaccccgtctctactaaaaatacaaaaaattagctgggcgtggt

SEQ ID NO: 11408 - DNA, 263 bp, Homo sapiens; identical to SEQ ID NO: 5504

SEQ ID NO: 11409 - DNA, 280 bp, Homo sapiens; identical to SEQ ID NO: 5505

SEQ ID NO: 11410 - DNA, 125 bp, Homo sapiens
cacgcctgtaatcccagcactttgggaggctgaggagggtggatcacgaggtcgggagatcgagaccatcctgactaacacagtgaaaccccatctctactaaaaatacaaaaaaaaaaaaaaaa

SEQ ID NO: 11411 - DNA, 202 bp, Homo sapiens
cccagcactttgggaggctaaggtgggcagatcacgaggtcaggagatcaagaccatcctggctaacacggtgaaaccccgtctctactaaaaatacaaaaaaaattagccgggtgtggtggcgggcgcctgtagtcccagctactggggaggctgaggcaagagaatggcgtgagcccgggaggcagagcttgcagtgagc

SEQ ID NO: 11412 - DNA, 249 bp, Homo sapiens
gcgggcagatcacgaggtcaggagatcgagaccatcctggctaacacggtaagaccccatctctactaaaaatacaaaaaaaaaattagccgggtgtggtggcgggcgcctgtagtcccagctactcaggaggctgaggcaggagaatggcatgaacccgggaggcggagcttgcagtgagctgacatcgcaccactgcactccagcgtgggtgacagagtgagactccgtctcaaaaaaaaaaaaaaa

SEQ ID NO: 11413 - DNA, 129 bp, Homo sapiens
cgtggtggctcacgcctgtaatcccagcactttgggaggccgaggcaagcagatcacgaggtcaggagatcgagaccatcctggccaacatggtgaaaccccatctctactaaaaatacaaaaaaaaaa

SEQ ID NO: 11414 - DNA, 1635 bp, Homo sapiens
tataattcttttaatgtgcattttaattccatttgctagtgttctgttgaggatttttgcatcagggatattggtctgtagttttcttgtgtctttgtctggctttggtgtcagagaaatgcaggcctcctagaatgtgtttgaaaagtgttccctctgtttcagttctttggaagatagctgtttgaggaagattgatgttaattctttaagtgttcagcagaattttccagtgaagttctctggtcctgggtttttctttgctgagaggtttttgattactgctttaatccccttagttattataagtgtgttcaaagtttttatttctccatgattcacccatggaaaattgtttttagaggtttatccatttcttgtagattatccaatttgttggcacataattgttcctagtagtctcttgtaattcttctatttctgtgatatcagttgttatgttccctctttcatttctacttttagttatttgaatcttctttttttcttagctaatctagctaagggtttattaattttattgatcttttcaaaaaccaactctaggtttctttgggtttttttctgcttttttttttctatttatttatttttttctatttatttatctgatctaatctttatttttttttctcccttctgctaattttgggtttagtttgtttctttttttcaatttccttgaggttgaagttaggttgctgattttgagatctttcttcttttttttaatgtaaatgtttactggtataaacttccctctttgtatggcttttgctatatatcatacattttggtatatttttttttttgttttcgtttgtttctggatttttttctaaatcccttgtgatttcttctttgacccattggttgtttaggggcgagttgtttaatttccacacatttgtgtattttctgggtttacttttctgctattgacttctagtttcattttgttgtagtcagagaagatacattgcatagttttagtcttcttaaatttgttggtgggcggcactggctcacacctgtaatcccaacactttgggaggctgaggtgggcaggtcacttgagttcaggagttcaagagttcaagaccagtctgggcaacatgacgaaatcctgtctctaataaaaatacaaaaaattcactgggcatggtggtgcataccagtagtcccacctactcgggagtctgaggtgggagtatcagttgagcccaggagattgaggctacagtgagccttgtgctctccagcctgggtgacagagtgaaaacctgtcttaaaaaaaattgttggctgggcacggtggcccacgcctgtaatcccagcactttgggaggctgaggtgggcagatcacaaggtcaggagatcgagaccatcctggctaacacggtgaaactccgtctctactaaaaatacaaaaaattagccgggcgtggtggcgggcgcctagtagtcccagctactagggaggctgaggcaggagaatggcgtgaacccgggaggtggagcttgcagtgagccgagatagcgccactgcactccagcctgggcgacacagtgagactctgtctcaaaaaaaaaaaaaaaaaaaaattgttgag

SEQ ID NO: 11415 - DNA, 148 bp, Homo sapiens; identical to SEQ ID NO: 8735

SEQ ID NO: 11416 - DNA, 3905 bp, Homo sapiens; identical to SEQ ID NO: 5513

SEQ ID NO: 11417 - DNA, 153 bp, Homo sapiens
cactttgggaggccgaggtgggtggatcatgaggtcaggagatcgagaccatcctggctaacacggtgaaacctcgtctctactaaaaaatacaaaaaaaattagccgggcgtggtggtgggcacctgtagtcccagctactggggaggctga

SEQ ID NO: 11418 - DNA, 275 bp, Homo sapiens; identical to SEQ ID NO: 8582

SEQ ID NO: 11419 - DNA, 264 bp, Homo sapiens; identical to SEQ ID NO: 8992

SEQ ID NO: 11420 - DNA, 147 bp, Homo sapiens
atctcagcactttgggaggctgaggcgggcagatcacaaggtcaggagatcgagaccatcctggctaacatggtgaaaccccatctctactaaaaatacaaaaaattagccaggcatggtggcggtcgcctgtagtcctagctactc

SEQ ID NO: 11421 - DNA, 237 bp, Homo sapiens; identical to SEQ ID NO: 8994

SEQ ID NO: 11422 - DNA, 126 bp, Homo sapiens
tgtaatcccagcactttgggaagctgaggtggacggatcacaaggtcaggagatcgagaccatcctggccaacatggtgaaaccccgtctctactaaaaatacaaaaaattagctgggcatggtcg

SEQ ID NO: 11423 - DNA, 1855 bp, Homo sapiens
cgcggtggctcacgcctgtaatcccagcactctgggaggctgaagtgggcggatcacgaggtcaggagatcgagaccatcctggctaacacagtgaaaccccgtctctactaaaaatacaaaaaattagccgggcgtggtggcaggtgtctgtagtcccagctacttgggaggctggagctggagaatggcatgaatccgggaggcagaacttgcagtgagtcaagatcgcaccactgcactccagcctgggtgacagagtgagactccatctccaaaaaaaaaaaaaaaaggggccgggtgcggtggctcatgcctgtaatcccagcactttgggaggctggatcacctgaggtcaggagtttgagaccagcctggtcaacatggtgaaaccccatctctactaaaaatagaaaaaaataaccaggtgtggtggtgtgcactctgtaaccccagctactcaggaggctgagacaggagaatcgcttgaaacgcaggaggcggaggttgcagtaagcagagattgcatgccactgcactccagcctgggcaacaagagtgaaactccatctcaaaaaacaaaacaaaaaaaaaatgaggaagggcatttcttgcttagtgccttttaaacacctaatagaactctctggaagctgtgttggacatgggtgcaagttgcagtatggtgcagtcctggctcagtaggaggttccatcaaccaggagcccctttgttattctgtttctgttttttcatggtggataatgtctatgatgttgtgggtactacataggtgagactatatagcacagcctctacctttataagtggtggcaataagcatgtgattaactgtcatacaaccacagagcaaacagatttcagggaaaaaaaaacacactttagtcctttatcaataacgccccctttctcaatgggctagactcctctttgttcttccctatacctttaaagaatacaactatcagcttacaagaaaaacttttcctaagtccaaggacaggagaggcgcagtggctcacccctgcaattccagcaatttgggaggccaaggtgggtggatcacctgaggtcaggagttcgagaccagcctgactgacataatgaaaccccatcgctactaaaaaaaatacaaaattagccaggtgtagtggcacgtgcctgtaatcccagctactcaggaggctgaggcaggagaattgtttgagcccaggaggtggaggatgcagtgagccaaggtcatgccattacacgccagcctggtcaaccagagcaaaaccgtctcaatcaatcaatcaatcaatcaagtccaaggacagaacaaacaaaagtaaaataccttattcctcttctaagcttcttaaattgctaggccttggtttattgacaaaatattgtcatgattgcatgttttatttgctttacaatggtttcgtggtcttattttatttcaaacacttgatgttatagtaagctatcttctgcatcaatgaggaaaaaataaaactgatatttaaaaatgcattttagaaatttggtgcagtggccaggcgcggtggctcacgcctgtaatcccagcactttgggaggctgaggcgggtggatcacaaggtcaggagatcgagaccatcctagctaacacagtgaaaccccatctctgctaaaaatacaaaaaattagccgggcgtggtggcgggcacctgtagtcccagctactcgggaggctgaggcaggagaatggcatgaacccgggaggcagagcttgcagtgagccgagattgcgccactgcactccagcctgggcgacatagcaagactctgtctcaaaaaaaaaa

SEQ ID NO: 11424 - DNA, 176 bp, Homo sapiens; identical to SEQ ID NO: 8996

SEQ ID NO: 11425 - DNA, 278 bp, Homo sapiens; identical to SEQ ID NO: 5524

SEQ ID NO: 11426 - DNA, 176 bp, Homo sapiens; identical to SEQ ID NO: 8998

SEQ ID NO: 11427 - DNA, 2364 bp, Homo sapiens; identical to SEQ ID NO: 5525

SEQ ID NO: 11428 - DNA, 263 bp, Homo sapiens
ctttgggaggccgaggtgggcagatcacgaggtcaggagatcaagaccatcctggctaacatggtgaaaccccatctctactaaaaatacaaaaaaatgagccaagcatggtggcgggcgcctgtagtcccagctacttgggaggctgaggcaggagaatggcatgaacccggccggcggagcttgcagtgagccgagatcacaccactgcactccagcctgggcaacagagcaagactccgtctcaaaaaaaaaaaaaaaga

SEQ ID NO: 11429 - DNA, 119 bp, Homo sapiens
acgcctgtaatcccagcactttgggaggccgaggcgggcagatcatgaggtcaggagatcgagaccatcctggctaacacagtgaaaccctgtctctactaccaatacaaaaaaaaaaa

SEQ ID NO: 11430 - DNA, 297 bp, Homo sapiens; identical to SEQ ID NO: 5528

SEQ ID NO: 11431 - DNA, 169 bp, Homo sapiens; identical to SEQ ID NO: 9004

SEQ ID NO: 11432 - DNA, 93 bp, Homo sapiens
ttgggaggctgaggcgggcagatcacaaggtcaggagatcgagaccatcctggctaacacggtgaaaccccttctctactaaaaatacaaaaa

SEQ ID NO: 11433 - DNA, 282 bp, Homo sapiens; identical to SEQ ID NO: 9008

SEQ ID NO: 11434 - DNA, 300 bp, Homo sapiens
atttttggctgggcgcggtgggtcacgcctgtaatcccagcactttgggaggccgaggcggacggatcacaaggtcaggagatcgagaccatcctggctagcacggtgaaaccccgtctctactaaaaatacaaaaaattagccgggcgtggtggcgggcacctgtagtcccagctactcgggaggctgaggcaggagaatggcgtgaacctgggaggtggagcttgcagtgagccaagatcgcgccactgcactctagcctcctgggcaacagagcaagactctgtctcaaaaaaaaaa

SEQ ID NO: 11435 - DNA, 131 bp, Homo sapiens; identical to SEQ ID NO: 9011

SEQ ID NO: 11436 - DNA, 128 bp, Homo sapiens
gtgcggtggctcactcctgtaatctcagcactttgggaggccgaggtgggtagatcacgaggtcaggagatcgagaccatcctggctaacagggtgaaaccccatctctactaaaaatacaaaaaaaa

SEQ ID NO: 11437 - DNA, 281 bp, Homo sapiens; identical to SEQ ID NO: 5541

SEQ ID NO: 11438 - DNA, 301 bp, Homo sapiens; identical to SEQ ID NO: 5542

SEQ ID NO: 11439 - DNA, 310 bp, Homo sapiens; identical to SEQ ID NO: 5543

SEQ ID NO: 11440 - DNA, 1635 bp, Homo sapiens; identical to SEQ ID NO: 11414

SEQ ID NO: 11441 - DNA, 145 bp, Homo sapiens
cgggcatggtggctcacgcctgtaatcccagcactttagaggccgaggtgggcggatcacgaggtcaggagatcgagaccatcctggctaacatggtgaaacccagtctctactaaaaatacaaaaattagctgggcttggtggc

SEQ ID NO: 11442 - DNA, 277 bp, Homo sapiens; identical to SEQ ID NO: 5549

SEQ ID NO: 11443 - DNA, 175 bp, Homo sapiens; identical to SEQ ID NO: 9020

SEQ ID NO: 11444 - DNA, 303 bp, Homo sapiens; identical to SEQ ID NO: 5550

SEQ ID NO: 11445 - DNA, 309 bp, Homo sapiens; identical to SEQ ID NO: 5551

SEQ ID NO: 11446 - DNA, 253 bp, Homo sapiens; identical to SEQ ID NO: 8600

SEQ ID NO: 11447 - DNA, 287 bp, Homo sapiens; identical to SEQ ID NO: 5559

SEQ ID NO: 11448 - DNA, 260 bp, Homo sapiens; identical to SEQ ID NO: 8603

SEQ ID NO: 11449 - DNA, 273 bp, Homo sapiens; identical to SEQ ID NO: 5561
  SITE (18): n equals a,t,g, or c

SEQ ID NO: 11450 - DNA, 279 bp, Homo sapiens; identical to SEQ ID NO: 5923

SEQ ID NO: 11451 - DNA, 225 bp, Homo sapiens
tcattgtaggctgggtgcggtggctcacgcctgtaatcccagcactttgggaggccgaggcgggcggatcacgaggtcaggagatcgagaccatcctggctaacacggtgaaaccccgtctctactaaaaatacaaaaaattagccgggcttggtggcgggcgcctgtagtcccagctactcgagaggctgaggcaggagaatggcgtgaacccgggaggcggag

SEQ ID NO: 11452 - DNA, 320 bp, Homo sapiens; identical to SEQ ID NO: 5570

SEQ ID NO: 11453 - DNA, 124 bp, Homo sapiens; identical to SEQ ID NO: 9033

SEQ ID NO: 11454 - DNA, 308 bp, Homo sapiens; identical to SEQ ID NO: 5572

SEQ ID NO: 11455 - DNA, 164 bp, Homo sapiens
aatcccagcactttgggaggctgaggtgggtggatcacaaggtcaggagttcgagaccagcctggccaacatggtgaaaccccgtctctattaaaaatacaaaaattagccaggcatggtggcaggtgcctgtaatcccagctactcgggagactgaggcagga

SEQ ID NO: 11456 - DNA, 300 bp, Homo sapiens; identical to SEQ ID NO: 5574

SEQ ID NO: 11457 - DNA, 279 bp, Homo sapiens; identical to SEQ ID NO: 5577

SEQ ID NO: 11458 - DNA, 287 bp, Homo sapiens; identical to SEQ ID NO: 5579

SEQ ID NO: 11459 - DNA, 266 bp, Homo sapiens; identical to SEQ ID NO: 5581

SEQ ID NO: 11460 - DNA, 322 bp, Homo sapiens; identical to SEQ ID NO: 5582

SEQ ID NO: 11461 - DNA, 5125 bp, Homo sapiens; identical to SEQ ID NO: 8039

SEQ ID NO: 11462 - DNA, 154 bp, Homo sapiens
tgggcacggtggctcacgcctgtaatccaagcactttgggaggccgaggtgggcagatcacgaggtcaagagaacgagaccatcctggccaacatggtgaaaccccgtctctactaaaaatacaaaaattagctgggcatagtggtgcatgcct

SEQ ID NO: 11463 - DNA, 140 bp, Homo sapiens; identical to SEQ ID NO: 9045

SEQ ID NO: 11464 - DNA, 281 bp, Homo sapiens; identical to SEQ ID NO: 5587

SEQ ID NO: 11465 - DNA, 270 bp, Homo sapiens; identical to SEQ ID NO: 5591

SEQ ID NO: 11466 - DNA, 296 bp, Homo sapiens; identical to SEQ ID NO: 8040

SEQ ID NO: 11467 - DNA, 238 bp, Homo sapiens; identical to SEQ ID NO: 9052

SEQ ID NO: 11468 - DNA, 301 bp, Homo sapiens; identical to SEQ ID NO: 5594

SEQ ID NO: 11469 - DNA, 178 bp, Homo sapiens
gtggttcacgcctgtaatcccagcactttcggagggtgaggcgggcggatcacaaggtcaggagatcgagaccatcctggctaacacggtgaaaccccgtctctactaaaaatacaaaaattagccgggcatggtggtgggcgccagtagtcccagctacttgggaggctgaggcagg

SEQ ID NO: 11470 - DNA, 201 bp, Homo sapiens
cagcactttgggtggctgaggcaggcagatcacgaggtcaggagatcgagaccatcctggctaacacggtgaaaccccgtctctactaaaaatgcaaaaaaaattcgctgggcgtggtggcgggcgcctgtagtcccagctactcgggaggctgaggcaggagaatggcgtgaaccctggggggctgagcttgcagtgagc

SEQ ID NO: 11471 - DNA, 192 bp, Homo sapiens
ttagctgggcacagtggctcacgcctataatcccagcactttggaaggctgaagcgggcagatcacgaggtcaggagatcgagaccatcctggctaacacagtgaaaccccgtctctactaaaaatacaaaaaattagccgggcttggtggcgggtgcctgtagtcccagctacttgggaggctgaggcagg

SEQ ID NO: 11472 - DNA, 307 bp, Homo sapiens; identical to SEQ ID NO: 5607

SEQ ID NO: 11473 - DNA, 137 bp, Homo sapiens
ccaggtgcggtggctcacgcctgtaatcccagcactttgggaggccgaggcgggcagatcacgaggtcaggagatcgagaccatcctagctaacacagtgaaaccctgtctctactaaaaatacaaaaaattagcca

SEQ ID NO: 11474 - DNA, 146 bp, Homo sapiens
ggcacggtggctcacgcctgtaatcccagcactttgggaggccaaggtgggcagatcacaaggtcaggagatcgagaccattctggctaacatggtgaaaccccatctctactgaaaatacaaaaaattagccgggtgtggtggca

SEQ ID NO: 11475 - DNA, 1209 bp, Homo sapiens; identical to SEQ ID NO: 5609

SEQ ID NO: 11476 - DNA, 5775 bp, Homo sapiens; identical to SEQ ID NO: 7562

SEQ ID NO: 11477 - DNA, 738 bp, Homo sapiens; identical to SEQ ID NO: 7563

SEQ ID NO: 11478 - DNA, 1096 bp, Homo sapiens; identical to SEQ ID NO: 5615

SEQ ID NO: 11479 - DNA, 293 bp, Homo sapiens; identical to SEQ ID NO: 5617

SEQ ID NO: 11480 - DNA, 131 bp, Homo sapiens
ttttttttttgagacagagtctcgctctgtctcccaggctggagtgcagtggcacgatctcggctcactgcaagctctgcctcctgggttcacgccattctcctgcctcagcctcccgagtagctgggact

SEQ ID NO: 11481 - DNA, 523 bp, Homo sapiens; identical to SEQ ID NO: 9070

SEQ ID NO: 11482 - DNA, 128 bp, Homo sapiens
tttttttgagacagagtctcgctctgtcacccaggctggagtgcagtggcgcgatctcggctcactgcaagctccgcctcccgggttcacgccattctcctgcctcagcctcccgagtagctgggact

SEQ ID NO: 11483 - DNA, 209 bp, Homo sapiens
agtgtgggtagattcatgaatgatgagacagcacatggagacagagaggccatgtggaggagctaaggcatcagatattttagtgcagccattttggactttctaggctaactcagttgaataagtggcactaagatgccacctggagcagaagaaccaaccagctgagccctacccaaattcctgatccgcaaaatcatgagaaataa

SEQ ID NO: 11484 - DNA, 132 bp, Homo sapiens
attcttcacatataggaaaatgtgataaaaaaataaacagaattgatttaagttaaaaaaaaaaaaggtaatatttaacctccgtgggttttccaatttactgaaagcatgaggaagatgcttagccagatc

SEQ ID NO: 11485 - DNA, 380 bp, Homo sapiens
caggtgcccaccaccacacccagctaatttttgtatttttagtagagatggggtttcaccgcgttgttcaggctggtcgcgaactcctgacctcaggtgatccacctgcctcggtctcccaaagtgctgggattacaggtgtgagccaccgcgcctggccttctttacttttgaattacaattttgtcagatataatattcttggctggccagtttttgtttagtatgttttagcactttgaacatatcattccaccctcttctagcctataataaagtttcttctgggaaatctgctgataatctaatagacgttatcttgtatttgttgggtcactttcctcttatggctttcaggattctttgtgacttttgacaac

SEQ ID NO: 11486 - DNA, 97 bp, Homo sapiens
ggggtttcaccatgttggtcaggctggtttcaaactcctgacttcaggtgatccacccatctcggcctcctaaagttctgggattataggcgtgagc

SEQ ID NO: 11487 - DNA, 380 bp, Homo sapiens; identical to SEQ ID NO: 11485

SEQ ID NO: 11488 - DNA, 1686 bp, Homo sapiens
ttccttgtatgaaaagatttaatgaattatgagccattgatcattacaaactttaagccttaatatttcttctttcctatgtaaaaccaggtaattaaaacagcctgtctcagtatgacagaagaccatagtagggataatagtaacgtctgcttccacatctgcatgcttcgttaaccaaccaaagaaagtgctccaggtttcccaagtcaacaaagtatactcagttacactttccctgatcatactatgaattgaaacagaacactcctttgacttttaatagcacttttcatccacggcacaagcactttcccattattttctcctttaccctcaatatccttgtgaggtagtgaagggagggagcaaggatttttttttttctattttgcagatgagaaaactcaaggtgaattttacaacagtggttctcaaccttggcagcatattgaaatgaccagaaagtttttaaaaatccttatgaccagctcatattccagaccaacatcagaatcttggcatacggaacccaagcatcgatgtgtcttccaacattccaaagtgactacaaagtgtatacagccaacactgagaaccactggtttgaatgatttacactcaatcttcaggcgcaactgtcttctaccgaaatgctctcctcagcaccaatgacaaagatattccatctccttgagcactgcagcagtttaagattttgtagagctactactgggttttagtgacaaatttacgtaaatgaaggccctcatgacccagatgctcatgctgctcacttcaattgcatatgatttgcgaatgggacattcgggaatttaaatctttgagataagaatggcttgttgttaaatattgaggcaattatttcattctaggtccaatacgcaataaccatgtgtttcggttttccactcagcaccttcaaaactgttgcaaatgaatgtttactaacaagacaaaagagacaattataaaccaaactctcaacaaaattcggaatggccacatcacaacctgaaaaagaaacaagtacttaaaggacttgatcacttcctaacaagtccatcttcaacctgaaccacttctcttgtttaatcaaattttaaactttgccgaactgagttgttctacaccaagaaaaatcaatttctataccacctacattctctaatacatttaacatataatttcactcaatacaaggaggtttcttcttaacctggacatcgaaaagaatctttaacagatttcatcttttcaagcaatgtatcaaatacacaataaatacttgtaaacttttcaggtggcaacaataaatctttgttctatggctgaaatcccttgcttcacaggagtattgacaatcttaactcccaaggagcaatccaagaatcccggccagctgctgggtgtccctaatcagatttaaaacaaaacatacatacagcaagaactcagaagtacaaagatttcgctcgcttttgtcaattcttatgtatctaaaaccatacaatttatactttcatacagaaagatgtctgtttcttttctaacaaaagaaaaactctcagctcatgtgggttggattattaattcaaaagcattttagtgatgagaaacaagatttgtaagtcaaaataggagttaatgttaaactcttctaca

SEQ ID NO: 11489 - DNA, 729 bp, Homo sapiens
gaatttaactttaaaaacccacttattgataccttaccatctaaaatgtgtgatttttatagtctcgttttaggaatttcacagatctaaattatgtaactgaaataaggtgcttactcaaagagtgtccactattgattgtattatgctgctcactgatccttctgcatatttaaaataaaatgtcctaaagggttagtagacaaaatgttagtcttttgtatattaggccaagtgcaattgacttcccttttttaatgtttcatgaccacccattgattgtattataaccacttacagttgcttatattttttgttttaacttttgttttttaacatttagaatattacattttgtattatacagtacctttctcagacattttgtagaattcatttcggcagctcactaggattttgctgaacattaaaaagtgtgatagcgatattagtgccaatcaaatggaaaaaaggtagttttaataaacaagacacaacgtttttatacaacatactttaaaatattaaggagttttcttaattttgtttcctattaagtattattctttgggcaagattttctgatgcttttgattttctctcaatttagcatttgcttttggtttttttctctatttagcattctgttaaggcacaaaaactatgtactgtatgggaaatgttgtaaatattaccttttccacattttaaacagacaactttgaatac

SEQ ID NO: 11490 - DNA, 184 bp, Homo sapiens; identical to SEQ ID NO: 5634

SEQ ID NO: 11491 - DNA, 500 bp, Homo sapiens
gagatttcttacttgttgatcacttattctggtacctttccccaaatgatattactgatttaattaggagatacaggttagagggtgctctttggccaattgtgaatacagtaattgatcaaaaaaaaaaggaggatggaagtacgtacacacatattaacatgataattatagctaaagtggtactcttttttaatagcagtgcatcctagagagtaaaatatgatggttctcaagaaacattctgctggggaaaacagtgtttgaatcttagtattttatggaactgcttttttgcttttataaaagcaatttttgtattgacttttggaagaaaatcagttccaataaagcacacattttcatttgtatatctgtcagaagctgatagatttactatactattctgttttgaataataaaaattgcaggcataattaaataaccaaatagttatcccaatgagagagttgctgtatagtttaagagacagatgttca

SEQ ID NO: 11492 - DNA, 577 bp, Homo sapiens
attagtctggctttaaacttaaaatccacacactgtcttattttgacaactgtgcaaaaaatagaacacaggaaaagatagcccatggaatgtgagaaaatattgcaaaacatatatctgataagggattcacatgcagaatatagttgtcccttggtatatgtgggggattggttctaggacctgcctgtgtataccaaaatttgctcatacacaaatcccgcagaacctgcatatatgaaaagtcaaacataggtttcacattctgtgaatactgtattttcaatcaacatttggttgaaacaaagtctgtataagtggacccgtgtggtttatacctttggtgcgcaagggtcaactgtatgtaaagaactcctacaactcaacaacaaagaaacagtctgtttcaaaaagaagcaaaggatttgaatagacatttctctaaagaagatatacaaatggccaataagcacataaaaaaatgctcaacatatctactcattagaggaatgcaaatcaaacgtacagtgagataccatttcacacccattgtggtggccattataaaaaaaaaaaa

SEQ ID NO: 11493 - DNA, 4205 bp, Homo sapiens
ggccctgattttgttgtttgtgatgaaggccatattctaaaaaatgaagcatctgctgtttctaaagctatgaattctatacgatcaaggaggaggattattttaacaggaacaccacttcaaaataacctaattgagtgtgagttaatatctctgattatgcagtagaatattggtatttcctcagatatatttttgtaacgttaccatttacctttcttctacttattctagtatagtcctagaccatgatctacataggttcatcttagtctgctgtgaaagaataacatacttttcaaatgagatgctttataaatgagtggtaaaatacagttaagagatacgctattgtgaatgttcatatataaatatggaatgtgaattattgcaagagtatcagaagtcttaatgattgctttagaaagtacataagcatatgtgattactccagataattttaaggggatattccagttttggggcatgtactgtcaagaaatcagaaagaaatgggaactgtgaacattttagtaaagtggagatgggagaaggagaggtttgctgaatccatggcaggacagtttgctgaggctaaaggtagttgatgtgaacctagggaaatgacttgtgaattaccctcattttcgtatgtctgtggtgacactaaagaagggaacatgagattattcagcaagtaactaattgaaatttcctgttataatctctcactttttttctttttcccactgtaatggctttttgttatttttctctgtgttacattcctttagtgtatttatggtaactttttgctattttattatttgtaatactagtcatttcactttagcctatactttatgtttgtttttatctgttccagttttcctcttttctattctgttaccctatttatagaaatgctgtttcatattgtggtcctatatagtatgggacaagtgatggctctgttaatttttacaaaatgggttagtcttacaaaatacattagtaattaattttttttttttactatttgtgtagccccaactgaatactgaataacagttgttattatttgatctctcaaatattatttggttattctggaaatgaatcagttaatataaattaacttgcttagtagcttattacctcctatttattgttttgacttagtatctcctttcttcacaagatagcctcactgaccataaaatcatggttagattaatggaccacttgttttatacttcatatctcttataaagaataatagtgagtttgaataaactgtccttaggtatttttaaaaaacgttcatgtctagtatttagggatggtttttacttcaattttctctctcgttttggtaattcacttgtagatcagacttataaccatgtttattctatacttagcttgatattctttctttatagcttaattctaatgcatgtgtttttgacatgagcatttcattggggaatttttctaagtctttttaacgattgttaatgttgttaatgaataatgtcttctctcttagatcattgtatggttaattttatcaaggaaaatttacttggatccattaaggagttcaggaatagatttataaatccaattcaaaatggtcagtgtgcagattctaccatggtagatgtcagagtgatgaaaaaacgtgctcacattctctatgagatgttagctggatgtgttcaggtacaaatatgttccatagtaataaaatattcttacttttttatataacaatcccaacatattttctgagcttaaagtttaataattttgtgttttctttcccgctctttcagtagatagttttacagttatatctccttgcgttgtcttaaaaaatttctgctgcattcaacttttaaaaaagaagttccgctgagtttaaaacatagttgattcatttgccaggtgtaaagcctcatatcttattatgttaatgtttagatttttcatccttaagatagggagttccttaagaggaacatagctactatgatgaagttcctatgctcaccctaattctgtagtacagtattataaatctcacttttttgaaatggttataggagaggccagtatgaattaagagaggagccacttttaaagtaatcctggagaaacagttttgttactttcaagtatatataataacctgaacagactagtggtgtcgtttacatacagattttcagtgaatctatattaatgaatggataagtgtctagagactgagctggcagttaatagatctcaagatacgcactttctctgtagatgttaggtactgatgatagcctcaaagatgttttaacaaatgagacaggctattcttttggttggatatacagtttgccctccatatctgcaggttctgcatccatggattcaacctaccatggatcaaaaatatttttttaaaaaatagataaaatggacagaggctaggtacagtggtgcacacctgtaattccagcactttaagaggccaaggtgggaggatcacttgagcccaggagttcaaggctgcagtgagctaaaatcatgccactacactccaggctgggtgacagagcaagaccctgtctctaaaaaaagttttaaaaaattagccagccacggtggtgcgcacctatagtctctgtcacttgggaggctgaggcaggaggattgcttgagcccaggaattcaagactgcaaggagctaagattatgccactgtacttcagcctcaatgatagagtaagaccctgtctcttaaaaaaaagaaagaaaataattaagaaaaaaatggatgattgtgtctgtactgaacatgtacagacttttttcttgtcattatttcctaaacaatagagtatagcaactatttacatagtatttgtattgtgtgaggcattataagtaatctggggatgatttaaagtatatgggaggatgtttatatgttatatgcaaacactacattatttatataagtgacttgaactttcatggattttgctatctgtggaggtggggtgggttctggaaccagtctcccatagatactgaggcatgactgtacttgccatcattataaggagtagttgttccgtttggtcaggttggctacatgtgctagcaagtaccctgtttctgtattgctgctactacccaggcagcatttttctttctggtttaaggagtaatttctatttagcacattggtgttctgtttttctactcttacaataaaatggtttcaagagtgcttgtagaggggttgctttcttaattgggcaaatattccctctaaaattatatgttattgtttgacatattagcatatctttctaagaagccaactcagactgcattagactttgattcctaggttttattacatgattaaagcaaggcattttgctcacactacctactacatcccctccataccttttgttatttttttttctgtacagagaagactattttgaaaacttaaattgctcacttggtaatgtgattgcttcaatttaaaacctacctggtgtgttgcagtgtctttttaccagtgtaccatattgtatagtcatatgaaatacattgtgtagataattgtgggtttagaaagggtaaatatatttaagaaaatgttttcttatatgtttagtgcctatttatttatgtgtatatttcagttataagcaatgagaacttgtagttcattcctgttaaatatttagattaattttcattctctttcttgttaattacagaggaaagattatacagcattaacaaaattcttgcctccaaaacacgaatatgtgttagctgtgagaatgacttctattcagtgcaagctctatcagtactacttagatcacttaacaggtaaacaatacaccttgttgatttcatcttctctataaagacattctttttccaaagaagattatttcagtcatcttactatgtctgttgttctttttcagttttgcatttgaataaaatgggtatgcttaaaagcataaaatatttctaattaaaacactgatgctgtcaaaattaaaatcaagaagcaaattgatgaaaaagatatacagcacatatgaataatgcccttaatttgtaaagagcttttatttcagaaaaattatgaatgtgaataaatccat

SEQ ID NO: 11494 - DNA, 6186 bp, Homo sapiens
gctttgttcatacctctacagaaaacctgctaacagttgaattgtttgtacctcttcccactgccccacctccagctttccccagactgaatgtacttacgtagtcaaatacgtttctaagttgcctggattacttctgtatttcttttttgttctcttcctgcgattgtggtattcatgggaaatgcaaataggttgatttgttttgttttagcagtttttctcctttcccattctcactgatgtttaattttattctttgaatatgtagaatattatgtattttgtatagtaaaaactattaaaaaggctatatactcggagtctctctctttctcccatcccttctgctccattctccacactcctcccttgtaggtgatgaacctcattgttctctggtttatcgttgctataaagagaaacacatacgtgcttgttttcctgttttctttcctacacgaaacgtagcatgtatattactctttttcactttgaccttttgactttaggatatacagattgctccatatcaattcagaagcgctcctcgtcctttttcagtactccgttgtgtatatgctccagtttatttaaccagtcttctgtgcttggagatttatgtaggtttccagattttgcagttacaattaatgctataatgagtcactctgtgcatgtatgttttttatattgttggaggtgtatcttcattataaattcctaaagtaggacttctgggtaaatgcatatgtagttttgatagatattggcaaattccccttaaaaggggctgtgccagtttgcattcccagcagtgtatgagagtgcctgtttcctccacagccttatcaacagtgtattgtcaagctttgaacatttgctaatatgacaggtgagaagtggtgttttacagtagttcttatttatctttctctcattatgaatcaagtcgaatgtttaaggaccatttaaaagaattgtttgttcatctttttacctgttttcctgtatgatttgtagtttatttttcttcagtttttgaaaatatatcagtcttttgttgcatatgagtcatcattagaaagcttcctctatactcaggccagagaggcatttacccatgttttctggcatttgtacagcttttttatatttagagctctattccatatggagtttattcatgtgtgtatggtgtgaagaatgggatctaattgtatcttttttttttttttttttgtgagacggagtcttgctctgtcaccaggctggagtgcagtggaacgatctcggctcactgcaacctctgcctcccaggttcaagtgattctcctccctcagcctcccaagtagctgggattagaggtgcgtgccatcacgcccagctaatttttgtatttttactagagacggcttaaccatgttggccaggatggtctcgatctcttgacctcgtgatccgcccacctcagcttctcaaagtggtgggattacaggtgtgagccactgcacccagccttaattttatctttttccatatggcttcatagttgttacaacactattaaaaggaccatcttttctctggtaatttcagatatcatctgtatcattaatttctgtgtctacctgggacaatgtctggacttcctgttctattccatttgcctgtctatgtaccaggaccatactattttaattatagacgtttaataatatattttaatatgcaggttgccttcttcctcatctctgcagtaactgtcttcatggtttcatagccttctccctgatacccctccccaggtactaattttttctctttagttttgtctgtcctctgctgattttgtctaacttttcataataaaaaaaagttttgcctaacttttgtcctacttatgaatttttctgtcttcttcagagatttcttctgccctcttgtttgtttttccatgactgggtgacattgtttaaaaactgattggtgttgcccatggttctgtgcatcatttcaccttgccctatgctaagctgttatgcaagaatagaaaagctcattgttccattgaaaatccagggttctagcattttaacattagttccacaggggcagaaattttgtcatattcattgttgtatccctagtacttaaaaaccggtacatggcacatggtacctgtcacacagtatgttgtcagtaaatgtttgtcaagtgaatgttgttcattgttattccagtttgtttttgtttttttttaagagagtgaataggtgtccttttcattttcttggtttagtgtcacatttgaagacgagcactgaggatgaggaaccaactgaagaatatgaaaatgttggaaatgcagcatctaagtggccaaaagtggaggatcctatccctgaatctaaggttggtgacacatgtgtttgggatagcaaggtagagaatcaacagaaaaagcctgtggaaaacaggatgaaggaggacaaaagcagcatcagggaagcaatcagcaaagccaagagtacagcaaatataaagacagaacaggaaggtgaggcatctgagaagagcttgcatctgagcccacagcatatcacacaccagactatgcctataggacagagaggcagtgagcaaggcaaacgtgtggagaacattaatggaacctcctaccctagtctacagcagaaaaccaatgctgttaagaaattacataaatgtgatgaatgtgggaaatccttcaaatataattcccgccttgttcaacataaaattatgcacactggggaaaagcgctatgaatgtgatgactgtggagggactttccggagcagctcgagccttcgggtccacaaacggatccacactggggagaagccgtacaagtgtgaggaatgtgggaaagcctacatgtcctactccagccttataaaccacaaaagcacccattctggggagaagaactgtaaatgtgatgaatgtggaaaatccttcaattatagctctgttctggaccagcataaaaggatccacactggggagaagccctatgaatgtggtgagtgtgggaaggccttcaggaacagctctgggctcagagtccacaaaaggatccacacgggggagaagccctatgaatgcgacatctgtgggaaaaccttcagtaacagctctggccttagggtccataaaaggatccacacaggtgagaaaccttacgaatgtgatgagtgtgggaaggccttcattacttgtagaacacttctcaaccataaaagcatccactttggagataaaccctataaatgtgatgagtgtgagaaatcttttaattatagctctcttctcattcagcataaagtcatccacactggagagaaaccttatgaatgtgatgaatgtgggaaggctttcaggaacagctcaggcctcatagtgcataaaaggatccacacaggagagaaaccttacaagtgtgatgtctgtggcaaagcattcagctatagctcaggcctcgcagtccataaaagcattcaccctgggaagaaagcccatgaatgtaaggagtgtgggaaatcctttagttataactcactacttcttcaacacagaactattcataccggagagagaccttatgtatgtgatgtgtgtgggaaaacgttcagaaacaatgcaggcctcaaagtccacaggaggctccatactggggaaaaaccatataagtgtgatgtgtgtgggaaagcctatatctcacgctctagccttaaaaatcacaaaggaatccaccttggggagaagccctataaatgtagctattgtgagaaatccttcaactacagctctgcccttgaacagcataaaaggattcataccagggaaaaaccctttgggtgtgatgagtgtggtaaagctttcagaaataattctggccttaaagtacataaacgaatccacactggggaacgaccttacaaatgtgaagaatgtgggaaagcatacatctctctctcgagccttataaatcataaaagtgtacaccctggggagaagccctttaagtgtgacgagtgtgagaaggccttcatcacataccgaacccttacaaaccacaaaaaagttcatcttggggagaagccctacaaatgtgatgtgtgtgagaaatcttttaattacacatcgctcctttctcagcacagaagggtccacactagagagaaaccctatgaatgtgacaggtgtgagaaggtcttcagaaacaactcaagccttaaagttcataaaagaatccatactggggagaggccctatgaatgtgatgtgtgtggaaaagcctacatctcacactcaagccttattaaccataagagtacccaccctggcaagacaccccatacatgtgatgaatgtggaaaagcttttttctcaagcagaactcttataagccataaaagagtccatcttggggagaaacccttcaagtgtgttgagtgtgggaaatctttcagttacagctctctcctttctcagcacaagaggatccacacaggggagaaaccctatgtgtgtgataggtgtgggaaggccttcaggaacagctcaggcctcacagtgcataaaaggatccacacaggtgagaaaccctatgaatgtgatgagtgtgggaaggcatacatctcacactcaagtcttatcaatcataaaagtgtccaccaggggaagcagccctataattgtgagtgtgggaaatccttcaattatagatcagtccttgaccagcacaaaaggatccacactggaaagaagccataccgatgtaatgagtgtggtaaggcttttaatatcagatcaaatctcaccaagcataaaagaacccatactggagaggaatctttaaatgtgatatatgtgggaagttatagtggcacatcccagaagagaacctatgagggagggaatgccctggatgggggcaggatgaggatgcctctgtagcaggcagagcttaccaagtctctccgaactcaaatggaagaaataccttatgaatgtaagaatgtagggggtcatggcttgtaatttacacagtgtaaatgaaaccatcctagaggattatgaggaatcctttctatgtgattttcaatcatagcaagcaagaaaggctccagtgtcaaggtagttcagctcttacaggatataaaacagtccatacttgagagaaaaacttagatctgagtgatggaatgtgaagcaaatcttcaaaatcagtagacatttctggacataaaacacagatgaggaaagggcttcaattagaagttacgtaatcaccatcagaaagttcatgtttggtaaattctgttactagaaatgtaggaaattcaggtatagctttgaatcccaattacacattggtcagtgggaaaactaagggcctccaacaggcaaattcagggaggataggtttcagggaatataaatttatttaatattagtggtctttaagtataaacttgatgtaattggtttgggagggggcagtgatgatgacttctgaaacaaaatttggatttccttttaggaaaagtagaaagcatagacttacaagtctaacaggagataggagagagtcactcataaaaaatgcaaattgatgaacgtactattgtgatacattagttgaatggatgaaacttttttaaagtttcagatgaactcccataatgaatgatgaatttgtgatgagggataacctggaagtggtattcacacattatgctacaataaaaggttctaccgtggagaggattttgacacattcagtaactaatggaacacaccgtcaacatgaattcgcaccttacatgacagaagtgattcagggattcctatgaatagaaatgctgagaaggaacgcattttattgcagaagctaaaaagctaaagtaccagtcatctagagagaaggaaattaatgtttcttaataatcctgttaaatgtttgattgtttttggaatgtgttattgtaaagatgtcatgcaggacatgtatatgttgtctgttgtaaaatgttaacgaatactttgttcagggctcactctctctttgtcatgaaagccagctccttgtggcgaggtaaagtggaattccaataaagaaattccttaaatcaaaa

SEQ ID NO: 11495 - DNA, 434 bp, Homo sapiens
ggaggaattggtgacatctgggcaggacgttgaattgggttttctgagagaggagtaggaactaggatgacctgagtaaaggcagctacggaagtgcccaggcatcctccagcaaggctggtctctggcagggctgatgtgtgggcaggaaggagggtgccatggagtactcgttccccgtagtcgtggggacatggattgggcttccttttgctgaagatgagaccagctttggttgtttttaacctgaggtttccatgtgctcctcacacaggagagctcccgtacttgagctccagctgaacctaatgcactgtctacttttggggagatgcaggctaaataacaaaggagaggatggccacagctcaggtggggattctgagtgcctcagccccactaagcaccagacaagctcctactgcggcccccat

SEQ ID NO: 11496 - DNA, 1754 bp, Homo sapiens
atttcttagaactgcatgtgaatctacaactagctcaaaataaaaagtttaattataaaataaaagctacatgaaatgaagcaaaaaataattcacccttgtcacgcacacagagtcagagactgtaacataatttgcaggatctagagcagaatacaaatgtaaaacatcttgttaaaaaattattaataattttgagacattgataaagcattaagccgcctgtggggccctttaagcatgataaactgtgctaccacacagattgcacattcacgtatctggccctgcaaatggaatgatttttgcccatgatcaattcaccatggcctctttgggctcagtgaatttgcttcttcaggagggtaattttctcttctttctctgctaagctgtttaacagtagttgccctgcctaatgggcttcatccatccatttctctcagattattttcatgatgcactaggatgaagcacaccctttctcctagtcttgaggaaacgtcgatattcagaatatttaaacgcaggcactgaccaatcagaagagtttctggccaacgttccacacttgagggaaatgacattatctgagccctgaagaaaaacgttgtagatattctccagatcaaagcatcgacaggaagattttagatgttgaagttcgtaatatttcctaaagcaggtatgaattactagtaacttaataggtatattaactgatgaagttttcatttctcagaacaaaccagtcaaggaaggtgctattatactccttttattcatatagatcttgaggctgagacagtttaatcaatatgctataattattgtgtaataataaattaccataaactaggggtgctatgatctcaatatttgtatctcccactcccaaattcacatgttgaaatcctgactcccaaggtgatggcattaggagatgaaacctttgtgaggtcattaagtcatgagggtagaataccgatgaatgggattagtgcccttacaaaaggggcccaccaaagctgccttgttccttctactatgtgaggacacatctagaagttaccatcaatgaaccagaaagtgggcccttaccaggcaccaaatctgccagcactctgatcttggacttccagcctcctgaactgtgagaaataaatttctgttgtttataagttacccattttatggtattttgttacaggcacatgaactaagacaagtggattaaaaacaacacaaattattattttactgtctagaaatgagaggttcaaaatggctaaagtcagggtgccactgatagggctgcatttcttttggaggctctagggaagaagccgtttccttgcctttttcagcttccagaggccacctgcattccttagcttatggtcccttgctacagctttaaagccagcagcacagcaccttcaaatctctctctgacagtgacattcctgccttcccctaataaagacccatgtgattagattaggcccacctggattatccaaaataatccctctgtctttagacccttaaccatatgtgcaaaatgtcttttgtcatgtaaaataacatccttacctcaaggttttgggaattagcttattaatgtctttagggggtcattattctgctttccacatacatttaaaattaactatcaggctacaaaagtcatatatgaattgagcttgttttgccccaaaggctgtgttctttttttattttttttattttta

SEQ ID NO: 11497 - DNA, 178 bp, Homo sapiens
catttgtagacatttctctcgcacaaatgacaacttatatttacacaaaagcctgtatataaaatgtgcataacagctttattcataatagtcaaaacttgtaaacaactgtatgtctcacaatgggtgaaaaattaagtaaattctgttataggcatacagtggattactactcagc

SEQ ID NO: 11498 - DNA, 38771 bp, Homo sapiens; identical to SEQ ID NO: 7561
  SITE (7892): n equals a,t,g, or c
  SITE (7893): n equals a,t,g, or c
  SITE (7894): n equals a,t,g, or c
  SITE (7895): n equals a,t,g, or c
  SITE (7896): n equals a,t,g, or c
  SITE (7897): n equals a,t,g, or c
  SITE (7898): n equals a,t,g, or c
  SITE (7899): n equals a,t,g, or c
  SITE (7900): n equals a,t,g, or c
  SITE (7901): n equals a,t,g, or c
  SITE (7902): n equals a,t,g, or c
  SITE (7903): n equals a,t,g, or c
  SITE (7904): n equals a,t,g, or c
  SITE (7905): n equals a,t,g, or c
  SITE (7906): n equals a,t,g, or c
  SITE (7907): n equals a,t,g, or c
  SITE (7908): n equals a,t,g, or c
  SITE (7909): n equals a,t,g, or c
  SITE (7910): n equals a,t,g, or c
  SITE (7911): n equals a,t,g, or c
  SITE (7912): n equals a,t,g, or c
  SITE (7913): n equals a,t,g, or c
  SITE (7914): n equals a,t,g, or c
  SITE (7915): n equals a,t,g, or c
  SITE (7916): n equals a,t,g, or c
  SITE (7917): n equals a,t,g, or c
  SITE (7918): n equals a,t,g, or c
  SITE (7919): n equals a,t,g, or c
  SITE (7920): n equals a,t,g, or c
  SITE (7921): n equals a,t,g, or c
  SITE (7922): n equals a,t,g, or c
  SITE (7923): n equals a,t,g, or c
  SITE (7924): n equals a,t,g, or c
  SITE (7925): n equals a,t,g, or c
  SITE (7926): n equals a,t,g, or c
  SITE (7927): n equals a,t,g, or c
  SITE (7928): n equals a,t,g, or c
  SITE (7929): n equals a,t,g, or c
  SITE (7930): n equals a,t,g, or c
  SITE (7931): n equals a,t,g, or c
  SITE (7932): n equals a,t,g, or c
  SITE (7933): n equals a,t,g, or c
  SITE (7934): n equals a,t,g, or c
  SITE (7935): n equals a,t,g, or c
  SITE (7936): n equals a,t,g, or c
  SITE (7937): n equals a,t,g, or c
  SITE (7938): n equals a,t,g, or c
  SITE (7939): n equals a,t,g, or c
  SITE (7940): n equals a,t,g, or c
  SITE (7941): n equals a,t,g, or c
  SITE (7942): n equals a,t,g, or c
  SITE (7943): n equals a,t,g, or c
  SITE (7944): n equals a,t,g, or c
  SITE (7945): n equals a,t,g, or c
  SITE (7946): n equals a,t,g, or c
  SITE (7947): n equals a,t,g, or c
  SITE (7948): n equals a,t,g, or c
  SITE (7949): n equals a,t,g, or c
  SITE (7950): n equals a,t,g, or c
  SITE (7951): n equals a,t,g, or c
  SITE (7952): n equals a,t,g, or c
  SITE (7953): n equals a,t,g, or c
  SITE (7954): n equals a,t,g, or c
  SITE (7955): n equals a,t,g, or c
  SITE (7956): n equals a,t,g, or c
  SITE (7957): n equals a,t,g, or c
  SITE (7958): n equals a,t,g, or c
  SITE (7959): n equals a,t,g, or c
  SITE (7960): n equals a,t,g, or c
  SITE (7961): n equals a,t,g, or c
  SITE (7962): n equals a,t,g, or c
  SITE (7963): n equals a,t,g, or c
  SITE (7964): n equals a,t,g, or c
  SITE (7965): n equals a,t,g, or c
  SITE (7966): n equals a,t,g, or c
  SITE (7967): n equals a,t,g, or c
  SITE (7968): n equals a,t,g, or c
  SITE (7969): n equals a,t,g, or c
  SITE (7970): n equals a,t,g, or c
  SITE (7971): n equals a,t,g, or c
  SITE (7972): n equals a,t,g, or c
  SITE (7973): n equals a,t,g, or c
  SITE (7974): n equals a,t,g, or c
  SITE (7975): n equals a,t,g, or c
  SITE (7976): n equals a,t,g, or c
  SITE (7977): n equals a,t,g, or c
  SITE (7978): n equals a,t,g, or c
  SITE (7979): n equals a,t,g, or c
  SITE (7980): n equals a,t,g, or c
  SITE (7981): n equals a,t,g, or c
  SITE (7982): n equals a,t,g, or c
  SITE (7983): n equals a,t,g, or c
  SITE (7984): n equals a,t,g, or c
  SITE (7985): n equals a,t,g, or c
  SITE (7986): n equals a,t,g, or c
  SITE (7987): n equals a,t,g, or c
  SITE (7988): n equals a,t,g, or c
  SITE (7989): n equals a,t,g, or c
  SITE (7990): n equals a,t,g, or c
  SITE (7991): n equals a,t,g, or c
  SITE (7992): n equals a,t,g, or c
  SITE (7993): n equals a,t,g, or c
  SITE (7994): n equals a,t,g, or c
  SITE (7995): n equals a,t,g, or c
  SITE (7996): n equals a,t,g, or c
  SITE (7997): n equals a,t,g, or c
  SITE (7998): n equals a,t,g, or c
  SITE (7999): n equals a,t,g, or c
  SITE (8000): n equals a,t,g, or c
  SITE (8001): n equals a,t,g, or c
  SITE (8002): n equals a,t,g, or c
  SITE (8003): n equals a,t,g, or c
  SITE (8004): n equals a,t,g, or c
  SITE (8005): n equals a,t,g, or c
  SITE (8006): n equals a,t,g, or c
  SITE (8007): n equals a,t,g, or c
  SITE (8008): n equals a,t,g, or c
  SITE (8009): n equals a,t,g, or c
  SITE (8010): n equals a,t,g, or c
  SITE (8011): n equals a,t,g, or c
  SITE (8012): n equals a,t,g, or c
  SITE (8013): n equals a,t,g, or c
  SITE (8014): n equals a,t,g, or c
  SITE (8015): n equals a,t,g, or c
  SITE (8016): n equals a,t,g, or c
  SITE (8017): n equals a,t,g, or c
  SITE (8018): n equals a,t,g, or c
  SITE (8019): n equals a,t,g, or c
  SITE (8020): n equals a,t,g, or c
  SITE (8021): n equals a,t,g, or c
  SITE (8022): n equals a,t,g, or c
  SITE (8023): n equals a,t,g, or c
  SITE (8024): n equals a,t,g, or c
  SITE (8025): n equals a,t,g, or c
  SITE (8026): n equals a,t,g, or c
  SITE (8027): n equals a,t,g, or c
  SITE (8028): n equals a,t,g, or c
  SITE (8029): n equals a,t,g, or c
  SITE (8030): n equals a,t,g, or c
  SITE (8031): n equals a,t,g, or c
  SITE (8032): n equals a,t,g, or c
  SITE (8033): n equals a,t,g, or c
  SITE (8034): n equals a,t,g, or c
  SITE (8035): n equals a,t,g, or c
  SITE (8036): n equals a,t,g, or c
  SITE (8037): n equals a,t,g, or c
  SITE (8038): n equals a,t,g, or c
  SITE (8039): n equals a,t,g, or c
  SITE (8040): n equals a,t,g, or c
  SITE (8041): n equals a,t,g, or c
  SITE (8042): n equals a,t,g, or c
  SITE (8043): n equals a,t,g, or c
  SITE (8044): n equals a,t,g, or c
  SITE (8045): n equals a,t,g, or c
  SITE (8046): n equals a,t,g, or c
  SITE (8047): n equals a,t,g, or c
  SITE (8048): n equals a,t,g, or c
  SITE (8049): n equals a,t,g, or c
  SITE (8050): n equals a,t,g, or c
  SITE (8051): n equals a,t,g, or c
  SITE (8052): n equals a,t,g, or c
  SITE (8053): n equals a,t,g, or c
  SITE (8054): n equals a,t,g, or c
  SITE (8055): n equals a,t,g, or c
  SITE (8056): n equals a,t,g, or c
  SITE (8057): n equals a,t,g, or c
  SITE (8058): n equals a,t,g, or c
  SITE (8059): n equals a,t,g, or c
  SITE (8060): n equals a,t,g, or c
  SITE (8061): n equals a,t,g, or c
  SITE (8062): n equals a,t,g, or c
  SITE (8063): n equals a,t,g, or c
  SITE (8064): n equals a,t,g, or c
  SITE (8065): n equals a,t,g, or c
  SITE (8066): n equals a,t,g, or c
  SITE (8067): n equals a,t,g, or c
  SITE (8068): n equals a,t,g, or c
  SITE (8069): n equals a,t,g, or c
  SITE (8070): n equals a,t,g, or c
  SITE (8071): n equals a,t,g, or c
  SITE (8072): n equals a,t,g, or c
  SITE (8073): n equals a,t,g, or c
  SITE (8074): n equals a,t,g, or c
  SITE (8075): n equals a,t,g, or c
  SITE (8076): n equals a,t,g, or c
  SITE (8077): n equals a,t,g, or c
  SITE (8078): n equals a,t,g, or c
  SITE (8079): n equals a,t,g, or c
  SITE (8080): n equals a,t,g, or c
  SITE (8081): n equals a,t,g, or c
  SITE (8082): n equals a,t,g, or c
  SITE (8083): n equals a,t,g, or c
  SITE (8084): n equals a,t,g, or c
  SITE (8085): n equals a,t,g, or c
  SITE (8086): n equals a,t,g, or c
  SITE (8087): n equals a,t,g, or c
  SITE (8088): n equals a,t,g, or c
  SITE (8089): n equals a,t,g, or c
  SITE (8090): n equals a,t,g, or c
  SITE (8091): n equals a,t,g, or c
  SITE (8092): n equals a,t,g, or c
  SITE (8093): n equals a,t,g, or c
  SITE (8094): n equals a,t,g, or c
  SITE (8095): n equals a,t,g, or c
  SITE (8096): n equals a,t,g, or c
  SITE (8097): n equals a,t,g, or c
  SITE (8098): n equals a,t,g, or c
  SITE (8099): n equals a,t,g, or c
  SITE (8100): n equals a,t,g, or c
  SITE (8101): n equals a,t,g, or c
  SITE (8102): n equals a,t,g, or c
  SITE (8103): n equals a,t,g, or c
  SITE (8104): n equals a,t,g, or c
  SITE (8105): n equals a,t,g, or c
  SITE (8106): n equals a,t,g, or c
  SITE (8107): n equals a,t,g, or c
  SITE (8108): n equals a,t,g, or c
  SITE (8109): n equals a,t,g, or c
  SITE (8110): n equals a,t,g, or c
  SITE (8111): n equals a,t,g, or c
  SITE (8112): n equals a,t,g, or c
  SITE (8113): n equals a,t,g, or c
  SITE (8114): n equals a,t,g, or c
  SITE (8115): n equals a,t,g, or c
  SITE (8116): n equals a,t,g, or c
  SITE (8117): n equals a,t,g, or c
  SITE (8118): n equals a,t,g, or c
  SITE (8119): n equals a,t,g, or c
  SITE (8120): n equals a,t,g, or c
  SITE (8121): n equals a,t,g, or c
  SITE (8122): n equals a,t,g, or c
  SITE (8123): n equals a,t,g, or c
  SITE (8124): n equals a,t,g, or c
  SITE (8125): n equals a,t,g, or c
  SITE (8126): n equals a,t,g, or c
  SITE (8127): n equals a,t,g, or c
  SITE (8128): n equals a,t,g, or c
  SITE (8129): n equals a,t,g, or c
  SITE (8130): n equals a,t,g, or c
  SITE (8131): n equals a,t,g, or c
  SITE (8132): n equals a,t,g, or c
  SITE (8133): n equals a,t,g, or c
  SITE (8134): n equals a,t,g, or c
  SITE (8135): n equals a,t,g, or c
  SITE (8136): n equals a,t,g, or c
  SITE (8137): n equals a,t,g, or c
  SITE (8138): n equals a,t,g, or c
  SITE (8139): n equals a,t,g, or c
  SITE (8140): n equals a,t,g, or c
  SITE (8141): n equals a,t,g, or c
  SITE (8142): n equals a,t,g, or c
  SITE (8143): n equals a,t,g, or c
  SITE (8144): n equals a,t,g, or c
  SITE (8145): n equals a,t,g, or c
  SITE (8146): n equals a,t,g, or c
  SITE (8147): n equals a,t,g, or c
  SITE (8148): n equals a,t,g, or c
  SITE (8149): n equals a,t,g, or c
  SITE (8150): n equals a,t,g, or c
  SITE (8151): n equals a,t,g, or c
  SITE (8152): n equals a,t,g, or c
  SITE (8153): n equals a,t,g, or c
  SITE (8154): n equals a,t,g, or c
  SITE (8155): n equals a,t,g, or c
  SITE (8156): n equals a,t,g, or c
  SITE (8157): n equals a,t,g, or c
  SITE (8158): n equals a,t,g, or c
  SITE (8159): n equals a,t,g, or c
  SITE (8160): n equals a,t,g, or c
  SITE (8161): n equals a,t,g, or c
  SITE (8162): n equals a,t,g, or c
  SITE (8163): n equals a,t,g, or c
  SITE (8164): n equals a,t,g, or c
  SITE (8165): n equals a,t,g, or c
  SITE (8166): n equals a,t,g, or c
  SITE (8167): n equals a,t,g, or c
  SITE (8168): n equals a,t,g, or c
  SITE (8169): n equals a,t,g, or c
  SITE (8170): n equals a,t,g, or c
  SITE (8171): n equals a,t,g, or c
  SITE (8172): n equals a,t,g, or c
  SITE (8173): n equals a,t,g, or c
  SITE (8174): n equals a,t,g, or c
  SITE (8175): n equals a,t,g, or c
  SITE (8176): n equals a,t,g, or c
  SITE (8177): n equals a,t,g, or c
  SITE (8178): n equals a,t,g, or c
  SITE (8179): n equals a,t,g, or c
  SITE (8180): n equals a,t,g, or c
  SITE (8181): n equals a,t,g, or c
  SITE (8182): n equals a,t,g, or c
  SITE (8183): n equals a,t,g, or c
  SITE (8184): n equals a,t,g, or c
  SITE (8185): n equals a,t,g, or c
  SITE (8186): n equals a,t,g, or c
  SITE (8187): n equals a,t,g, or c
  SITE (8188): n equals a,t,g, or c
  SITE (8189): n equals a,t,g, or c
  SITE (8190): n equals a,t,g, or c
  SITE (8191): n equals a,t,g, or c
  SITE (8192): n equals a,t,g, or c
  SITE (8193): n equals a,t,g, or c
  SITE (8194): n equals a,t,g, or c
  SITE (8195): n equals a,t,g, or c
  SITE (8196): n equals a,t,g, or c
  SITE (8197): n equals a,t,g, or c
  SITE (8198): n equals a,t,g, or c
  SITE (8199): n equals a,t,g, or c
  SITE (8200): n equals a,t,g, or c
  SITE (8201): n equals a,t,g, or c
  SITE (8202): n equals a,t,g, or c
  SITE (8203): n equals a,t,g, or c
  SITE (8204): n equals a,t,g, or c
  SITE (8205): n equals a,t,g, or c
  SITE (8206): n equals a,t,g, or c
  SITE (8207): n equals a,t,g, or c
  SITE (8208): n equals a,t,g, or c
  SITE (8209): n equals a,t,g, or c
  SITE (8210): n equals a,t,g, or c
  SITE (8211): n equals a,t,g, or c
  SITE (8212): n equals a,t,g, or c
  SITE (8213): n equals a,t,g, or c
  SITE (8214): n equals a,t,g, or c
  SITE (8215): n equals a,t,g, or c
  SITE (8216): n equals a,t,g, or c
  SITE (8217): n equals a,t,g, or c
  SITE (8218): n equals a,t,g, or c
  SITE (8219): n equals a,t,g, or c
  SITE (8220): n equals a,t,g, or c
  SITE (8221): n equals a,t,g, or c
  SITE (8222): n equals a,t,g, or c
  SITE (8223): n equals a,t,g, or c
  SITE (8224): n equals a,t,g, or c
  SITE (8225): n equals a,t,g, or c
  SITE (8226): n equals a,t,g, or c
  SITE (8227): n equals a,t,g, or c
  SITE (8228): n equals a,t,g, or c
  SITE (8229): n equals a,t,g, or c
  SITE (8230): n equals a,t,g, or c
  SITE (8231): n equals a,t,g, or c
  SITE (8232): n equals a,t,g, or c
  SITE (8233): n equals a,t,g, or c
  SITE (8234): n equals a,t,g, or c
  SITE (8235): n equals a,t,g, or c
  SITE (8236): n equals a,t,g, or c
  SITE (8237): n equals a,t,g, or c
  SITE (8238): n equals a,t,g, or c
  SITE (8239): n equals a,t,g, or c
  SITE (8240): n equals a,t,g, or c
  SITE (8241): n equals a,t,g, or c
  SITE (8242): n equals a,t,g, or c
  SITE (8243): n equals a,t,g, or c
  SITE (8244): n equals a,t,g, or c
  SITE (8245): n equals a,t,g, or c
  SITE (8246): n equals a,t,g, or c
  SITE (8247): n equals a,t,g, or c
  SITE (8248): n equals a,t,g, or c
  SITE (8249): n equals a,t,g, or c
  SITE (8250): n equals a,t,g, or c
  SITE (8251): n equals a,t,g, or c
  SITE (8252): n equals a,t,g, or c
  SITE (8253): n equals a,t,g, or c
  SITE (8254): n equals a,t,g, or c
  SITE (8255): n equals a,t,g, or c
  SITE (8256): n equals a,t,g, or c
  SITE (8257): n equals a,t,g, or c
  SITE (8258): n equals a,t,g, or c
  SITE (8259): n equals a,t,g, or c
  SITE (8260): n equals a,t,g, or c
  SITE (8261): n equals a,t,g, or c
  SITE (8262): n equals a,t,g, or c
  SITE (8263): n equals a,t,g, or c
  SITE (8264): n equals a,t,g, or c
  SITE (8265): n equals a,t,g, or c
  SITE (8266): n equals a,t,g, or c
  SITE (8267): n equals a,t,g, or c
  SITE (8268): n equals a,t,g, or c
  SITE (8269): n equals a,t,g, or c
  SITE (8270): n equals a,t,g, or c
  SITE (8271): n equals a,t,g, or c
  SITE (8272): n equals a,t,g, or c
  SITE (8273): n equals a,t,g, or c
  SITE (8274): n equals a,t,g, or c
  SITE (8275): n equals a,t,g, or c
  SITE (8276): n equals a,t,g, or c
  SITE (8277): n equals a,t,g, or c
  SITE (8278): n equals a,t,g, or c
  SITE (8279): n equals a,t,g, or c
  SITE (8280): n equals a,t,g, or c
  SITE (8281): n equals a,t,g, or c
  SITE (8282): n equals a,t,g, or c
  SITE (8283): n equals a,t,g, or c
  SITE (8284): n equals a,t,g, or c
  SITE (8285): n equals a,t,g, or c
  SITE (8286): n equals a,t,g, or c
  SITE (8287): n equals a,t,g, or c
  SITE (8288): n equals a,t,g, or c
  SITE (8289): n equals a,t,g, or c
  SITE (8290): n equals a,t,g, or c
  SITE (8291): n equals a,t,g, or c
  SITE (8292): n equals a,t,g, or c
  SITE (8293): n equals a,t,g, or c
  SITE (8294): n equals a,t,g, or c
  SITE (8295): n equals a,t,g, or c
  SITE (8296): n equals a,t,g, or c
  SITE (8297): n equals a,t,g, or c
  SITE (8298): n equals a,t,g, or c
  SITE (8299): n equals a,t,g, or c
  SITE (8300): n equals a,t,g, or c
  SITE (8301): n equals a,t,g, or c
  SITE (8302): n equals a,t,g, or c
  SITE (8303): n equals a,t,g, or c
  SITE (8304): n equals a,t,g, or c
  SITE (8305): n equals a,t,g, or c
  SITE (8306): n equals a,t,g, or c
  SITE (8307): n equals a,t,g, or c
  SITE (8308): n equals a,t,g, or c
  SITE (8309): n equals a,t,g, or c
  SITE (8310): n equals a,t,g, or c
  SITE (8311): n equals a,t,g, or c
  SITE (8312): n equals a,t,g, or c
  SITE (8313): n equals a,t,g, or c
  SITE (8314): n equals a,t,g, or c
  SITE (8315): n equals a,t,g, or c
  SITE (8316): n equals a,t,g, or c
  SITE (8317): n equals a,t,g, or c
  SITE (8318): n equals a,t,g, or c
  SITE (8319): n equals a,t,g, or c
  SITE (8320): n equals a,t,g, or c
  SITE (8321): n equals a,t,g, or c
  SITE (8322): n equals a,t,g, or c
  SITE (8323): n equals a,t,g, or c
  SITE (8324): n equals a,t,g, or c
  SITE (8325): n equals a,t,g, or c
  SITE (8326): n equals a,t,g, or c
  SITE (8327): n equals a,t,g, or c
  SITE (8328): n equals a,t,g, or c
  SITE (8329): n equals a,t,g, or c
  SITE (8330): n equals a,t,g, or c
  SITE (8331): n equals a,t,g, or c
  SITE (8332): n equals a,t,g, or c
  SITE (8333): n equals a,t,g, or c
  SITE (8334): n equals a,t,g, or c
  SITE (8335): n equals a,t,g, or c
  SITE (8336): n equals a,t,g, or c
  SITE (8337): n equals a,t,g, or c
  SITE (8338): n equals a,t,g, or c
  SITE (8339): n equals a,t,g, or c
  SITE (8340): n equals a,t,g, or c
  SITE (8341): n equals a,t,g, or c
  SITE (8342): n equals a,t,g, or c
  SITE (8343): n equals a,t,g, or c
  SITE (8344): n equals a,t,g, or c
  SITE (8345): n equals a,t,g, or c
  SITE (8346): n equals a,t,g, or c
  SITE (8347): n equals a,t,g, or c
  SITE (8348): n equals a,t,g, or c
  SITE (8349): n equals a,t,g, or c
  SITE (8350): n equals a,t,g, or c
  SITE (8351): n equals a,t,g, or c
  SITE (8352): n equals a,t,g, or c
  SITE (8353): n equals a,t,g, or c
  SITE (8354): n equals a,t,g, or c
  SITE (8355): n equals a,t,g, or c
  SITE (8356): n equals a,t,g, or c
  SITE (8357): n equals a,t,g, or c
  SITE (8358): n equals a,t,g, or c
  SITE (8359): n equals a,t,g, or c
  SITE (8360): n equals a,t,g, or c
  SITE (8361): n equals a,t,g, or c
  SITE (8362): n equals a,t,g, or c
  SITE (8363): n equals a,t,g, or c
  SITE (8364): n equals a,t,g, or c
  SITE (8365): n equals a,t,g, or c
  SITE (8366): n equals a,t,g, or c
  SITE (8367): n equals a,t,g, or c
  SITE (8368): n equals a,t,g, or c
  SITE (8369): n equals a,t,g, or c
  SITE (8370): n equals a,t,g, or c
  SITE (8371): n equals a,t,g, or c
  SITE (8372): n equals a,t,g, or c
  SITE (8373): n equals a,t,g, or c
  SITE (8374): n equals a,t,g, or c
  SITE (8375): n equals a,t,g, or c
  SITE (8376): n equals a,t,g, or c
  SITE (8377): n equals a,t,g, or c
  SITE (8378): n equals a,t,g, or c
  SITE (8379): n equals a,t,g, or c
  SITE (8380): n equals a,t,g, or c
  SITE (8381): n equals a,t,g, or c
  SITE (8382): n equals a,t,g, or c
  SITE (8383): n equals a,t,g, or c
  SITE (8384): n equals a,t,g, or c
  SITE (8385): n equals a,t,g, or c
  SITE (8386): n equals a,t,g, or c
  SITE (8387): n equals a,t,g, or c
  SITE (8388): n equals a,t,g, or c
  SITE (8389): n equals a,t,g, or c
  SITE (8390): n equals a,t,g, or c
  SITE (8391): n equals a,t,g, or c
  SITE (8392): n equals a,t,g, or c
  SITE (8393): n equals a,t,g, or c
  SITE (8394): n equals a,t,g, or c
  SITE (8395): n equals a,t,g, or c
  SITE (8396): n equals a,t,g, or c
  SITE (8397): n equals a,t,g, or c
  SITE (8398): n equals a,t,g, or c
  SITE (8399): n equals a,t,g, or c
  SITE (8400): n equals a,t,g, or c
  SITE (8401): n equals a,t,g, or c
  SITE (8402): n equals a,t,g, or c
  SITE (8403): n equals a,t,g, or c
  SITE (8404): n equals a,t,g, or c
  SITE (8405): n equals a,t,g, or c
  SITE (8406): n equals a,t,g, or c
  SITE (8407): n equals a,t,g, or c
  SITE (8408): n equals a,t,g, or c
  SITE (8409): n equals a,t,g, or c
  SITE (8410): n equals a,t,g, or c
  SITE (8411): n equals a,t,g, or c
  SITE (8412): n equals a,t,g, or c
  SITE (8413): n equals a,t,g, or c
  SITE (8414): n equals a,t,g, or c
  SITE (8415): n equals a,t,g, or c
  SITE (8416): n equals a,t,g, or c
  SITE (8417): n equals a,t,g, or c
  SITE (8418): n equals a,t,g, or c
  SITE (8419): n equals a,t,g, or c
  SITE (8420): n equals a,t,g, or c
  SITE (8421): n equals a,t,g, or c
  SITE (8422): n equals a,t,g, or c
  SITE (8423): n equals a,t,g, or c
  SITE (8424): n equals a,t,g, or c
  SITE (8425): n equals a,t,g, or c
  SITE (8426): n equals a,t,g, or c
  SITE (8427): n equals a,t,g, or c
  SITE (8428): n equals a,t,g, or c
  SITE (8429): n equals a,t,g, or c
  SITE (8430): n equals a,t,g, or c
  SITE (8431): n equals a,t,g, or c
  SITE (8432): n equals a,t,g, or c
  SITE (8433): n equals a,t,g, or c
  SITE (8434): n equals a,t,g, or c
  SITE (8435): n equals a,t,g, or c
  SITE (8436): n equals a,t,g, or c
  SITE (8437): n equals a,t,g, or c
  SITE (8438): n equals a,t,g, or c
  SITE (8439): n equals a,t,g, or c
  SITE (8440): n equals a,t,g, or c
  SITE (8441): n equals a,t,g, or c
  SITE (8442): n equals a,t,g, or c
  SITE (8443): n equals a,t,g, or c
  SITE (8444): n equals a,t,g, or c
  SITE (8445): n equals a,t,g, or c
  SITE (8446): n equals a,t,g, or c
  SITE (8447): n equals a,t,g, or c
  SITE (8448): n equals a,t,g, or c
  SITE (8449): n equals a,t,g, or c
  SITE (8450): n equals a,t,g, or c
  SITE (8451): n equals a,t,g, or c
  SITE (8452): n equals a,t,g, or c
  SITE (8453): n equals a,t,g, or c
  SITE (8454): n equals a,t,g, or c
  SITE (8455): n equals a,t,g, or c
  SITE (8456): n equals a,t,g, or c
  SITE (8457): n equals a,t,g, or c
  SITE (8458): n equals a,t,g, or c
  SITE (8459): n equals a,t,g, or c
  SITE (8460): n equals a,t,g, or c
  SITE (8461): n equals a,t,g, or c
  SITE (8462): n equals a,t,g, or c
  SITE (8463): n equals a,t,g, or c
  SITE (8464): n equals a,t,g, or c
  SITE (8465): n equals a,t,g, or c
  SITE (8466): n equals a,t,g, or c
  SITE (8467): n equals a,t,g, or c
  SITE (8468): n equals a,t,g, or c
  SITE (8469): n equals a,t,g, or c
  SITE (8470): n equals a,t,g, or c
  SITE (8471): n equals a,t,g, or c
  SITE (8472): n equals a,t,g, or c
  SITE (8473): n equals a,t,g, or c
  SITE (8474): n equals a,t,g, or c
  SITE (8475): n equals a,t,g, or c
  SITE (8476): n equals a,t,g, or c
  SITE (8477): n equals a,t,g, or c
  SITE (8478): n equals a,t,g, or c
  SITE (8479): n equals a,t,g, or c
  SITE (8480): n equals a,t,g, or c
  SITE (8481): n equals a,t,g, or c
  SITE (8482): n equals a,t,g, or c
  SITE (8483): n equals a,t,g, or c
  SITE (8484): n equals a,t,g, or c
  SITE (8485): n equals a,t,g, or c
  SITE (8486): n equals a,t,g, or c
  SITE (8487): n equals a,t,g, or c
  SITE (8488): n equals a,t,g, or c
  SITE (8489): n equals a,t,g, or c
  SITE (8490): n equals a,t,g, or c
  SITE (8491): n equals a,t,g, or c
  SITE (8492): n equals a,t,g, or c
  SITE (8493): n equals a,t,g, or c
  SITE (8494): n equals a,t,g, or c
  SITE (8495): n equals a,t,g, or c
  SITE (8496): n equals a,t,g, or c
  SITE (8497): n equals a,t,g, or c
  SITE (8498): n equals a,t,g, or c
  SITE (8499): n equals a,t,g, or c
  SITE (8500): n equals a,t,g, or c
  SITE (8501): n equals a,t,g, or c
  SITE (8502): n equals a,t,g, or c
  SITE (8503): n equals a,t,g, or c
  SITE (8504): n equals a,t,g, or c
  SITE (8505): n equals a,t,g, or c
  SITE (8506): n equals a,t,g, or c
  SITE (8507): n equals a,t,g, or c
  SITE (8508): n equals a,t,g, or c
  SITE (8509): n equals a,t,g, or c
  SITE (8510): n equals a,t,g, or c
  SITE (8511): n equals a,t,g, or c
  SITE (8512): n equals a,t,g, or c
  SITE (8513): n equals a,t,g, or c
  SITE (8514): n equals a,t,g, or c
  SITE (8515): n equals a,t,g, or c
  SITE (8516): n equals a,t,g, or c
  SITE (8517): n equals a,t,g, or c
  SITE (8518): n equals a,t,g, or c
  SITE (8519): n equals a,t,g, or c
  SITE (8520): n equals a,t,g, or c
  SITE (8521): n equals a,t,g, or c
  SITE (8522): n equals a,t,g, or c
  SITE (8523): n equals a,t,g, or c
  SITE (8524): n equals a,t,g, or c
  SITE (8525): n equals a,t,g, or c
  SITE (8526): n equals a,t,g, or c
  SITE (8527): n equals a,t,g, or c
  SITE (8528): n equals a,t,g, or c
  SITE (8529): n equals a,t,g, or c
  SITE (8530): n equals a,t,g, or c
  SITE (8531): n equals a,t,g, or c
  SITE (8532): n equals a,t,g, or c
  SITE (8533): n equals a,t,g, or c
  SITE (8534): n equals a,t,g, or c
  SITE (8535): n equals a,t,g, or c
  SITE (8536): n equals a,t,g, or c
  SITE (8537): n equals a,t,g, or c
  SITE (8538): n equals a,t,g, or c
  SITE (8539): n equals a,t,g, or c
  SITE (8540): n equals a,t,g, or c
  SITE (8541): n equals a,t,g, or c
  SITE (8542): n equals a,t,g, or c
  SITE (8543): n equals a,t,g, or c
  SITE (8544): n equals a,t,g, or c
  SITE (8545): n equals a,t,g, or c
  SITE (8546): n equals a,t,g, or c
  SITE (8547): n equals a,t,g, or c
  SITE (8548): n equals a,t,g, or c
  SITE (8549): n equals a,t,g, or c
  SITE (8550): n equals a,t,g, or c
  SITE (8551): n equals a,t,g, or c
  SITE (8552): n equals a,t,g, or c
  SITE (8553): n equals a,t,g, or c
  SITE (8554): n equals a,t,g, or c
  SITE (8555): n equals a,t,g, or c
  SITE (8556): n equals a,t,g, or c
  SITE (8557): n equals a,t,g, or c
  SITE (8558): n equals a,t,g, or c
  SITE (8559): n equals a,t,g, or c
  SITE (8560): n equals a,t,g, or c
  SITE (8561): n equals a,t,g, or c
  SITE (8562): n equals a,t,g, or c
  SITE (8563): n equals a,t,g, or c
  SITE (8564): n equals a,t,g, or c
  SITE (8565): n equals a,t,g, or c
  SITE (8566): n equals a,t,g, or c
  SITE (8567): n equals a,t,g, or c
  SITE (8568): n equals a,t,g, or c
  SITE (8569): n equals a,t,g, or c
  SITE (8570): n equals a,t,g, or c
  SITE (8571): n equals a,t,g, or c
  SITE (8572): n equals a,t,g, or c
  SITE (8573): n equals a,t,g, or c
  SITE (8574): n equals a,t,g, or c
  SITE (8575): n equals a,t,g, or c
  SITE (8576): n equals a,t,g, or c
  SITE (8577): n equals a,t,g, or c
  SITE (8578): n equals a,t,g, or c
  SITE (8579): n equals a,t,g, or c
  SITE (8580): n equals a,t,g, or c
  SITE (8581): n equals a,t,g, or c
  SITE (8582): n equals a,t,g, or c
  SITE (8583): n equals a,t,g, or c
  SITE (8584): n equals a,t,g, or c
  SITE (8585): n equals a,t,g, or c
  SITE (8586): n equals a,t,g, or c
  SITE (8587): n equals a,t,g, or c
  SITE (8588): n equals a,t,g, or c
  SITE (8589): n equals a,t,g, or c
  SITE (8590): n equals a,t,g, or c
  SITE (8591): n equals a,t,g, or c
  SITE (8592): n equals a,t,g, or c
  SITE (8593): n equals a,t,g, or c
  SITE (8594): n equals a,t,g, or c
  SITE (8595): n equals a,t,g, or c
  SITE (8596): n equals a,t,g, or c
  SITE (8597): n equals a,t,g, or c
  SITE (8598): n equals a,t,g, or c
  SITE (8599): n equals a,t,g, or c
  SITE (8600): n equals a,t,g, or c
  SITE (8601): n equals a,t,g, or c
  SITE (8602): n equals a,t,g, or c
  SITE (8603): n equals a,t,g, or c
  SITE (8604): n equals a,t,g, or c
  SITE (8605): n equals a,t,g, or c
  SITE (8606): n equals a,t,g, or c
  SITE (8607): n equals a,t,g, or c
  SITE (8608): n equals a,t,g, or c
  SITE (8609): n equals a,t,g, or c
  SITE (8610): n equals a,t,g, or c
  SITE (8611): n equals a,t,g, or c
  SITE (8612): n equals a,t,g, or c
  SITE (8613): n equals a,t,g, or c
  SITE (8614): n equals a,t,g, or c
  SITE (8615): n equals a,t,g, or c
  SITE (8616): n equals a,t,g, or c
  SITE (8617): n equals a,t,g, or c
  SITE (8618): n equals a,t,g, or c
  SITE (8619): n equals a,t,g, or c
  SITE (8620): n equals a,t,g, or c
  SITE (8621): n equals a,t,g, or c
  SITE (8622): n equals a,t,g, or c
  SITE (8623): n equals a,t,g, or c
  SITE (8624): n equals a,t,g, or c
  SITE (8625): n equals a,t,g, or c
  SITE (8626): n equals a,t,g, or c
  SITE (8627): n equals a,t,g, or c
  SITE (8628): n equals a,t,g, or c
  SITE (8629): n equals a,t,g, or c
  SITE (8630): n equals a,t,g, or c
  SITE (8631): n equals a,t,g, or c
  SITE (8632): n equals a,t,g, or c
  SITE (8633): n equals a,t,g, or c
  SITE (8634): n equals a,t,g, or c
  SITE (8635): n equals a,t,g, or c
  SITE (8636): n equals a,t,g, or c
  SITE (8637): n equals a,t,g, or c
  SITE (8638): n equals a,t,g, or c
  SITE (8639): n equals a,t,g, or c
  SITE (8640): n equals a,t,g, or c
  SITE (8641): n equals a,t,g, or c
  SITE (8642): n equals a,t,g, or c
  SITE (8643): n equals a,t,g, or c
  SITE (8644): n equals a,t,g, or c
  SITE (8645): n equals a,t,g, or c
  SITE (8646): n equals a,t,g, or c
  SITE (8647): n equals a,t,g, or c
  SITE (8648): n equals a,t,g, or c
  SITE (8649): n equals a,t,g, or c
  SITE (8650): n equals a,t,g, or c
  SITE (8651): n equals a,t,g, or c
  SITE (8652): n equals a,t,g, or c
  SITE (8653): n equals a,t,g, or c
  SITE (8654): n equals a,t,g, or c
  SITE (8655): n equals a,t,g, or c
  SITE (8656): n equals a,t,g, or c
  SITE (8657): n equals a,t,g, or c
  SITE (8658): n equals a,t,g, or c
  SITE (8659): n equals a,t,g, or c
  SITE (8660): n equals a,t,g, or c
  SITE (8661): n equals a,t,g, or c
  SITE (8662): n equals a,t,g, or c
  SITE (8663): n equals a,t,g, or c
  SITE (8664): n equals a,t,g, or c
  SITE (8665): n equals a,t,g, or c
  SITE (8666): n equals a,t,g, or c
  SITE (8667): n equals a,t,g, or c
  SITE (8668): n equals a,t,g, or c
  SITE (8669): n equals a,t,g, or c
  SITE (8670): n equals a,t,g, or c
  SITE (8671): n equals a,t,g, or c
  SITE (8672): n equals a,t,g, or c
  SITE (8673): n equals a,t,g, or c
  SITE (8674): n equals a,t,g, or c
  SITE (8675): n equals a,t,g, or c
  SITE (8676): n equals a,t,g, or c
  SITE (8677): n equals a,t,g, or c
  SITE (8678): n equals a,t,g, or c
  SITE (8679): n equals a,t,g, or c
  SITE (8680): n equals a,t,g, or c
  SITE (8681): n equals a,t,g, or c
  SITE (8682): n equals a,t,g, or c
  SITE (8683): n equals a,t,g, or c
  SITE (8684): n equals a,t,g, or c
  SITE (8685): n equals a,t,g, or c
  SITE (8686): n equals a,t,g, or c
  SITE (8687): n equals a,t,g, or c
  SITE (8688): n equals a,t,g, or c
  SITE (8689): n equals a,t,g, or c
  SITE (8690): n equals a,t,g, or c
  SITE (8691): n equals a,t,g, or c
  SITE (8692): n equals a,t,g, or c
  SITE (8693): n equals a,t,g, or c
  SITE (8694): n equals a,t,g, or c
  SITE (8695): n equals a,t,g, or c
  SITE (8696): n equals a,t,g, or c
  SITE (8697): n equals a,t,g, or c
  SITE (8698): n equals a,t,g, or c
  SITE (8699): n equals a,t,g, or c
  SITE (8700): n equals a,t,g, or c
  SITE (8701): n equals a,t,g, or c
  SITE (8702): n equals a,t,g, or c
  SITE (8703): n equals a,t,g, or c
  SITE (8704): n equals a,t,g, or c
  SITE (8705): n equals a,t,g, or c
  SITE (8706): n equals a,t,g, or c
  SITE (8707): n equals a,t,g, or c
  SITE (8708): n equals a,t,g, or c
  SITE (8709): n equals a,t,g, or c
  SITE (8710): n equals a,t,g, or c
  SITE (8711): n equals a,t,g, or c
  SITE (8712): n equals a,t,g, or c
  SITE (8713): n equals a,t,g, or c
  SITE (8714): n equals a,t,g, or c
  SITE (8715): n equals a,t,g, or c
  SITE (8716): n equals a,t,g, or c
  SITE (8717): n equals a,t,g, or c
  SITE (8718): n equals a,t,g, or c
  SITE (8719): n equals a,t,g, or c
  SITE (8720): n equals a,t,g, or c
  SITE (8721): n equals a,t,g, or c
  SITE (8722): n equals a,t,g, or c
  SITE (8723): n equals a,t,g, or c
  SITE (8724): n equals a,t,g, or c
  SITE (8725): n equals a,t,g, or c
  SITE (8726): n equals a,t,g, or c
  SITE (8727): n equals a,t,g, or c
  SITE (8728): n equals a,t,g, or c
  SITE (8729): n equals a,t,g, or c
  SITE (8730): n equals a,t,g, or c
  SITE (8731): n equals a,t,g, or c
  SITE (8732): n equals a,t,g, or c
  SITE (8733): n equals a,t,g, or c
  SITE (8734): n equals a,t,g, or c
  SITE (8735): n equals a,t,g, or c
  SITE (8736): n equals a,t,g, or c
  SITE (8737): n equals a,t,g, or c
  SITE (8738): n equals a,t,g, or c
  SITE (8739): n equals a,t,g, or c
  SITE (8740): n equals a,t,g, or c
  SITE (8741): n equals a,t,g, or c
  SITE (8742): n equals a,t,g, or c
  SITE (8743): n equals a,t,g, or c
  SITE (8744): n equals a,t,g, or c
  SITE (8745): n equals a,t,g, or c
  SITE (8746): n equals a,t,g, or c
  SITE (8747): n equals a,t,g, or c
  SITE (8748): n equals a,t,g, or c
  SITE (8749): n equals a,t,g, or c
  SITE (8750): n equals a,t,g, or c
  SITE (8751): n equals a,t,g, or c
  SITE (8752): n equals a,t,g, or c
  SITE (8753): n equals a,t,g, or c
  SITE (8754): n equals a,t,g, or c
  SITE (8755): n equals a,t,g, or c
  SITE (8756): n equals a,t,g, or c
  SITE (8757): n equals a,t,g, or c
  SITE (8758): n equals a,t,g, or c
  SITE (8759): n equals a,t,g, or c
  SITE (8760): n equals a,t,g, or c
  SITE (8761): n equals a,t,g, or c
  SITE (8762): n equals a,t,g, or c
  SITE (8763): n equals a,t,g, or c
  SITE (8764): n equals a,t,g, or c
  SITE (8765): n equals a,t,g, or c
  SITE (8766): n equals a,t,g, or c
  SITE (8767): n equals a,t,g, or c
  SITE (8768): n equals a,t,g, or c
  SITE (8769): n equals a,t,g, or c
  SITE (8770): n equals a,t,g, or c
  SITE (8771): n equals a,t,g, or c
  SITE (8772): n equals a,t,g, or c
  SITE (8773): n equals a,t,g, or c
  SITE (8774): n equals a,t,g, or c
  SITE (8775): n equals a,t,g, or c
  SITE (8776): n equals a,t,g, or c
  SITE (8777): n equals a,t,g, or c
  SITE (8778): n equals a,t,g, or c
  SITE (8779): n equals a,t,g, or c
  SITE (8780): n equals a,t,g, or c
  SITE (8781): n equals a,t,g, or c
  SITE (8782): n equals a,t,g, or c
  SITE (8783): n equals a,t,g, or c
  SITE (8784): n equals a,t,g, or c
  SITE (8785): n equals a,t,g, or c
  SITE (8786): n equals a,t,g, or c
  SITE (8787): n equals a,t,g, or c
  SITE (8788): n equals a,t,g, or c
  SITE (8789): n equals a,t,g, or c
  SITE (8790): n equals a,t,g, or c
  SITE (8791): n equals a,t,g, or c
  SITE (8792): n equals a,t,g, or c
  SITE (8793): n equals a,t,g, or c
  SITE (8794): n equals a,t,g, or c
  SITE (8795): n equals a,t,g, or c
  SITE (8796): n equals a,t,g, or c
  SITE (8797): n equals a,t,g, or c
  SITE (8798): n equals a,t,g, or c
  SITE (8799): n equals a,t,g, or c
  SITE (8800): n equals a,t,g, or c
  SITE (8801): n equals a,t,g, or c
  SITE (8802): n equals a,t,g, or c
  SITE (8803): n equals a,t,g, or c
  SITE (8804): n equals a,t,g, or c
  SITE (8805): n equals a,t,g, or c
  SITE (8806): n equals a,t,g, or c
  SITE (8807): n equals a,t,g, or c
  SITE (8808): n equals a,t,g, or c
  SITE (8809): n equals a,t,g, or c
  SITE (8810): n equals a,t,g, or c
  SITE (8811): n equals a,t,g, or c
  SITE (8812): n equals a,t,g, or c
  SITE (8813): n equals a,t,g, or c
  SITE (8814): n equals a,t,g, or c
  SITE (8815): n equals a,t,g, or c
  SITE (8816): n equals a,t,g, or c
  SITE (8817): n equals a,t,g, or c
  SITE (8818): n equals a,t,g, or c
  SITE (8819): n equals a,t,g, or c
  SITE (8820): n equals a,t,g, or c
  SITE (8821): n equals a,t,g, or c
  SITE (8822): n equals a,t,g, or c
  SITE (8823): n equals a,t,g, or c
  SITE (8824): n equals a,t,g, or c
  SITE (8825): n equals a,t,g, or c
  SITE (8826): n equals a,t,g, or c
  SITE (8827): n equals a,t,g, or c
  SITE (8828): n equals a,t,g, or c
  SITE (8829): n equals a,t,g, or c
  SITE (8830): n equals a,t,g, or c
  SITE (8831): n equals a,t,g, or c
  SITE (8832): n equals a,t,g, or c
  SITE (8833): n equals a,t,g, or c
  SITE (8834): n equals a,t,g, or c
  SITE (8835): n equals a,t,g, or c
  SITE (8836): n equals a,t,g, or c
  SITE (8837): n equals a,t,g, or c
  SITE (8838): n equals a,t,g, or c
  SITE (8839): n equals a,t,g, or c
  SITE (8840): n equals a,t,g, or c
  SITE (8841): n equals a,t,g, or c
  SITE (8842): n equals a,t,g, or c
  SITE (8843): n equals a,t,g, or c
  SITE (8844): n equals a,t,g, or c
  SITE (8845): n equals a,t,g, or c
  SITE (8846): n equals a,t,g, or c
  SITE (8847): n equals a,t,g, or c
  SITE (8848): n equals a,t,g, or c
  SITE (8849): n equals a,t,g, or c
  SITE (8850): n equals a,t,g, or c
  SITE (8851): n equals a,t,g, or c
  SITE (8852): n equals a,t,g, or c
  SITE (8853): n equals a,t,g, or c
  SITE (8854): n equals a,t,g, or c
  SITE (8855): n equals a,t,g, or c
  SITE (8856): n equals a,t,g, or c
  SITE (8857): n equals a,t,g, or c
  SITE (8858): n equals a,t,g, or c
  SITE (8859): n equals a,t,g, or c
  SITE (8860): n equals a,t,g, or c
  SITE (8861): n equals a,t,g, or c
  SITE (8862): n equals a,t,g, or c
  SITE (8863): n equals a,t,g, or c
  SITE (8864): n equals a,t,g, or c
  SITE (8865): n equals a,t,g, or c
  SITE (8866): n equals a,t,g, or c
  SITE (8867): n equals a,t,g, or c
  SITE (8868): n equals a,t,g, or c
  SITE (8869): n equals a,t,g, or c
  SITE (8870): n equals a,t,g, or c
  SITE (8871): n equals a,t,g, or c
  SITE (8872): n equals a,t,g, or c
  SITE (8873): n equals a,t,g, or c
  SITE (8874): n equals a,t,g, or c
  SITE (8875): n equals a,t,g, or c
  SITE (8876): n equals a,t,g, or c
  SITE (8877): n equals a,t,g, or c
  SITE (8878): n equals a,t,g, or c
  SITE (8879): n equals a,t,g, or c
  SITE (8880): n equals a,t,g, or c
  SITE (8881): n equals a,t,g, or c
  SITE (8882): n equals a,t,g, or c
  SITE (8883): n equals a,t,g, or c
  SITE (8884): n equals a,t,g, or c
  SITE (8885): n equals a,t,g, or c
  SITE (8886): n equals a,t,g, or c
  SITE (8887): n equals a,t,g, or c
  SITE (8888): n equals a,t,g, or c
  SITE (8889): n equals a,t,g, or c
  SITE (8890): n equals a,t,g, or c
  SITE (8891): n equals a,t,g, or c
  SITE (8892): n equals a,t,g, or c
  SITE (8893): n equals a,t,g, or c
  SITE (8894): n equals a,t,g, or c
  SITE (8895): n equals a,t,g, or c
  SITE (8896): n equals a,t,g, or c
  SITE (8897): n equals a,t,g, or c
  SITE (8898): n equals a,t,g, or c
  SITE (8899): n equals a,t,g, or c
  SITE (8900): n equals a,t,g, or c
  SITE (8901): n equals a,t,g, or c
  SITE (8902): n equals a,t,g, or c
  SITE (8903): n equals a,t,g, or c
  SITE (8904): n equals a,t,g, or c
  SITE (8905): n equals a,t,g, or c
  SITE (8906): n equals a,t,g, or c
  SITE (8907): n equals a,t,g, or c
  SITE (8908): n equals a,t,g, or c
  SITE (8909): n equals a,t,g, or c
  SITE (8910): n equals a,t,g, or c
  SITE (8911): n equals a,t,g, or c
  SITE (8912): n equals a,t,g, or c
  SITE (8913): n equals a,t,g, or c
  SITE (8914): n equals a,t,g, or c
  SITE (8915): n equals a,t,g, or c
  SITE (8916): n equals a,t,g, or c
  SITE (8917): n equals a,t,g, or c
  SITE (8918): n equals a,t,g, or c
  SITE (8919): n equals a,t,g, or c
  SITE (8920): n equals a,t,g, or c
  SITE (8921): n equals a,t,g, or c
  SITE (8922): n equals a,t,g, or c
  SITE (8923): n equals a,t,g, or c
  SITE (8924): n equals a,t,g, or c
  SITE (8925): n equals a,t,g, or c
  SITE (8926): n equals a,t,g, or c
  SITE (8927): n equals a,t,g, or c
  SITE (8928): n equals a,t,g, or c
  SITE (8929): n equals a,t,g, or c
  SITE (8930): n equals a,t,g, or c
  SITE (8931): n equals a,t,g, or c
  SITE (8932): n equals a,t,g, or c
  SITE (8933): n equals a,t,g, or c
  SITE (8934): n equals a,t,g, or c
  SITE (8935): n equals a,t,g, or c
  SITE (8936): n equals a,t,g, or c
  SITE (8937): n equals a,t,g, or c
  SITE (8938): n equals a,t,g, or c
  SITE (8939): n equals a,t,g, or c
  SITE (8940): n equals a,t,g, or c
  SITE (8941): n equals a,t,g, or c
  SITE (8942): n equals a,t,g, or c
  SITE (8943): n equals a,t,g, or c
  SITE (8944): n equals a,t,g, or c
  SITE (8945): n equals a,t,g, or c
  SITE (8946): n equals a,t,g, or c
  SITE (8947): n equals a,t,g, or c
  SITE (8948): n equals a,t,g, or c
  SITE (8949): n equals a,t,g, or c
  SITE (8950): n equals a,t,g, or c
  SITE (8951): n equals a,t,g, or c
  SITE (8952): n equals a,t,g, or c
  SITE (8953): n equals a,t,g, or c
  SITE (8954): n equals a,t,g, or c
  SITE (8955): n equals a,t,g, or c
  SITE (8956): n equals a,t,g, or c
  SITE (8957): n equals a,t,g, or c
  SITE (8958): n equals a,t,g, or c
  SITE (8959): n equals a,t,g, or c
  SITE (8960): n equals a,t,g, or c
  SITE (8961): n equals a,t,g, or c
  SITE (8962): n equals a,t,g, or c
  SITE (8963): n equals a,t,g, or c
  SITE (8964): n equals a,t,g, or c
  SITE (8965): n equals a,t,g, or c
  SITE (8966): n equals a,t,g, or c
  SITE (8967): n equals a,t,g, or c
  SITE (8968): n equals a,t,g, or c
  SITE (8969): n equals a,t,g, or c
  SITE (8970): n equals a,t,g, or c
  SITE (8971): n equals a,t,g, or c
  SITE (8972): n equals a,t,g, or c
  SITE (8973): n equals a,t,g, or c
  SITE (8974): n equals a,t,g, or c
  SITE (8975): n equals a,t,g, or c
  SITE (8976): n equals a,t,g, or c
  SITE (8977): n equals a,t,g, or c
  SITE (8978): n equals a,t,g, or c
  SITE (8979): n equals a,t,g, or c
  SITE (8980): n equals a,t,g, or c
  SITE (8981): n equals a,t,g, or c
  SITE (8982): n equals a,t,g, or c
  SITE (8983): n equals a,t,g, or c
  SITE (8984): n equals a,t,g, or c
  SITE (8985): n equals a,t,g, or c
  SITE (8986): n equals a,t,g, or c
  SITE (8987): n equals a,t,g, or c
  SITE (8988): n equals a,t,g, or c
  SITE (8989): n equals a,t,g, or c
  SITE (8990): n equals a,t,g, or c
  SITE (8991): n equals a,t,g, or c
  SITE (8992): n equals a,t,g, or c
  SITE (8993): n equals a,t,g, or c
  SITE (8994): n equals a,t,g, or c
  SITE (8995): n equals a,t,g, or c
  SITE (8996): n equals a,t,g, or c
  SITE (8997): n equals a,t,g, or c
  SITE (8998): n equals a,t,g, or c
  SITE (8999): n equals a,t,g, or c
  SITE (9000): n equals a,t,g, or c
  SITE (9001): n equals a,t,g, or c
  SITE (9002): n equals a,t,g, or c
  SITE (9003): n equals a,t,g, or c
  SITE (9004): n equals a,t,g, or c
  SITE (9005): n equals a,t,g, or c
  SITE (9006): n equals a,t,g, or c
  SITE (9007): n equals a,t,g, or c
  SITE (9008): n equals a,t,g, or c
  SITE (9009): n equals a,t,g, or c
  SITE (9010): n equals a,t,g, or c
  SITE (9011): n equals a,t,g, or c
  SITE (9012): n equals a,t,g, or c
  SITE (9013): n equals a,t,g, or c
  SITE (9014): n equals a,t,g, or c
  SITE (9015): n equals a,t,g, or c
  SITE (9016): n equals a,t,g, or c
  SITE (9017): n equals a,t,g, or c
  SITE (9018): n equals a,t,g, or c
  SITE (9019): n equals a,t,g, or c
  SITE (9020): n equals a,t,g, or c
  SITE (9021): n equals a,t,g, or c
  SITE (9022): n equals a,t,g, or c
  SITE (9023): n equals a,t,g, or c
  SITE (9024): n equals a,t,g, or c
  SITE (9025): n equals a,t,g, or c
  SITE (9026): n equals a,t,g, or c
  SITE (9027): n equals a,t,g, or c
  SITE (9028): n equals a,t,g, or c
  SITE (9029): n equals a,t,g, or c
  SITE (9030): n equals a,t,g, or c
  SITE (9031): n equals a,t,g, or c
  SITE (9032): n equals a,t,g, or c
  SITE (9033): n equals a,t,g, or c
  SITE (9034): n equals a,t,g, or c
  SITE (9035): n equals a,t,g, or c
  SITE (9036): n equals a,t,g, or c
  SITE (9037): n equals a,t,g, or c
  SITE (9038): n equals a,t,g, or c
  SITE (9039): n equals a,t,g, or c
  SITE (9040): n equals a,t,g, or c
  SITE (9041): n equals a,t,g, or c
  SITE (9042): n equals a,t,g, or c
  SITE (9043): n equals a,t,g, or c
  SITE (9044): n equals a,t,g, or c
  SITE (9045): n equals a,t,g, or c
  SITE (9046): n equals a,t,g, or c
  SITE (9047): n equals a,t,g, or c
  SITE (9048): n equals a,t,g, or c
  SITE (9049): n equals a,t,g, or c
  SITE (9050): n equals a,t,g, or c
  SITE (9051): n equals a,t,g, or c
  SITE (9052): n equals a,t,g, or c
  SITE (9053): n equals a,t,g, or c
  SITE (9054): n equals a,t,g, or c
  SITE (9055): n equals a,t,g, or c
  SITE (9056): n equals a,t,g, or c
  SITE (9057): n equals a,t,g, or c
  SITE (9058): n equals a,t,g, or c
  SITE (9059): n equals a,t,g, or c
  SITE (9060): n equals a,t,g, or c
  SITE (9061): n equals a,t,g, or c
  SITE (9062): n equals a,t,g, or c
  SITE (9063): n equals a,t,g, or c
  SITE (9064): n equals a,t,g, or c
  SITE (9065): n equals a,t,g, or c
  SITE (9066): n equals a,t,g, or c
  SITE (9067): n equals a,t,g, or c
  SITE (9068): n equals a,t,g, or c
  SITE (9069): n equals a,t,g, or c
  SITE (9070): n equals a,t,g, or c
  SITE (9071): n equals a,t,g, or c
  SITE (9072): n equals a,t,g, or c
  SITE (9073): n equals a,t,g, or c
  SITE (9074): n equals a,t,g, or c
  SITE (9075): n equals a,t,g, or c
  SITE (9076): n equals a,t,g, or c
  SITE (9077): n equals a,t,g, or c
  SITE (9078): n equals a,t,g, or c
  SITE (9079): n equals a,t,g, or c
  SITE (9080): n equals a,t,g, or c
  SITE (9081): n equals a,t,g, or c
  SITE (9082): n equals a,t,g, or c
  SITE (9083): n equals a,t,g, or c
  SITE (9084): n equals a,t,g, or c
  SITE (9085): n equals a,t,g, or c
  SITE (9086): n equals a,t,g, or c
  SITE (9087): n equals a,t,g, or c
  SITE (9088): n equals a,t,g, or c
  SITE (9089): n equals a,t,g, or c
  SITE (9090): n equals a,t,g, or c
  SITE (9091): n equals a,t,g, or c
  SITE (9092): n equals a,t,g, or c
  SITE (9093): n equals a,t,g, or c
  SITE (9094): n equals a,t,g, or c
  SITE (9095): n equals a,t,g, or c
  SITE (9096): n equals a,t,g, or c
  SITE (9097): n equals a,t,g, or c
  SITE (9098): n equals a,t,g, or c
  SITE (9099): n equals a,t,g, or c
  SITE (9100): n equals a,t,g, or c
  SITE (9101): n equals a,t,g, or c
  SITE (9102): n equals a,t,g, or c
  SITE (9103): n equals a,t,g, or c
  SITE (9104): n equals a,t,g, or c
  SITE (9105): n equals a,t,g, or c
  SITE (9106): n equals a,t,g, or c
  SITE (9107): n equals a,t,g, or c
  SITE (9108): n equals a,t,g, or c
  SITE (9109): n equals a,t,g, or c
  SITE (9110): n equals a,t,g, or c
  SITE (9111): n equals a,t,g, or c
  SITE (9112): n equals a,t,g, or c
  SITE (9113): n equals a,t,g, or c
  SITE (9114): n equals a,t,g, or c
  SITE (9115): n equals a,t,g, or c
  SITE (9116): n equals a,t,g, or c
  SITE (9117): n equals a,t,g, or c
  SITE (9118): n equals a,t,g, or c
  SITE (9119): n equals a,t,g, or c
  SITE (9120): n equals a,t,g, or c
  SITE (9121): n equals a,t,g, or c
  SITE (9122): n equals a,t,g, or c
  SITE (9123): n equals a,t,g, or c
  SITE (9124): n equals a,t,g, or c
  SITE (9125): n equals a,t,g, or c
  SITE (9126): n equals a,t,g, or c
  SITE (9127): n equals a,t,g, or c
  SITE (9128): n equals a,t,g, or c
  SITE (9129): n equals a,t,g, or c
  SITE (9130): n equals a,t,g, or c
  SITE (9131): n equals a,t,g, or c
  SITE (9132): n equals a,t,g, or c
  SITE (9133): n equals a,t,g, or c
  SITE (9134): n equals a,t,g, or c
  SITE (9135): n equals a,t,g, or c
  SITE (9136): n equals a,t,g, or c
  SITE (9137): n equals a,t,g, or c
  SITE (9138): n equals a,t,g, or c
  SITE (9139): n equals a,t,g, or c
  SITE (9140): n equals a,t,g, or c
  SITE (9141): n equals a,t,g, or c
  SITE (9142): n equals a,t,g, or c
  SITE (9143): n equals a,t,g, or c
  SITE (9144): n equals a,t,g, or c
  SITE (9145): n equals a,t,g, or c
  SITE (9146): n equals a,t,g, or c
  SITE (9147): n equals a,t,g, or c
  SITE (9148): n equals a,t,g, or c
  SITE (9149): n equals a,t,g, or c
  SITE (9150): n equals a,t,g, or c
  SITE (9151): n equals a,t,g, or c
  SITE (9152): n equals a,t,g, or c
  SITE (9153): n equals a,t,g, or c
  SITE (9154): n equals a,t,g, or c
  SITE (9155): n equals a,t,g, or c
  SITE (9156): n equals a,t,g, or c
  SITE (9157): n equals a,t,g, or c
  SITE (9158): n equals a,t,g, or c
  SITE (9159): n equals a,t,g, or c
  SITE (9160): n equals a,t,g, or c
  SITE (9161): n equals a,t,g, or c
  SITE (9162): n equals a,t,g, or c
  SITE (9163): n equals a,t,g, or c
  SITE (9164): n equals a,t,g, or c
  SITE (9165): n equals a,t,g, or c
  SITE (9166): n equals a,t,g, or c
  SITE (9167): n equals a,t,g, or c
  SITE (9168): n equals a,t,g, or c
  SITE (9169): n equals a,t,g, or c
  SITE (9170): n equals a,t,g, or c
  SITE (9171): n equals a,t,g, or c
  SITE (9172): n equals a,t,g, or c
  SITE (9173): n equals a,t,g, or c
  SITE (9174): n equals a,t,g, or c
  SITE (9175): n equals a,t,g, or c
  SITE (9176): n equals a,t,g, or c
  SITE (9177): n equals a,t,g, or c
  SITE (9178): n equals a,t,g, or c
  SITE (9179): n equals a,t,g, or c
  SITE (9180): n equals a,t,g, or c
  SITE (9181): n equals a,t,g, or c
  SITE (9182): n equals a,t,g, or c
  SITE (9183): n equals a,t,g, or c
  SITE (9184): n equals a,t,g, or c
  SITE (9185): n equals a,t,g, or c
  SITE (9186): n equals a,t,g, or c
  SITE (9187): n equals a,t,g, or c
  SITE (9188): n equals a,t,g, or c
  SITE (9189): n equals a,t,g, or c
  SITE (9190): n equals a,t,g, or c
  SITE (9191): n equals a,t,g, or c
  SITE (9192): n equals a,t,g, or c
  SITE (9193): n equals a,t,g, or c
  SITE (9194): n equals a,t,g, or c
  SITE (9195): n equals a,t,g, or c
  SITE (9196): n equals a,t,g, or c
  SITE (9197): n equals a,t,g, or c
  SITE (9198): n equals a,t,g, or c
  SITE (9199): n equals a,t,g, or c
  SITE (9200): n equals a,t,g, or c
  SITE (9201): n equals a,t,g, or c
  SITE (9202): n equals a,t,g, or c
  SITE (9203): n equals a,t,g, or c
  SITE (9204): n equals a,t,g, or c
  SITE (9205): n equals a,t,g, or c
  SITE (9206): n equals a,t,g, or c
  SITE (9207): n equals a,t,g, or c
  SITE (9208): n equals a,t,g, or c
  SITE (9209): n equals a,t,g, or c
  SITE (9210): n equals a,t,g, or c
  SITE (9211): n equals a,t,g, or c
  SITE (9212): n equals a,t,g, or c
  SITE (9213): n equals a,t,g, or c
  SITE (9214): n equals a,t,g, or c
  SITE (9215): n equals a,t,g, or c
  SITE (9216): n equals a,t,g, or c
  SITE (9217): n equals a,t,g, or c
  SITE (9218): n equals a,t,g, or c
  SITE (9219): n equals a,t,g, or c
  SITE (9220): n equals a,t,g, or c
  SITE (9221): n equals a,t,g, or c
  SITE (9222): n equals a,t,g, or c
  SITE (9223): n equals a,t,g, or c
  SITE (9224): n equals a,t,g, or c
  SITE (9225): n equals a,t,g, or c
  SITE (9226): n equals a,t,g, or c
  SITE (9227): n equals a,t,g, or c
  SITE (9228): n equals a,t,g, or c
  SITE (9229): n equals a,t,g, or c
  SITE (9230): n equals a,t,g, or c
  SITE (9231): n equals a,t,g, or c
  SITE (9232): n equals a,t,g, or c
  SITE (9233): n equals a,t,g, or c
  SITE (9234): n equals a,t,g, or c
  SITE (9235): n equals a,t,g, or c
  SITE (9236): n equals a,t,g, or c
  SITE (9237): n equals a,t,g, or c
  SITE (9238): n equals a,t,g, or c
  SITE (9239): n equals a,t,g, or c
  SITE (9240): n equals a,t,g, or c
  SITE (9241): n equals a,t,g, or c
  SITE (9242): n equals a,t,g, or c
  SITE (9243): n equals a,t,g, or c
  SITE (9244): n equals a,t,g, or c
  SITE (9245): n equals a,t,g, or c
  SITE (9246): n equals a,t,g, or c
  SITE (9247): n equals a,t,g, or c
  SITE (9248): n equals a,t,g, or c
  SITE (9249): n equals a,t,g, or c
  SITE (9250): n equals a,t,g, or c
  SITE (9251): n equals a,t,g, or c
  SITE (9252): n equals a,t,g, or c
  SITE (9253): n equals a,t,g, or c
  SITE (9254): n equals a,t,g, or c
  SITE (9255): n equals a,t,g, or c
  SITE (9256): n equals a,t,g, or c
  SITE (9257): n equals a,t,g, or c
  SITE (9258): n equals a,t,g, or c
  SITE (9259): n equals a,t,g, or c
  SITE (9260): n equals a,t,g, or c
  SITE (9261): n equals a,t,g, or c
  SITE (9262): n equals a,t,g, or c
  SITE (9263): n equals a,t,g, or c
  SITE (9264): n equals a,t,g, or c
  SITE (9265): n equals a,t,g, or c
  SITE (9266): n equals a,t,g, or c
  SITE (9267): n equals a,t,g, or c
  SITE (9268): n equals a,t,g, or c
  SITE (9269): n equals a,t,g, or c
  SITE (9270): n equals a,t,g, or c
  SITE (9271): n equals a,t,g, or c
  SITE (9272): n equals a,t,g, or c
  SITE (9273): n equals a,t,g, or c
  SITE (9274): n equals a,t,g, or c
  SITE (9275): n equals a,t,g, or c
  SITE (9276): n equals a,t,g, or c
  SITE (9277): n equals a,t,g, or c
  SITE (9278): n equals a,t,g, or c
  SITE (9279): n equals a,t,g, or c
  SITE (9280): n equals a,t,g, or c
  SITE (9281): n equals a,t,g, or c
  SITE (9282): n equals a,t,g, or c
  SITE (9283): n equals a,t,g, or c
  SITE (9284): n equals a,t,g, or c
  SITE (9285): n equals a,t,g, or c
  SITE (9286): n equals a,t,g, or c
  SITE (9287): n equals a,t,g, or c
  SITE (9288): n equals a,t,g, or c
  SITE (9289): n equals a,t,g, or c
  SITE (9290): n equals a,t,g, or c
  SITE (9291): n equals a,t,g, or c
  SITE (9292): n equals a,t,g, or c
  SITE (9293): n equals a,t,g, or c
  SITE (9294): n equals a,t,g, or c
  SITE (9295): n equals a,t,g, or c
  SITE (9296): n equals a,t,g, or c
  SITE (9297): n equals a,t,g, or c
  SITE (9298): n equals a,t,g, or c
  SITE (9299): n equals a,t,g, or c
  SITE (9300): n equals a,t,g, or c
  SITE (9301): n equals a,t,g, or c
  SITE (9302): n equals a,t,g, or c
  SITE (9303): n equals a,t,g, or c
  SITE (9304): n equals a,t,g, or c
  SITE (9305): n equals a,t,g, or c
  SITE (9306): n equals a,t,g, or c
  SITE (9307): n equals a,t,g, or c
  SITE (9308): n equals a,t,g, or c
  SITE (9309): n equals a,t,g, or c
  SITE (9310): n equals a,t,g, or c
  SITE (9311): n equals a,t,g, or c
  SITE (9312): n equals a,t,g, or c
  SITE (9313): n equals a,t,g, or c
  SITE (9314): n equals a,t,g, or c
  SITE (9315): n equals a,t,g, or c
  SITE (9316): n equals a,t,g, or c
  SITE (9317): n equals a,t,g, or c
  SITE (9318): n equals a,t,g, or c
  SITE (9319): n equals a,t,g, or c
  SITE (9320): n equals a,t,g, or c
  SITE (9321): n equals a,t,g, or c
  SITE (9322): n equals a,t,g, or c
  SITE (9323): n equals a,t,g, or c
  SITE (9324): n equals a,t,g, or c
  SITE (9325): n equals a,t,g, or c
  SITE (9326): n equals a,t,g, or c
  SITE (9327): n equals a,t,g, or c
  SITE (9328): n equals a,t,g, or c
  SITE (9329): n equals a,t,g, or c
  SITE (9330): n equals a,t,g, or c
  SITE (9331): n equals a,t,g, or c
  SITE (9332): n equals a,t,g, or c
  SITE (9333): n equals a,t,g, or c
  SITE (9334): n equals a,t,g, or c
  SITE (9335): n equals a,t,g, or c
  SITE (9336): n equals a,t,g, or c
  SITE (9337): n equals a,t,g, or c
  SITE (9338): n equals a,t,g, or c
  SITE (9339): n equals a,t,g, or c
  SITE (9340): n equals a,t,g, or c
  SITE (9341): n equals a,t,g, or c
  SITE (9342): n equals a,t,g, or c
  SITE (9343): n equals a,t,g, or c
  SITE (9344): n equals a,t,g, or c
  SITE (9345): n equals a,t,g, or c
  SITE (9346): n equals a,t,g, or c
  SITE (9347): n equals a,t,g, or c
  SITE (9348): n equals a,t,g, or c
  SITE (9349): n equals a,t,g, or c
  SITE (9350): n equals a,t,g, or c
  SITE (9351): n equals a,t,g, or c
  SITE (9352): n equals a,t,g, or c
  SITE (9353): n equals a,t,g, or c
  SITE (9354): n equals a,t,g, or c
  SITE (9355): n equals a,t,g, or c
  SITE (9356): n equals a,t,g, or c
  SITE (9357): n equals a,t,g, or c
  SITE (9358): n equals a,t,g, or c
  SITE (9359): n equals a,t,g, or c
  SITE (9360): n equals a,t,g, or c
  SITE (9361): n equals a,t,g, or c
  SITE (9362): n equals a,t,g, or c
  SITE (9363): n equals a,t,g, or c
  SITE (9364): n equals a,t,g, or c
  SITE (9365): n equals a,t,g, or c
  SITE (9366): n equals a,t,g, or c
  SITE (9367): n equals a,t,g, or c
  SITE (9368): n equals a,t,g, or c
  SITE (9369): n equals a,t,g, or c
  SITE (9370): n equals a,t,g, or c
  SITE (9371): n equals a,t,g, or c
  SITE (9372): n equals a,t,g, or c
  SITE (9373): n equals a,t,g, or c
  SITE (9374): n equals a,t,g, or c
  SITE (9375): n equals a,t,g, or c
  SITE (9376): n equals a,t,g, or c
  SITE (9377): n equals a,t,g, or c
  SITE (9378): n equals a,t,g, or c
  SITE (9379): n equals a,t,g, or c
  SITE (9380): n equals a,t,g, or c
  SITE (9381): n equals a,t,g, or c
  SITE (9382): n equals a,t,g, or c
  SITE (9383): n equals a,t,g, or c
  SITE (9384): n equals a,t,g, or c
  SITE (9385): n equals a,t,g, or c
  SITE (9386): n equals a,t,g, or c
  SITE (9387): n equals a,t,g, or c
  SITE (9388): n equals a,t,g, or c
  SITE (9389): n equals a,t,g, or c
  SITE (9390): n equals a,t,g, or c
  SITE (9391): n equals a,t,g, or c
  SITE (9392): n equals a,t,g, or c
  SITE (9393): n equals a,t,g, or c
  SITE (9394): n equals a,t,g, or c
  SITE (9395): n equals a,t,g, or c
  SITE (9396): n equals a,t,g, or c
  SITE (9397): n equals a,t,g, or c
  SITE (9398): n equals a,t,g, or c
  SITE (9399): n equals a,t,g, or c
  SITE (9400): n equals a,t,g, or c
  SITE (9401): n equals a,t,g, or c
  SITE (9402): n equals a,t,g, or c
  SITE (9403): n equals a,t,g, or c
  SITE (9404): n equals a,t,g, or c
  SITE (9405): n equals a,t,g, or c
  SITE (9406): n equals a,t,g, or c
  SITE (9407): n equals a,t,g, or c
  SITE (9408): n equals a,t,g, or c
  SITE (9409): n equals a,t,g, or c
  SITE (9410): n equals a,t,g, or c
  SITE (9411): n equals a,t,g, or c
  SITE (9412): n equals a,t,g, or c
  SITE (9413): n equals a,t,g, or c
  SITE (9414): n equals a,t,g, or c
  SITE (9415): n equals a,t,g, or c
  SITE (9416): n equals a,t,g, or c

SEQ ID NO: 11499 - DNA, 6335 bp, Homo sapiens
gcacagcagcatgggggaagccacccagcagtggcagcgggtggggagatcaccctgcagagccgccggtggcatttggaagagctggcgcacctgttgctgcctcagccctgtgcaaaccaggtaagcctagcatcctgcttgccctgatctggcaatttggaaatgactcaaagtattgaattttaaagattagagttttaggatactttcctcattatatttacactttaactacaaaccaagagtcttggccaagcacagtgcctcacacctataatcccagcactttgggagtccagggcaggaggatcgcttgagcgcaggagtttgagaccagcctaggcagcatagtgagaccttgtcactacaaaaaaaaattgaaaaattagccaggcatggtggcacatgcctgtaatcccagctattcgggaggctatggtgggagaattgcttgagcccgggaggttaagactgccctgagccatgactgtaccactcatgagcctgagcaatagagcaagaccccatctctttaaaaaggaaaaaaaaaaagccaagattataaaatatttgccatgcctgatacatgaacacaaaggagcttttaagagatgtccataccctccttttataataatacaaataaatgcaaaagtcaaagcaaccccgcatattatgtttgattctcctggtaatacccacactacttcagcagtattcttgtacctgccacattaagtaatttaaacctgctatttcactgagcaagatagataaaacatgtcatctccttgagattagtttttgaaaatatgtattacctcacagcagcctaacgcatcttgccgtattgccctgctttcatcttgtcaacagaattccactgggtggaatttgccatgtttgttttaaagttgtttatgcctaaacaacttgaaaaaattttaaaaaggtacattttcctcccattttctgaaagtgtagcaaatatgcaggtaataagtatccttataaatgtccagattatgtataccaagtggaattcttatatgggtgttttgcaatgtgatatttgtaatattaacatgagtataagattactgatttaaatctgatattaaaattaattgtggctgggcatggtagctcacgcctgtaatctcagcactttgggaggccaaggtgggtggaccacctgaggtcaggagttcgaaaccagcctggccaacaaggtgaaaccccatctctactaaaaatacaaaaattagctggacatagtgatgagcgcctctaatcccagctactcaggaggctgaggcaggagaatcgcttgaacccgggaggcagaggttgcagtgagccaagatcaggccactgcactgtagcctgggagacagagactccatctcaaaaaaaaaaaaaaaaattcgttgttcacataactgcagaagcttcatcttttctttggacattattagatgtcctagatcttaaaatgcaactttattggttttgtactttgtggttttttttggttttttttgttttttgttttgctaatactcgatagtatgttccatatagccaccactctgctcaaagtattccatttatattacttttttttacaaacctaaaggataagggaacttgtgagtatttagattcatgcgccattttgagcattctattttgagaatttgtccttggaggcacagttatgtgcctattccatatgtttatcagccttgtatcttcattgaagacccagctaactgtgctcttacctagtctttgcccttcttcatattcttccaagaagtgaaaatttggggtaattttgataccgaaaatcactttgtattttaagataggaggaaaaaacaatatctgaagtggaaactcgatagtcactttgtagctccatctgcctaaggcctccatcctgctagtctgtaagcatctcctgcgggcttgttagaaatgcagcctgtcgggcccaacctcaggcctgccagacttcacatgatccagctgactgtcacgagtggacaggtttgagaagctctggtctgtgtgacttaatgctcataggtttggatcaagcagtgattaagaatcagacagagatgctcatttcagcagcacatgtactaaaattggaacaatacagagaagattcgcgtggttcctatgcaaggatgagatacagatttatgaagcatcccatatacaaattttcctgccacttgtgatggctcatgactgtaatcccaacactttgggatgccgaggcaggaggactacttgagcccaagagtttgagaccagcctgggcaacatagtgagaccccatctctattaaaaagaaaaaaaaaattagctggatgtggtggcacatgcctgtagtcctagctacttgagaggctgaggcaggaggatcacttgagcccaggagtttgaggttgcagtgagctgtgattgcactactataatccgggcaacagagcaagaccctgtttcaaaaaaaagaaaaaaacctacaaattttaaaaaccacacaggacaatgaaatgttttaggaatctacatttctgtagccttttcataccatgtagagattgccaccttccctggtggccccaggatttgttcttagcatgtttatgtttcagaatgatgtgtagttggttaaggaagtttagaacagcacagagtacaaatagctgatgtttgaaggaaaaattatatacatatacatgtttatttacatatgtagcaagagaaattcaattctgagatctgggagaaatgaaggcataaaaaggtagattacaatgcatcatttgtcccacgacccctaaattatatgttacagtggaagcattgtctgcgttagggacatgaatttgataagttcatgtttgctctgtttctagcttcaaaatctatgcaagaaggctggggcagtggtggggatgaaatgaacctcagtaccagccagtgggaggatgaagaaggggacgtgtggaataatgctgcttcccaagaaagcacctcctcctgcagctcctgggggaacgcccccaaaaaaggacttcaaaaggtaagtacaacactcttaacgacggtacaccctgaaaaccaaaggtacttcagacacattcagtatccagttaatcagacaaaaagatagacctgaggttctcaaagtagtcttaggacccttggaggtcccagagaccctttcaggggagtaagcaaggtcacaactattatcatgccagtactaagactgtctttttcatttgaagtctctctccggtatagggtagaggtgtccagagaactttattgtagcagagaatgtgcagaaacaggcatgaaaatccagccatttctcttaagccagacatagagatttgccaaaaggcaaaacagtgccacccttctcatgaaaaattaattactttttattttaaaatgttaggttaatgtgtagtgactattatttttaagcaaaattatatttttaaattttctcagttttaatttctaatacagtaaatagcaatagacacaactcatgtcaacagaagttctttgggatcttcagtctctaagagagtattatagggtcctgagaccaaaaagtttgagacagatggttaagaagtcttaaaacagatgggcaggcagggcacagtggctcacacctgtaatcccggcactttgggaggccaaagtgggtggatcacttgaggtcaggagttcaagtccagcctggccaacatggtgaaaccccatctctactaaaaatacaaaaactagctgggcgtggtggtgggtgcctgtaatcccagctactcgggaggctgaggcaagagaattgcttaaacctgggaggcggaggttgcagttgcagtgagccaagatcgcctcactgcactccagcctgggcgacagagcgagactccctctcaaaaaaaaagacacaaatgtgcggtcatctagaaaacactgagatacacatctcatatatacatgagctacatgagacgtgtatctcatttttttctagatgactgcccaattcagtccacattcagcatgactgaatttcaagtaggtcacaaacttaaatattaaaaatatgaaaacatgaaagaacattaaaaacaattttggactcagagaggcctaactatgaccaaaatctaaaagccataaaataaaatttttttgtgtcaatagataaatgtaaaaactgtacatgacagaaaataccataatcaaagtcaaaagaaaaatagcaaactggaaaaatatgtttataactcatatcatagagagggccaatcccctgatacataaagtcctagaaactgatttaaaaaaaaaatcagccagaaacccagtagaaaaaggagcacagaatgtgaagagtagctggtccacagagaaggagcaccagtggctcctagacacggactcacaggaaggcagtgcagttccagacagcactcagagacacctgccatttttcatctctcagacccacagaaagccagcgttttgatttttttatttaaaaaaatttttttagagacagagtcttgctgtgtcaccttaggggctggagtacaaccttgaactcctgggctcgaattgtcctcctgcctcagcctcctgagtagctgggtctacaggtgcatgccactctgcccaactaattttattttttattttttctgtagagacagagtctcactttgtggcatttatacagttttgtattgcagcatttttgtagtaaaaagataacaataatttatgtgtacattgatggagtaacaagttaattatgtcacttctacattatacagaactaaaaggaaattctatctatgtattgatatgaaaagatcactaaagtacattgttaaattaaaagcaaggtgcagaaaaacatgtacagcacacaccctattttgtggggtaggaggaagaaaacgtgtgtgtgtgtatgtgagtgtgtgtatgcatgcatgcacacgtagtgtatcagcttctacagaatgttctaaattctctggaagggcaaataagaaactgctatgagtagtgcctcttcgagagaacaggaactaagcaaatggggtggcatgagatgaaaactttctttataccttgtttatacttttgaatcgtgtgaatgtattcatgttcaaaaaaatatagtttataaaagcattcagttaataatcagcagaaaccagaaactaaaatcagagctctccgctcatgaggagtagaagtgattacagacatcaaaaagaatcctttttacagttgggctggcaaataatccagttaatgatgggaccaaaaatagcaaattggtaaattaaaatcttgactaatctggctctggcagcatagtaatgattgaaatagccccaaaataagctagttccttgaggaaagaaagcctgtttatagagctccatatgctccatgatatagctgtggcaggctcaattgtgaaaaacactatgaagaatatttttggaagggaatttttttcatattgtaataatgcatcattagaacctttgcatttataggctcagagggaagttattgagaagcctcctggctcttctgtggtgccgagccctcccccacccccactgctctttctgtagctgacctttttcctcatcctctccttcactgacattttcctccttattccttttctctaccctatgagctataagtaacaaatagttaataaaattaacaggttgtttcatcctttcttcttgctgcctctttactcattggaataaaccccctcattttatcatttttcagaataaagcttagaaaaggcaaaaagtgtaatttttagtaaacttcacatagggctgtgttcaagggagcgcttaggattattggatagtaaaagtagtctatatttgtgataaactaaattaattatctgggaaagagaaataattatcttgctttaagttcataaattgcacatatataccaacctgcaaatgtaccttgatgctttccgtagcagtagccacgaaatactgttagggagtttctggaatacagcattattcaatgttaatacaaaaagatcctgtgacttttaaatgaccctgaatttaggctgtctcccatttctggtagaaatgcattaaaatgtagctcatggacttccccctttcccacactttgttcaagggcatgaagacgtctggcaagcaggatgaggcctggatcatgagccggctgatcaaacaactcac

SEQ ID NO: 11500 - DNA, 5775 bp, Homo sapiens; identical to SEQ ID NO: 7562

SEQ ID NO: 11501 - DNA, 738 bp, Homo sapiens; identical to SEQ ID NO: 7563

SEQ ID NO: 11502 - DNA, 325 bp, Homo sapiens
gaaatgtatttccagttccaaaacctaataactatgtctttaagttgatagtgattaaattgtttgtaacctttccttttgttaattaatgtgcactaatgaaaactctgttttcctacacagagagagccagctgaggaggccttgaagagtaacaatatgaatcttgatcaggccatgagtaagtcatacaacatcctttttaaaaaggtacccagctgtgaagttttactttccagaagcatttgattgtagtcatggtttaatggttaatatgtcctgggtagacaggaccaggccacagtgaaggggcaaccacacaaca

SEQ ID NO: 11503 - DNA, 1562 bp, Homo sapiens
ggagagctcccgcttcctgtttatatttcacaagcgtcaaactctttagcaagtgtgagaaatgcctccttttctaactgctaactggcatgacctcacttcggggctcagagatccctccctgccagaatgtacttttgctggccaaaggcggggaccggggtccgccctggaaacgcgctttcaatcttgggcgacctgcttcattgtgtgattttaataaggatgaagggctgtcacggctgcgtcaaaaccacggttccagcaggaaataagcactgggagaggacaggacacgtacccccttccgccgacaccccccacccgatggcaggagggagcccaaaccttgcagcttccatggctcatggctcatgacaatatcattcttaaaattctttgagtttatcaatacgttttgcccttacctgccctacaactgtaaataacaaaatgtatgcatttcctactttttatttgttccgaatgtattctcaagcttcaagaacggttcccatcctaccagacttccaccgtatcaggattaaaaaacaaaacaaaactctgttattctctccatagcttatggcttttaaaaaataataatttgaacaaacaattcctacgtggcatagatctttccatcctggagaatgttactatttcagtctgtcatcttttgtagatattaaaaacctttcgtatgtcaatttctttgctcctcaccaccaccttttaggcaggtactagtattagctcgatgcatttgacacgtgtttattgttattcaatgccagacactgaaataggccctagggatgtataacatattctgtttggaaaattgaggctcaaggaggctaaataacctgccccaggttatatagtctgggattcagtctgagacaggcccccaggtttgttggactccaaagcttgtgctcttaatcactatacttacggttgcctggtagggttgtttgggttgtgcaccgctcaactccagggggagctattcacattgcagtctgtgtgagagcaccctctggagttgtgcaatgtggcactgagcagctgcactgggtaatcctgccattttgtagccgtccctgctgttttgtctcttctaagtggggagagaacataatttcgtacaagagaaagatgggatctttctcttctttcctattgggactcagcatcttggtggccttacactgtgtgctgaatgagtctatactgttactatctatagtaactcccgggcccttcctgtgcaagaatttagagccccaagctcccctatacatccccacaacttgcttgctcagatatcactttttacctgcttatgaagcctcaaaaatttttatctcagctcacggtaagaaatacattttacatcatgtctcaatacacacacgtatgtctttacacacatcttaagtatatttaagcatagggcagccaaagcttggttgggctatagcaataagtgaccgctaccctctctcctatactcctgagtaaccattgctctcttaaaaaagaaaaaagaaaaa

SEQ ID NO: 11504 - DNA, 65 bp, Homo sapiens
acgccactgcattccagcctgggcaacaaagcgagactctgtctcaaaaaaaaaaaaaaaaaaac

SEQ ID NO: 11505 - DNA, 84 bp, Homo sapiens
gtgagccgagatcgcgccactgcactccagcctgggcaacagagcgagactccgtctcaaaaaaaaaaaaaatagaaaagaaaa

SEQ ID NO: 11506 - DNA, 283 bp, Homo sapiens; identical to SEQ ID NO: 5410

SEQ ID NO: 11507 - DNA, 147 bp, Homo sapiens; identical to SEQ ID NO: 5241

SEQ ID NO: 11508 - DNA, 143 bp, Homo sapiens; identical to SEQ ID NO: 5446

SEQ ID NO: 11509 - DNA, 170 bp, Homo sapiens; identical to SEQ ID NO: 5447

SEQ ID NO: 11510 - DNA, 125 bp, Homo sapiens; identical to SEQ ID NO: 5454

SEQ ID NO: 11511 - DNA, 162 bp, Homo sapiens; identical to SEQ ID NO: 5244

SEQ ID NO: 11512 - DNA, 301 bp, Homo sapiens; identical to SEQ ID NO: 5486
  SITE (98): n equals a,t,g, or c

SEQ ID NO: 11513 - DNA, 246 bp, Homo sapiens; identical to SEQ ID NO: 7852

SEQ ID NO: 11514 - DNA, 193 bp, Homo sapiens; identical to SEQ ID NO: 5245

SEQ ID NO: 11515 - DNA, 140 bp, Homo sapiens; identical to SEQ ID NO: 5978

SEQ ID NO: 11516 - DNA, 246 bp, Homo sapiens; identical to SEQ ID NO: 5507

SEQ ID NO: 11517 - DNA, 153 bp, Homo sapiens; identical to SEQ ID NO: 5246

SEQ ID NO: 11518 - DNA, 61 bp, Homo sapiens; identical to SEQ ID NO: 7550

SEQ ID NO: 11519 - DNA, 193 bp, Homo sapiens; identical to SEQ ID NO: 5539

SEQ ID NO: 11520 - DNA, 136 bp, Homo sapiens; identical to SEQ ID NO: 5560

SEQ ID NO: 11521 - DNA, 279 bp, Homo sapiens; identical to SEQ ID NO: 5923

SEQ ID NO: 11522 - DNA, 300 bp, Homo sapiens; identical to SEQ ID NO: 5574

SEQ ID NO: 11523 - DNA, 150 bp, Homo sapiens; identical to SEQ ID NO: 5248

SEQ ID NO: 11524 - DNA, 322 bp, Homo sapiens; identical to SEQ ID NO: 5582

SEQ ID NO: 11525 - DNA, 142 bp, Homo sapiens; identical to SEQ ID NO: 5249

SEQ ID NO: 11526 - DNA, 177 bp, Homo sapiens; identical to SEQ ID NO: 5600

SEQ ID NO: 11527 - DNA, 368 bp, Homo sapiens; identical to SEQ ID NO: 5252

SEQ ID NO: 11528 - DNA, 131 bp, Homo sapiens; identical to SEQ ID NO: 7941

SEQ ID NO: 11529 - DNA, 2925 bp, Homo sapiens; identical to SEQ ID NO: 5990

SEQ ID NO: 11530 - DNA, 4706 bp, Homo sapiens; identical to SEQ ID NO: 5625

SEQ ID NO: 11531 - DNA, 4704 bp, Homo sapiens; identical to SEQ ID NO: 5253

SEQ ID NO: 11532 - DNA, 1445 bp, Homo sapiens
cacaggtgccaggatgccaagggatacagaagaaggatggttgcttctctacccaggagtgccctgaggtgtcttaaaaagaggagcatttatgactcaggcagggtggcacattccagacggcagtgggcaggagcctgactccagagcgccttagaggctgccgctgggagttgagctggaccctgaaggcagtagggtaagccataaattagggttaaggaaccaagggaataaggggatcagaccattgcatagctccagcagcaccattactagcagcctgtgtgaatgatggtcccctcttacatgcccaccatgcaagggctctaggccattcttcactctttaatgcagaaaagcaaaacttccagctgttttcccctacccaaaatgtgtgagcctgagcccagccccaggatggatcttgtcctaggtaaccaagaaggccttaagtgtcagaagaggtagctccaggctgaataaagggacaaatgaagcattactgcactgagatcgcccgtcgtggggtgggtctatacccatctagtcattaagcctcaataatttggtttctaaatggactattatttgctacagatcaaaagttgttggaaactatattacacagataaatagaattgtcctgcaaataaaggaagtaatctcttctctgtttgagataccatgcagtatttgtccaacttgtacaaatagttctgatccatgagaatcctccactttcaacttacttgctgctatatcccaactattataaggccatggagaccagtagcctggtttccattatctttgctctgtttttttttatggcatggttgacactacctccagtagcaaagagttaacttgtcatcagagctataaaatcacaatgataagtgaaaagttctcttttgtactttagcatccaagagaagtgtaattcccaactacaatgctcaaaataatagagagtttttactttgggcctgaaaatacttataggtcaggtctcctagttgggtccatgctgttgttggtgttccctcccaagtaaatacatactgaatttagcaaattattcatttgtgatcctctgtgccatctaaaaatatatatagtttaaaacgctggccaggcgcagtggctcatgcctataatctcagcactttgggaggctgaggcaggtggatcacctgaggtcgggaattgaagaccaaactggccaacatggtgaaaccccctctctactaaaaatacaaaaattagctgggcatggtgttggactcctataatcccagctactagggaggctgaggcaggagaatctcttgaacccgggaggtggaggttgcagtgagccgagattgtggcactgtactccagcctgggtgacagagtgagactccatctcaaaaaaaaaaaaaaaaatgcttatcatt

SEQ ID NO: 11533 - DNA, 88 bp, Homo sapiens
ggaggttgcagtgagccgagatcgtgccattgcactccagcctgggtgacagagtgagactccgtctcaaaaaaaaaaaaaaaagagt

SEQ ID NO: 11534 - DNA, 98 bp, Homo sapiens; identical to SEQ ID NO: 9152

SEQ ID NO: 11535 - DNA, 57 bp, Homo sapiens; identical to SEQ ID NO: 8785

SEQ ID NO: 11536 - DNA, 136 bp, Homo sapiens; identical to SEQ ID NO: 5560

SEQ ID NO: 11537 - DNA, 1161 bp, Homo sapiens
tcaacagtgtaaaaatacatagaaaagcaagcaggaataaaggaatgtttaaataaattacaaagataaaaattaaaaccgtaattcagccgagcctggtgggtcatgcctgtaatcccagcactttgagaggctgaggcaggcagatcacttgaggtcaggattttgagaccagcctggccaacgtggtgaaacctcatttctactaaaaatacaaaaattagccgggcatggtgttgggtgcctgtaatcccagctactcagaaggctgaggcagaagaatcgcttaaacccaggagatggagtttgcagtgagcctagttcgcgccactggactagactaggtgacagagggagactccgtctcaaggaaaaaaaaaaaacttaactagaacatttattgagcacttactaggtgccagctagtgctctgagtgctttgtgtgtattaactcattaatgcccccagcacctcttgaggtagattaaaatctccatctcggttttacatgcaaggaaaccagagcaggaagagcttcaggaacttgccctcctagtaaagatagaaagtagcaaacccaggattcaaccccagaaatattatatactatgtttgtgctgaatcttttttttttttttttgtttttggagatggagttttgctcttgttgcccaggctggagtgcagtggcgcgatctcggctcaccgcaacctccgcctcccaggttcaagtgattctcctgcctcagcctcccaagtagctgggattgcaggtgctcactaccacgccggctaattttgtatttttagtagagacagagtttctccatgttggtcaggctgttctcaagctcccgacctcgggtgatctgcctgcctcggcctcccaaagtgttgggattacaggcgagagccaccgcacctggcctttgtgctgattctatagtcttattttcacatcctatcagttactgtaagtaactcttgattccaagaactgtataataggaaagggtagcttccaattatctactcttgcttgataatgcattaattccacatagcctttaaaagtttagtaaattttaggataaattttcgaactgttatttcctattggctgttagaaaattgtgttgctcaaaggggaacatgtctat

SEQ ID NO: 11538 - DNA, 164 bp, Homo sapiens
ctcctgagtagctgggattacaggcatccaccatcatgcctggctagtttttgtatttttgtagagacggggtttcaccatgttggccaggctggtcttgaactcctgaccttaggtgacccgcccgccttggcctcccaaagtgctgggattacaggcgtgag

SEQ ID NO: 11539 - DNA, 561 bp, Homo sapiens
taggcacacatgtgcatgcacacttccagcctcctcttcctgctggtgcttctcagtgatacctatgagaaggatcactttccttccttatttccttttgtgggataggatggatctaaaagggacacattaataagaaggcatagtgattaatgtattcagcaaaggttttttccagtcttctcttattaagaaacagactttttcccttgaaatgagatttcattggccttctttatgtaagcttattgtgccagcaattgtgcttgttgcagtaaaagaagattccctcttttgtgggggtgttaaaaatcccacctacatacatccacacaattttaccttagatacccagttcatagtgtgaacaccactgtcttaagtggagatttagtttaaaaaaaatctttttggctgggcacagtggctcatgcccataatcccaacactttgggaggctgaagtgggcagaattgcattagcccaggagtttgagatcagcctgggcaacatggcaaaaccccttttttacgccccccccccccaaaaaaaaaaaaaaaa

SEQ ID NO: 11540 - DNA, 558 bp, Homo sapiens
taggcacacatgtgcatgcacacttccagcctcctcttcctgctggtgcttctcagtgatacctatgagaaggatcactttccttccttatttccttttgtgggataggatggatctaaaagggacacattaataagaaggcatagtgattaatgtattcagcaaaggttttttccagtcttctcttattaagaaacagactttttcccttgaaatgagatttcattggccttctttatgtaagcttattgtgccagcaattgtgcttgttgcagtaaaagaagattccctcttttgtgggggtgctaaaaatcccacctacatacatccacacaattctaccttagatacccagttcatagtgtgaacaccactgtcctaagtggagatttagtttaaaaaaaatctttctggctgggcacagtggctcatgcccataatcccaacactttgggaggctgaagtgggaaaaattgcactatacaatatgtttgagatcagcctgggcaacatggcaaaaccccttctctacgcccccccccacaaaaaaaaaaaaaa

SEQ ID NO: 11541 - DNA, 1335 bp, Homo sapiens
taggaagtattttcatgacatgttttcagaagccagaaagcatttgttaaacgcagctttggttataaacctgcaccattgaaaatttgcacatagaatatagactcacttgtacatagaattatttcttcaagtataattcaaaataatatggacattatcatgttctgcattacaataatgggatgtcatcaccattgctagaatactggcatgattcttctgagcagaagttgaaactgtaaatttaaaccttttaattatcaccttacctgaaagaggttagttaagatattcacacagtatgtattatattaaccatatcacacttaagttattaaattcagactatttgtaacttattgttatagggcctgccgtatggcttaggatatttgagtaatcatatatttaaagtaaaaactttgggctgggcacagtggctcacacctgtaatcccagcacttggggaagctgaggtgggcagatcagttgaggtcaggagttctagaccagcctggtcaacatggcgaaaccccatctctactaaaaatacaaaaattagctgggcgtggtggcacacacctgtaatcccagttacttgggaggctgaggcacaagaatcgcttgaacccgggaggcggaggttgcagttagccaagatcgccctgctgcactccagcctgggcaacagagggagactctgtctccaaaaacaaaaacaaaaactgttagtgaaggttccctgggacttttgatattttaaaaattgttcttatgactagtagataaattcattgccataatgaggctagctcccagataaacagtgtattttcttcttttttttttttttttttggtgagtggtccagagctttaagctacttttccagtagtttgccactttctccgaggtagtttggctgctctttcagtaatgctaattgtgtgtcaaattttgtctacaacagtaggcaacagatgaagataagttggttgaatgtctccagcactatgcatccctattttctatttattgtgtacactcactttcagtaatgtgtttcaaactggtattttttaaaaaacaaatcaatgtaaggactgaagttgaagtagcaatgtaataaagttaatttgtttattttttgtacagttagtttggttattgaaatcttcctatattgtttaaatgtgtatttgcatagacatagtaaagtgttacagcatttcatgtcttaaaaatatctatgaagatatctaaaatatctatttctatgaagaaacagactttaacaaatataagcaaaattcagttttcttttaaccagtc

SEQ ID NO: 11542 - DNA, 184 bp, Homo sapiens
caaaaatgaaattatttcgtaatgaaagataaacattttaatatttagaggatatttggtccttaaaacacagttctcaaaccagttgtcttgaattctatatggaacaatgagagggtataaataaagttctgaaagggtatccaagggagagaatacagtcatgggttcttagtttctgttt

SEQ ID NO: 11543 - DNA, 1334 bp, Homo sapiens
taggaagtattttcatgacatgttttcagaagccagaaagcatttgttaaacgcagctttggttataaacctgcaccattgaaaatttgcacatagaatatagactcacttgtacatagaattatttcttcaagtataattcaaaataatatggacattatcatgttctgcattacaataatgggatgtcatcaccattgctagaatactggcatgattcttctgagcagaagttgaaactgtaaatttaaaccttttaattatcaccttacctgaaagaggttagttaagatattcacacagtatgtattatattaaccatatcacacttaagttattaaattcagactatttgtaacttattgttatagggcctgccgtatggcttaggatatttgagtaatcatatatttaaagtaaaaactttgggctgggcacagtggctcacacctgtaatcccagcacttggggaagctgaggtgggcagatcagttgaggtcaggagttctagaccagcctggtcaacatggcgaaaccccatctctactaaaaatacaaaaattagctgggcgtggtggcacacacctgtaatcccagttacttgggaggctgaggcacaagaatcgcttgaacccgggaggcggaggttgcagttagccaagatcgccctgctgcactccagcctgggcaacagagggagactctgtctccaaaaacaaaaacaaaaactgttagtgaaggttccctgggacttttgatattttaaaaattgttcttatgactagtagataaattcattgccataatgaggctagctcccagataaacagtgtattttcttctttttttttttttttttggtgagtggtccagagctttaagctacttttccagtagtttgccactttctccgaggtagtttggctgctctttcagtaatgctaattgtgtgtcaaattttgtctacaacagtaggcaacagatgaagataagttggttgaatgtctccagcactatgcatccctattttctatttattgtgtacactcactttcagtaatgtgtttcaaactggtattttttaaaaaacaaatcaatgtaaggactgaagttgaagtagcaatgtaataaagttaatttgtttattttttgtacagttagtttggttattgaaatcttcctatattgtttaaatgtgtatttgcatagacatagtaaagtgttacagcatttcatgtcttaaaaatatctatgaagatatctaaaatatctatttctatgaagaaacagactttaacaaatataagcaaaattcagttttcttttaaccagtc

SEQ ID NO: 11544 - DNA, 184 bp, Homo sapiens; identical to SEQ ID NO: 11542

SEQ ID NO: 11545 - DNA, 7852 bp, Homo sapiens
ctatcatggtaattctgatattgcagaggatagtgaagatgaaaaagaagatcataaaaatgtgcgccaacaacggcaggcggcatctaaagcagcttctaaacagagagagatgctcatggaagatgtgggcagtgaggaagaacaagaagaggaggatgaggcaccattccaggagagtatgtgaagttgttttgtgtactttggttgtttggtcataattgtagtttgtgaccttggttactttggcattttctaggatgctaaatgttacaaccagtcccttaaattgggtagatactccgtgttaaaagagatgactgtattggttcctgttaatatttttaaaggttcagagattctcacgattgcccaccatttgtaatggttgcaccctttatttaatgatgtctgtgttcaaacactgaatgaacaatttgcttaagtaacagtcacattaggcattgtgattgagatttgtattttgccctggtggaggaggttgtagacctcttttcacagaaaaaaacatgttaataataaaatttaggtgtttcacaggttattcagattagttaattctatgtatttttgttttgtgtttggttttcttgtttcacttattcataattggaccaaaaaggccctgtcagttcagttttgtttccctggtctcaaccagtactacttggaagtgatggaactaccaaaagttatttgatagtttcagtttttattcagattaactcttacccttcctgttttcaatctacttttcaaacacatcactcatgtaactctctcatgtaaggtgcatgcaaaatccatttgacaaatgaggccagtgatgactccagtcaaattggtagtacagctccaaatagaatccaagggtgtttgactcccaaatcccatcctctagtcattcttagcactctcttccttttttacttggaaggatgtgtacattaagttagatgttgaaattcttctttcttctcagaagattccggcagcgatgaagatttcctaatggaagatgatgacgatagtgactatggcagttcgaaaaagaaaaacaaaaagatggttaagaagtccaaacctgaaagaaaagaaaagaaaatgcccaaacccagactaaaggctacaggtaatttctgcagaagtgaaattaaatttactgctttaaaaattttgagaatcattattttcaatacagaaattcctcattaggatttggcattggcctgatgtttagcaggaatacaagaaatctaaaagggtcttgtattctgcaactggaagtatctcttattaataaagacactagcctgtttaagagtctagtgggcttagccatgttcttcaactactgccagtacttgagcaagatttcagaatgatctatttgtttcagacacagtggtagaaacactgtgtcatcatagttgttactgctcttttttcctcactggtatcacagtctcagcagccagcaaagacttaattgtgaaaatgcacaaacctagagtaatacgtttaagttccacgttctgaactctaccccatcctctgtgctatcagaataaaaccacacttgatgacatgagttgatttttttctgagccctaatggtttctcctcgttggagctagtttgttaactaaatcagaaatcaatttgctttttgtgtaggtggttttattctgttaggtagaactagtcattgttaaacttctgtttatcacttcctactgttaggaatgatggaactatcaaatgttatttgatggctttagtttctgatcagattaattcttttccttccgtctttttgacctgctttttataaacaacttttatcataaacaactgttagtttaccaagcaattaaggatgttgtgcatattctatagcatggtgcttcttcattacaggtattactgctaacatcatagagtgttggtaaaaactgatgggaaatactgtagcatagtgtagtaacttatgaccagtttagaaactgagatagatttacctagggatatatgtgctcccttgtgcccaccttggtttttagtaagttgcatattgtctttatagattttattcttacagattgttgtattttgtagctgacttttattaaagacatttttttctcttcccttccccaaattatttttctattttcagtgacgccaagtccagtgaaaggcaaagggaaagtgggtcgccccacagcttcaaaggcatcaaaggaaaagactccttctcccaaagaagaagatgaggaaccggaaagcccgccagaaaagaaaacatctacaagccccccacccgagaaatctggggatgaagggtctgaagatgaagccccttctggggaggattaaaagtgatgatggtctggggagagattttattaaaaaaaaaaagaaaaaagagggaggaaaaaaaagaacctacttaagatagaacatggttttggctatggcttgactcatgggctttcagtgcttttttccatttgttgaaagtaacatttctctctctctctctttttttttttttttttttaaagcaaaccattgtatgtgtaagtgtttaagttacctttttgtctattggtctctttgccagccctcccctttcccaatgaaagccatgtcaaattaatcactggattgactgcttcatctttttatttttaatgaaaggtgtaccacggttgtaaagcaataagatttgagatgaacactattgaaacttcgctttttgctaaaaaatagcaagttgaatagtaatcaaaaaacatagaaagattttagttcaaaatgattgctcctttctctacctggacttttaaaaaatcaattgtcatctaatatgagtttatttgtctatagacacaagtatcaatgtctaaaaaaaatcatgactttaaacttccaccgatgaggcaggtaggagataaagatgaattctgaactgttactaaaagtactcattttttaccttgtagggagggtgggcaatggggttacctgaccttatttgagggtatgggctttcttttttatttcatcacttgttatctcaaagagactcggagccagtgatccttttatcctgctacagtctttagggagctaaaaaaaaaaaaaaagcaggggctgccaaaactcttgatttcatatttccttctctaaatatatatgtatcctgttttttggataaaattttaccaagaatccaaaaaaaaaaaaaaccctagaatttaatcaacaagatcagtctacaggtcacagtggatttcttttcaaactgacaatgtttaggttttaagcaaataaagttccagttaatgtgaaactcagtcacaaagagttgagatttttcctttatgaaatagaattgacattcttttatgctataaatgtgcattcaggtcccattaaccatgctctgcttttatttggggatagaacattttctttttcatatcccgatcttcccatttcttcatagaaatgtgataagaagtacatccctgtgatcctgctgcttcgtagagcaccactgcacaccctaccccgagtgccaaccacctctgctataggacactattttcctggccctattcttcacttacttcccatcctgtccttgactaggaatatgttaaatgctgctcccatacaattcagttagctcttgtctttttatttggtccaacccctgctttactgctcatgctgcttaaagcaggagggactagagaaacaaggcattttaggaggcctgtgtgcagttgaaaaccgacttttacacgccttataaaagcagtcaggagatagatccgtaggtttgatccttcacatctaataccaggcgctaatgggaacaaggtttaaagggtcctggtatgctaataaattgaaaaattagtgaaatttaaacttctgcctttttttcctgccttttaatctagatttgcttcctcaatatcctactttgtggtttactaggaacatgcttactctgatctttttttaaaaaacacacagtggcagagtcatttcactattgcactgtgtgttaaagaatgaataaggagttttcagttacatggccaaaaatacaggacttgaacataaatagcagttggatcattctctttcatgacggttaaattcagaggtgtgaactttgtaatgagggtgttaaagattaatctatttgcctaaatgggtttgttcaggtatccatttttaacaaagaagtttgtgttcatatagtaaaagacctatcagtgtttccaccatgcacttctattttttaggagtttataattttaagtcttacattcctagtaacatttgggcttttcttaggttatgtttcgtgaagatttggggggagggctcttttaaaacttcagcctcagttgtttaacagtctctttaatatattaatctgcactaacatctctgtgatatatgcacatattttagaggtaatcatgtcttctagattacttgtgtgcatttgattgggcttcttgtttagggtcccttttaaaattaattcattagattgaaaaatgtattctatatttctgatagactggacagaaggatctgtgtccccaagtgagacaggctctgaataacctttgttttctccactttttattgatgatttaaaacactctagtcttcccctcaaatcatgcatgcaaataggaggacagtggtggtgactcaactggatacaggtgctcaatagtcaggcttgatagtgatgtcaggacgcattacaagctgtaagccgatactgactggccattggcaccatccttgactaaccttcctctttttctctagtgtgcctatggtgaaatggcaatagcattcactgtcgtattttgcagtgctcaggaagtgggacgttaactttgaaggtgcttgtttgtattagctctgctaggtttacctctacaacgtagatttcagcagctatgctgactgacactacattctagttcttaagattttttttccagatccccccttccccagctagacatacgtagcatactttcatcttattcagtctttctgtaacctgctgctgcttttagtcctcctcacctcagatcggaatcaatggagtgggcccagaggatacattttaattccagtaatggtaggtagatttgtcctgctttctaaaacatctcctcatttcatatttccactccatattgattccataagggaaaattaatgggtgtttcctcctttagggaggtaatgcaaagagtgtggacatcttctaatcttgaggaacagtagttgatttcccttgaaggagcttacatattgactgttttcacaataacctgtttgccccagttcaatcctcattttaatacttaatttggtactggctcaaatagcattttcttacagataacaaatcaagagtgaaatttgaggttatactccagtaaagtttttaacacttgtgaatatggtcagctagactaaacttgactcttttttttaatggcttttttatctgtgaacattcagataagtggattttcaagtactggttggggatgggaatcgtgcttttctttaaacttcagtttacgagatgctttgagagcgttaggcaaaagcagaaataaatatcaggagcaacggggaaagctttataaaagatcatggtggccactgttgcagctttgaagaatgagtgctggcttgaacagttctttgcctgcatcattggtagctgcactgaaaggaaaaaactttcaccttaagaatttgaaaaggaagaaacctgggctctggtcttcatggcatttagactgagatgcttaaacagaacagaagtaatacgcatttcctgccataggatagggaaaatgtaacaagctggttgctcttgaggttagaaaattgtctgtttctctgtggatgaagctggatttacttgaaaatggagagttggcttattgtttgaatattgggacatcaagctatctatagccaagtttcagtcgcaaccagttttccctttgtctggggtaaattcgatacaaaatgattctttttgaatcctgaatccataaattacacttttttttttcaaattcacaaaattcacagtggtgctgactgtgtaataaccactattgggaaacatcccgtaaacctgcctgttgccatgccaatggagtgactgaactggtgacatctgtttgagcatgctttgtgtggctggtagaatgccaccgttgtgcatacactttgtacatcaggggtgaagggagggttttctagattattgggggagggtaaaattgggatttttttgttgttccttttttgatggggtgtgggggtatagtactcagcttatgccctaaaataacatgtataaaaacccctgaagtattgtgtgggtgtgtacgtgtgagtgtgtgtttgtatacgtctggcaattaaagctttgtcttctggaacttagtgaattcttttctctttttcctccagaagtatttgttacaagatttgtaaataagagctctacttagtttgtttaccatgaacatgttgcagcaaaccttatgcatctaattcctacaaggttaaagaaaggcttttagacttgccaggttaagcaacagccaagttctcagtaattgtttgccttgatttatcttttagacttcattttgccagctctaaaactcccagtcttccttgattttagtccttaatcttttatgttctgagcaggaagggtaaaagacaggaacctgcttcactgtattaactagtccatgggctgagaccggggcatctcttttcttcatactgcaatgttgctagatacatgatcagacaccagagggttgggcattcttgcaataccttaacagtgctgaaatctgcagcatggtactaaggaagttaaagtttgaatgtaaccactttatttaaaaggtttttttctttaatttaaatgaaatggggttgaagtgaacatgattttgttgaccatgttcgtgaattacagatgcaacatgcattggtagaatcgtgtgatggtcttttgtgatacttaatttttacatatcccagtctctgtatgtatctgcatagacaaagaaaaaacaaactcctgctttgcttttattgaagggtttccaggactgcgtgtctgctcctgagctctgttttaagtatgtgtatcctttgcttgtattttgtattaaaaaaataagaaaaagaagcctttattgttgagcatgttggcattgtcccctttatttttttctctttttgggacatatgaagcaagttattctttttctgtatctttttttcttttgtaaactttttttttgttttgtttaaaaatggctttataaaagggcttttataacccagatgtgtgctctgtgtacttcttgtaataccttaaagcaaacacactaacttacacagctttgttaatcagctcccagttcagcctgactttgtgggaacttatttccctaataaattatttagaaactttaacagtgaccatccctgttgttggtaaaagataaacatgtcttggttcaaaagttaatacctcaggatggaatcaagaagcagtagacttaccagtttgattaattaagggagcactggactgggtgcgtaaggattcttaattagcattttttctcatgtttacatccaaggttatgaagtgttgtggaaagcaaagtttaacaatcatatataataaaagataatgtttatactcacagaa

SEQ ID NO: 11546 - DNA, 10562 bp, Homo sapiens
atagtgaggactcagaagacaaagatgtgaagaccaagaaggatgattctcactcagcaggtagtaaactattttaaatgtaagaggtataattatatttgtatattattttattagatgttttaataagtgatttctatgccaggcactgttgcaaatctgggattacaaagacgtttccatcttcaaagagctcctaatgattgtcagtcctggtggcttattacagtcatctatgaatcttttttaaaatgcatattctgggtcctgtcccaaaatttctgattaaatagatctaagtgggatgttggggcttggttttctttaagtatctatacattattcttatgcacagtcaatattggaaatcatttacgtaaacaaaagacatcaaactaaatagaataatatataaatataaaacttggtaaaataggggcataaaaagggggagtggtggactctgggtggaaaagcaaatgaaagtttcattcccactctttttagtggagacatagccttttgtaacagtagccatagagaaagttttttttgtaaaaattttaacttaaattaatatgaattaatggggagtctccatggccaaataaaatgttcagtcctgatgattctacttgttgttggtatttatttttaaatttaatcttctaagaattgagatttttaatccatattacttccagccactttagttttgacctacattcccttgctgttgtctccctggatctccctttaaatgagactgctgtttagctaatacaaaggggagagacaaagttctgctaaattcactctgcttagctgttttgctttccctcctattcaagtatactatctggctacctaagttgaaaagaaactgtattaatcttttgcactatctggtgatcctgtgataatagagtatatgctttcagtcatttgccttgtaaatcctagtttgaatctcttacacttgctagtttattgagcacttctagataaataactctgtactagtattaagctaagcttctaccaagtgggtttagttttgggtcggccatgtcagctttattctgtttgtctctagatgagatttttaaaagtgaaagagatgacttgaacactgactatggcaaggctcatgggactagaagtgttttcagaaaagggctgtaggtagagactaaggcaaatatggtttagtctagaggcagtaggctggcagcctaccctttaaccaaatttattcacaaacacaactgtgtgttaaaaaaattttttttaggctgagcatggtggctcccacccgccatcccagcactttgggaggccaaggtgggtggatcacctgaggtcaagggttcaagaccagcctggccaacatggcaaaaccctgtctctatcaaaaatacaaaaatttggctgagcccggtggctcatgcctgtaatcccagcactttgggaggccaaggcaggtggatcacctgaggtcaggagttcgagaccagcctggccaacatggcaaaactccttctctactaaaaataaaaaaattagccgggtgtggtggtgggtgcctgtaatcccagctactcgggaggccgaggcaggagaatcacttgaacctgggaggcagaggttgcagtgagctgagatcccactgttgtactccagcctaagcaagaagagcaaaactccatctcaaaaaacaaacaagcaaacaacaacaagaaattagccgggcatggctgcatgtgcctggagtcctagctactcgggaggatgagacaggagaatagcttgaacccaggaggcacaggctgcaatgagccaagattgcaccactgcactccaatctgggcgacagagtgagactccaaattaaaaaaaaaaaaatttttttttcattaatagactctaagaatatgtgaaagtaaattttttataggcttctccaaatgtctttcactaattaatctaaatatgtattttaaagattttccagctgggcgcagtggctcacgcctgtaattccagcactttgggaggccaaggagggtggatcacctgaggtcgggagttcgagaccagcctgaccaacatggtgaaaccctgtctctactaaaaatacaaaattagccaggagtggtggtgcgcacctgtaatcccagctactcgggagggtgaggcaggagaatcgcttgaacctgggaggtgaggttgcagtgaggcgagattgcgctatattgcactccagcctgggcaacaagagcaaaactccatctcaaaaaaaaaaaaaaggttttccacaatcccctctaaattgaaatggtcacaagccattcattgtaaagggtaacagtttgacattattttagggttttcgtgttttatgtcttagaataaagattattggaagacattctttctctctcatactatgttaagatatttttctaactttagctttcaaaaacagtgaacatagatttgaatgtaattgagaattgtagagcaaagcaatgatgtaactttaaagtataggagtcatgtattcacgctttaattcagcttgtctactgcttaaaattacattcccttgttactttatatgtaatagtggttacatagtcttgtccaagttcattctttgtgaatttaggtcccctttatacattttgtagaattttttttttttttatgttgtgggatacatgtgcaggatgtgcaggtttgttacatacgtaaatgtgtgccatggtgatttgctgcacccatcaacccatcacctaggtattaagcccagcatgcattagctaatttttaatgctctccctctccatccccccaccctgccccctccctcgccacaggccccagtgtgtgttgttcccctccctgtgtccatgtgttctcattgttcagctcccacttataagcgagaacatggcagtgtttggtcttttgtgcctgcattagtttgctgaggataatggcctccagctccatccatgtccctgcaaagagcatgatctccttccctttttatggctgcatagtattccatggtgtgtatgtaccacattttctttatccagtctatcattgatgggcatttgagttgattccatcattttgcagaaatgttgaaggatagaatttgcccttttacaatgaaataaagctgcagattatatcctatattggccactgtgttggccttttcagtcagttatgttttcagtcaattattaatcttttgcactatcttgtcaaatataaaattctttaatcattatatcatggtaattctgatattgcagaggatagtgaagatgaaaaagaagatcataaaaatgtgcgccaacaacggcaggcggcatctaaagcagcttctaaacagagagagatgctcatggaagatgtgggcagtgaggaagaacaagaagaggaggatgaggcaccattccaggagagtatgtgaagttgttttgtgtactttggttgtttggtcataattgtagtttgtgaccttggttactttggcattttctaggatgctaaatgttacaaccagtcccttaaattgggtagatactccgtgttaaaagagatgactgtattggttcctgttaatatttttaaaggttcagagattctcacgattgcccaccatttgtaatggttgcaccctttatttaatgatgtctgtgttcaaacactgaatgaacaatttgcttaagtaacagtcacattaggcattgtgattgagatttgtattttgccctggtggaggaggttgtagacctcttttcacagaaaaaaacatgttaataataaaatttaggtgtttcacaggttattcagattagttaatcctatgtatttttgttttgtgtttggttttcttgtttcacttattcataattggaccaaaaaggccctgtcagttcagttttgtttccctggtctcaaccagtactacttggaagtgatggaactaccaaaagttatttgatagtttcagtttttattcagattaactcttacccttcctgttttcaatctacttttcaaacacatcactcatgtaactctctcatgtaaggtgcatgcaaaatccatttgacaaatgaggccagtgatgactccagtcaaattggtagtacagctccaaatagaatccaagggtgtttgactcccaaatcccatcctctagtcattcttagcactctcttccttttttacttggaaggatgtgtacattaagttagatgttgaaattcttctttcttctcagaagattccggcagcgatgaagatttcctaatggaagatgatgacgatagtgactatggcagttcgaaaaagaaaaacaaaaagatggttaagaagtccaaacctgaaagaaaagaaaagaaaatgcccaaacccagactaaaggctacaggtaatttctgcagaagtgaaattaaatttactgctttaaaaattttgagaatcattattttcaatacagaaattcctcattaggatttggcattggcctgatgtttagcaggaatacaagaaatctaaaagggtcttgtattctgcaactggaagtatctcttattaataaagacactagcctgtttaagagtctagtgggcttagccatgttcttcaactactgccagtacttgagcaagatttcagaatgatctatttgtttcagacacagtggtagaaacactgtgtcatcatagttgttactgctcttttttcctcactggtatcacagtctcagcagccagcaaagacttaattgtgaaaatgcacaaacctagagtaatacgtttaagttccacgttctgaactctaccccatcctctgtgctatcagaataaaaccacacttgatgacatgagttgatttttttctgagccctaatggtttctcctcgttggagctagtttgttaactaaatcagaaatcaatttgctttttgtgtaggtggttttattctgttaggtagaactagtcattgttaaacttctgtttatcacttcctactgttaggaatgatggaactatcaaatgttatttgatggctttagtttctgatcagattaattcttttccttccgtctttttgacctgctttttataaacaacttttatcataaacaactgttagtttaccaagcaattaaggatgttgtgcatattctatagcatggtgcttcttctttacaggtattactgctaacatcatagagtgttggtaaaaactgatgggaaatactgtagcatagtgtagtaacttatgaccagtttagaaactgagatagatttacctagggatatatgtgctcccttgtgcccaccttggtttttagtaagttgcatattgtctttatagattttattcttacagattgttgtattttgtagctgacttttattaaagacatttttttctcttcccttccccaaattatttttctattttcagtgacgccaagtccagtgaaaggcaaagggaaagtgggtcgccccacagcttcaaaggcatcaaaggaaaagactccttctcccaaagaagaagatgaggaaccggaaagcccgccagaaaagaaaacatctacaagccccccacccgagaaatctggggatgaagggtctgaagatgaagccccttctggggaggattaaaagtgatgatggtctggggagagattttattaaaaaaaaaaagaaaaaaaaagaaaaaagagggaggaaaaaaaagaacctacttaagatagaacatggttttggctatggcttgactcatgggctttcagtgcttttttccatttgttgaaagtaacatttctctctctctctctttttttttttttttttttaaagcaaaccattgtatgtgtaagtgtttaagttacctttttgtctattggtctctttgccagccctcccctttcccaatgaaagccatgtcaaattaatcactggattgactgcttcatctttttatttttaatgaaaggtgtaccacggttgtaaagcaataagatttgagatgaacactattgaaacttcgctttttgctaaaaaatagcaagttgaatagtaatcaaaaaacatagaaagattttagttcaaaatgattgctcctttctctacctggacttttaaaaaatcaattgtcatctaatatgagtttatttgtctatagacacaagtatcaatgtctaaaaaaaatcatgactttaaacttccaccgatgaggcaggtaggagataaagatgaattctgaactgttactaaaagtactcattttttaccttgtagggagggtgggcaatggggttacctgaccttatttgagggtatgggctttcttttttatttcatcacttgttatctcaaagagactcggagccagtgatccttttatcctgctacagtctttagggagctaaaaaaaaaaaaaaagcaggggctgccaaaactcttgatttcatatttccttctctaaatatatatgtatcctgttttttggataaaattttaccaagaatccaaaaaaaaaaaaaccctagaatttaatcaacaagatcagtctacaggtcacagtggatttcttttcaaactgacaatgtttaggttttaagcaaataaagttccagttaatgtgaaactcagtcacaaagagttgagatttttcctttatgaaatagaattgacattcttttatgctataaatgtgcattcaggtcccattaaccatgctctgcttttatttggggatagaacattttctttttcatatcccgatcttcccatttcttcatagaaatgtgataagaagtacatccctgtgatcctgctgcttcgtagagcaccactgcacaccctaccccgagtgccaaccacctctgctataggacactattttcctggccctattcttcacttacttcccatcctgtccttgactaggaatatgttaaatgctgctcccatacaattcagttagctcttgtctttttatttggtccaacccctgctttactgctcatgctgcttaaagcaggagggactagagaaacaaggcattttaggaggcctgtgtgcagttgaaaaccgacttttacacgccttataaaagcagtcaggagatagatccgtaggtttgatccttcacatctaataccaggcgctaatgggaacaaggtttaaagggtcctggtatgctaataaattgaaaaattagtgaaatttaaacttctgcctttttttcctgccttttaatctagatttgcttcctcaatatcctactttgtggtttactaggaacatgcttactctgatctttttttaaaaaacacacagtggcagagtcatttcactattgcactgtgtgttaaagaatgaataaggagttttcagttacatggccaaaaatacaggacttgaacataaatagcagttggatcattctctttcatgacggttaaattcagaggtgtgaactttgtaatgagggtgttaaagattaatctatttgcctaaatgggtttgttcaggtatccatttttaacaaagaagtttgtgttcatatagtaaaagacctatcagtgtttccaccatgcacttctattttttaggagtttataattttaagtcttacattcctagtaacatttgggcttttcttaggttatgtttcgtgaagatttggggggagggctcttttaaaacttcagcctcagttgtttaacagtctctttaatatattaatctgcactaacatctctgtgatatatgcacatattttagaggtaatcatgtcttctagattacttgtgtgcatttgattgggcttcttgtttagggtcccttttaaaattaattcattagattgaaaaatgtattctatatttctgatagactggacagaaggatctgtgtccccaagtgagacaggctctgaataacctttgttttctccactttttattgatgatttaaaacactctagtcttcccctcaaatcatgcatgcaaataggaggacagtggtggtgactcaactggatacaggtgctcaatagtcaggcttgatagtgatgtcaggacgcattacaagctgtaagccgatactgactggccattggcaccatccttgactaaccttcctctttttctctagtgtgcctatggtgaaatggcaatagcattcactgtcgtattttgcagtgctcaggaagtgggacgttaactttgaaggtgcttgtttgtattagctctgctaggtttacctctacaacgtagatttcagcagctatgctgactgacactacattctagttcttaagattttttttccagatccccccttccccagctagacatacgtagcatactttcatcttattcagtctttctgtaacctgctgctgcttttagtcctcctcacctcagatcggaatcaatggagtgggcccagaggatacattttaattccagtaatggtaggtagatttgtcctgctttctaaaacatctcctcatttcatatttccactccatattgattccataagggaaaattaatgggtgtttcctcctttagggaggtaatgcaaagagtgtggacatcttctaatcttgaggaacagtagttgatttcccttgaaggagcttacatattgactgttttcacaataacctgtttgccccagttcaatcctcattttaatacttaatttggtactggctcaaatagcattttcttacagataacaaatcaagagtgaaatttgaggttatactccagtaaagtttttaacacttgtgaatatggtcagctagactaaacttgactcttttttttaatggcttttttatctgtgaacattcagataagtggattttcaagtactggttggggatgggaatcgtgcttttctttaaacttcagtttacgagatgctttgagagcgttaggcaaaagcagaaataaatatcaggagcaacggggaaagctttataaaagatcatggtggccactgttgcagctttgaagaatgagtgctggcttgaacagttctttgcctgcatcattggtagctgcactgaaaggaaaaaactttcaccttaagaatttgaaaaggaagaaacctgggctctggtcttcatggcatttagactgagatgcttaaacagaacagaagtaatacgcatttcctgccataggatagggaaaatgtaacaagctggttgctcttgaggttagaaaattgtctgtttctctgtggatgaagctggatttacttgaaaatggagagttggcttattgtttgaatattgggacatcaagctatctatagccaagtttcagtcgcaaccagttttccctttgtctggggtaaattcgatacaaaatgattctttttgaatcctgaatccataaattacacttttttttttcaaattcacaaaattcacagtggtgctgactgtgtaataaccactattgggaaacatcccgtaaacctgcctgttgccatgccaatggagtgactgaactggtgacatctgtttgagcatgctttgtgtggctggtagaatgccaccgttgtgcatacactttgtacatcaggggtgaagggagggttttctagattattgggggagggtaaaattgggattttttggctatgcctatacatacagagactgggatatgtgaaaattaagtatcacaaaagaccatcacacgattctaccaatgcatgttgcatctgtaattcacgaacatggtcaacaaaatcatgttcacttcaaccccatttcatttaaattaaagaaaaaaaccttttaaataaagtggttacattcaaactttaacttccttagtaccatgctgcagatttcagcactgttaaggtattgcaagaatgcccaaccctctggtgtctgatcatgtatctagcaacattgcagtatgaagaaaagagatgccccggtctcagcccatggactagttaatacagtgaagcaggttcctgtcttttacccttcctgctcagaacataaaagattaaggactaaaatcaaggaagactgggagttttagagctggcaaaatgaagtctaaaagataaatcaaggcaaacaattactgagaacttggctgttgcttaacctggcaagtctaaaagcctttctttaaccttgtaggaattagatgcataaggtttgctgcaacatgttcatggtaaacaaactaagtagagctcttatttacaaatcttgtaacaaatacttctggaggaaaaagagaaaagaattcaataagtcccccaaaacaaagctttaattgccagatgaatacaaacacacactcacacgtacacacccacacaatacttcaggggtttttatacatgttattttagggcataagctgagtactatacccccacaccccatcaaaaaaggaacaacaaaaaaatgacaattttaccctcccccaataatatagaaaaccctcccttcaccc

SEQ ID NO: 11547 - DNA, 608 bp, Homo sapiens
ctgaactacaattcctttttttggggggggtggggatggagtcttgctctgccacccaagctggagtgcagcggtgcaatcctagctcactgcaacctctgcctcctgggttcaagtgattctcctctctcagcctcccgagtagctgagattacaaccatgcaccaccacgcctggctaatatttgtatttttagtagagacagggtttcaccatgttagccaggctggtcttgaactcctggcctccagcaatctgcctacctcagccacccaaactgctgagattacaggcgtgagccaccacgcccggactacagttccttttaataattttagatattttagcagtttttcttgtgtatatttagtgatctttatttgccatcaacactatgtatttttagtatttttatactctgcctctgttcgagaatatttttcttattaaatattcttgtgaaccaagctttatccataggtgaaaaaattccagcctgtgttgagacagcttctttttttcctttgagtctttggaagcagtgttttgtaacgtaaataaaattgtgcttattcaccagcatccctgtaaataaggaaataaagtac

SEQ ID NO: 11548 - DNA, 3367 bp, Homo sapiens
ggtgagttatgcatatctgaaaatgaaagaaggcttgtttctaaagaggcttggagcaaactgcagcagtactttccaaaggctcctgagtttccaagttacaaagagtgctgttcacagtgcaaggtactgaacgctactgacatctggggaaatggcatgccacctccctgggttgacttcccaggggaattaacactgtacttctgacgggggtgtagggaggaggcaggtcatgtgctgtcagcaggagacagttgattgcttcattctctttcagattttagaaagagaaggggaagaaaatgaagccttacataagatgattgcaaacgagcaaaagacttctctcccaaatttgttccaggataaaaacagaccgtgtctcagtaactggccagaggtataatgattcccacaaaagaaagaatgcatcttttctttttaaagcccttgccaaattcccagtgagctatttcagaacaacccagaacttctcatattctcatttgtttagttatctaaccaggggatttactccagcctgctattttttggtagaggactgtgttttcattttatttataaaacttgaataaggacaaccaaagtatattataaggaatttgtgttaagcaggcggtgaattgacggatactgttttgtgatttttgtgttctaggatacggatgtcctctacatcgtgtctcagttctttgtagaagagtggcggaaatttgttaggtagaaacaaaatatgttttatttcctttattgttactgatttggttgcctctggtattttttaagatatcgtggattctgtttgttgtacccttccttcatggttactttcaccagcatacactgaaagctttcttttctattaaattaaatgaataagcctaagaaacacattgaattactaatattttcttaaatatatctctgattttgaaataattattttaaaatcttctctttcgtcatgcagtaattaggtatatttctcctccttgtctcatttgagtagaaagcctacaagatgcagccctgtgtcatcagttgggaacagtgctcttttgtgtccccacgggggcctcatgtttacatttgcttccatgaccaaagaagattctaaactgtgagttccttctcttcatgtgatttttttttcttcttttctctttttgatgattaataaaatatgtttaggaaatttctcatctgacatagtctgttttaagaatttagtcctttgctgaattgtggggtttttttttccccttttaaaagagaagaagactgcttctccaggaaagacaagaggctgcccgaggctatttgtctttttgctctttccttgtccctcttgaagacaacacagccaccctttctcttcccccgctgctggtgaccagtgctgagacctcttttccagaatcacagaatcaacatggtcttggttataggttttgttctgccatggccaggcttcagacaattaaaggaggaggctagcagggtggcagagcaaagccactgcactggtcatctggaattctagggtcttagaacccaaattttattccatgcttcaagtacttccagaggtgttcatctgtgaatttctcccgattttaccaaaaatcgtgatatacgagaaggtagaatgcttccaacattgtcagaaaatcaggaaaaggaaattggaacacataaataaaaatgcccttggggttaagctagagttttattattcatatttcagtactttaacatcatttaagggagttcaaagtttatatattctctacattttctccctcctctttctctccctccctctctgcatcccgccttccctgttgctctctcactctcgctgtgcatctctcttctctttcctccctccctttcttcctgtcgttgttattgcaaatgtcagacttccaggaaaatacaccagtaagcaaatgtgtgttaccattcagtttaaaagttaaatggttcaaatatgattaaaggccccacagtgcttatccttctgttgctacttctctttctcccacccttcctctcacactaaccactgtactgaatttagagtttatctgtctcagaaagtattctgtaaaaaaaaaaaatgcacgcacataatgtcttgcatatttaaaactttttatataaatggcaccatactgtatttatacttctgcaactaacttattttactcaattatgtttttgagatctaaccatgttgattcatgtaatttcagtccatttagtttcgctgctgtggtaacattcctttgtatgaaaaactattctttgttgatgatacgtatcttttctctctaattcctttggattaaatgttagtgttaatggttttggtttagcagactaatggattatgttaattctcttaatttccatgtgtcttaaggcatgttgtgttttttttttgcacagtatagctctcatatggcccagtgagtggcaaatgatacaaaagctctttgttgtggatcatgtaattaaaatcacgagaattgaagtgggagatgtaaacccttcagaaacacagtatatttctgagcccagtaagttttcatattgctttcggtttctatagttaagagctgacattttaagaagaaagggtgtgtcagtgttgtctgcttaaagttaaagatcatgcggcggtcccaactccctaggtggaaactctcattataatcatcccattatttgtacgtttatttatggacagtaaatggatttccttatcatttgcatgtaatagaatatagtggttaatagaaaatattattaagagtttgggccagcacactagctcatacctataatcctaatactttgagagactagggtggaaggattgcttaaggccaggagtttcagaccagcctgagcaacataacaagaccttctctctacaaaataataaaaatgtagcacatatctgtagtcttgagctactcgctgagaggctgagtcaggagcatggcttgagcccagaagcttgaggctacagtgagctatgttcataccactgtaccccagcctgggtgacacagcaaaaccttgtctcaaaaaaagaaaatgttactaagagtttaatgaatattcactagtaactttgacgtatgtttttagatctttgattctttaacaatgattcctcagccacttctgttttcccttttttttttcccccaaagaactctgtccagaatgcagagaaggcttattgtgtcagcagcagagggacctgcgtgaatacactcaagccaccatctatgtccataaagttgtggataataaaaaggtactggtc

SEQ ID NO: 11549 - DNA, 5347 bp, Homo sapiens
ggtgagttatgcatatctgaaaatgaaagaaggcttgtttctaaagaggcttggagcaaactgcagcagtactttccaaaggctcctgagtttccaagttacaaagagtgctgttcacagtgcaaggtactgaacgctactgacatctggggaaatggcatgccacctccctgggttgacttcccaggggaattaacactgtacttctgacgggggtgtagggaggaggcaggtcatgtgctgtcagcaggagacagttgattgcttcattctctttcagattttagaaagagaaggggaagaaaatgaagccttacataagatgattgcaaacgagcaaaagacttctctcccaaatttgttccaggataaaaacagaccgtgtctcagtaactggccagaggtataatgattcccacaaaagaaagaatgcatcttttctttttaaagcccttgccaaattcccagtgagctatttcagaacaacccagaacttctcatattctcatttgtttagttatctaaccaggggatttactccagcctgctattttttggtagaggactgtgttttcattttatttataaaacttgaataaggacaaccaaagtatattataaggaatttgtgttaagcaggcggtgaattgacggatactgttttgtgatttttgtgttctaggatacggatgtcctctacatcgtgtctcagttctttgtagaagagtggcggaaatttgttaggtagaaacaaaatatgttttatttcctttattgttactgatttggttgactctggtattttttaagatatcgtggattctgtttgttgtacccttccttcatggttactttcaccagcatacactgaaagctttcttttctattaattaaatgaataagcctaagaaacacattgaattactaatattttcttaaatatatctctgattttgaaataattattttaaaatcttctctttcgtcatgcagtaattaggtatatttctcctccttgtctcatttgagtagaaagcctacaagatgcagccctgtgtcatcagttgggaacagtgctcttttgtgtccccacgggggcctcatgtttacatttgcttccatgaccaaagaagattctaaactgtgagttccttctcttcatgtgatttttttttcttcttttctctttttgatgattaataaaatatgtttaggaaatttctcatctgacatagtctgttttaagaatttagtcctttgctgaattgtggggtttttttttccccttttaaaagagaagaagactgcttctccaggaaagacaagaggctgcccgaggctatttgtctttttgctctttccttgtccctcttgaagacaacacagccaccctttctcttcccccgctgctggtgaccagtgctgagacctcttttccagaatcacagaatcaacatggtcttggttataggttttgttctgccatggccaggcttcagacaattaaaggaggaggctagcagggtggcagagcaaagccactgcactggtcatctggaattctagggtcttagaacccaaattttattccatgcttcaagtacttccagaggtgttcatctgtgaatttctcccgattttaccaaaaatcgtgatatacgagaaggtagaatgcttccaacattgtcagaaaatcaggaaaaggaaattggaacacataaataaaaatgcccttggggttaagctagagttttattattcatatttcagtactttaacatcatttaagggagttcaaagtttatatattctctacattttctccctcctctttctctccctccctctctgcatcccgccttccctgttgctctctcactctcgctgtgcatctctcttctctttcctccctccctttcttcctgtcgttgttattgcaaatgtcagacttccaggaaaatacaccagtaagcaaatgtgtgttaccattcagtttaaaagttaaatggttcaaatatgattaaaggccccacagtgcttatccttctgttgctacttctctttctcccacccttcctctcacactaaccactgtactgaatttagagtttatctgtctcagaaagtattctgtaaaaaaaaaaaatgcacgcacataatgtcttgcatatttaaaactttttatataaatggcaccatactgtatttatacttctgcaactaacttattttactcaattatgtttttgagatctaaccatgttgattcatgtaatttcagtccatttagtttcgctgctgtggtaacattcctttgtatgaaaaactattctttgttgatgatacgtatcttttctctctaattcctttggattaaatgttagtgttaatggttttggtttagcagactaatggattatgttaattctcttaatttccatgtgtcttaaggcatgttgtgttttttttttgcacagtatagctctcatatggcccagtgagtggcaaatgatacaaaagctctttgttgtggatcatgtaattaaaatcacgagaattgaagtgggagatgtaaacccttcagaaacacagtatatttctgagcccagtaagttttcatattgctttcggtttctatagttaagagctgacattttaagaagaaagggtgtgtcagtgttgtctgcttaaagttaaagatcatgcggcggtcccaactccctaggtggaaactctcattataatcatcccattatttgtacgtttatttatggacagtaaatggatttccttatcatttgcatgtaatagaatatagtggttaatagaaaatattattaagagtttgggccagcacactagctcatacctataatcctaatactttgagagactagggtggaaggattgcttaaggccaggagtttcagaccagcctgagcaacataacaagaccttctctctacaaaataataaaaatgtagcacatatctgtagtcttgagctactcgctgagaggctgagtcaggagcatggcttgagcccagaagcttgaggctacagtgagctatgttcataccactgtaccccagcctgggtgacacagcaaaaccttgtctcaaaaaaagaaaatgttactaagagtttaatgaatattcactagtaactttgacatatgtttttagatctttgattctttaacaatgattcctcagccacttctgttttccctttttttttttcccccaaagaactctgtccagaatgcagagaaggcttattgtgtcagcagcagagggacctgcgtgaatacactcaagccaccatctatgtccataaagttgtggataataaaaaggtactggtccctcttgtggcaatgactagtaatgatcaagcgtgctctttggcttgatttgctgttgtatttgcactgagggtctgcctaggactgcatttttgttccttcagagctgtttggcatcagaattgaaattggacaataattgaaaatgaacagttatgtgattatatgagaatttagtttgttattaattgatgcatagatatttactgaatgtcagctgtgttccaggaatggtccaggtgctggggatacagtgataaagaaggcaggtataataccttctctcaaaattataggcacctagtgaggaagatcaggaataaagtataaattcatatgatttcacacagaaatgattgttttgaaggaactttagcagggtcaagtggaggttagtgtgagacagggagtagacaggagaggcgtcttggagaagttgtttttacccaagccctcactgtcagggatgcagcctgggaagtgttttccagacaaaggaaacaaaggtcaaaaggataagcctaatgtgcttatgcaacagagtgaaaaccattgcacctagaacagtgctgtccaatagagcttcctgtggtgatagacaggttctaggttctgtatctgtgctgcgcactgcagtagtcactggccatgtgtggctgtggagcattcgatgtggctagcgtgactgaggaatttagttttagttgatttaaaattaaatagctacatgtggctaatggctaccctagtggctattgctggtctagaatgaaatttattccaagaagggatcatgatatggaatgaacgaccatacactatcaggttttatacatcataccaaggatttgggtttattcccagtgtagatataagcccctggagagtttcaagcaaggtcatgatatgatctgatttatagtttaaaaaaaatcaccctggctatagtgtttggaattgctgtgagggcataacagaaataagagaggtcagttagagcctcttccattgacctgcaaggataggtgaaattgattggatatgtttgggaagtggaggtgttaatacttgcttggattggatttccaagcatttttattatattagggatggctcttgggtagatcctgacccatatctctagatatcttattaatttatttaattccatgctttctgggattaaagacaaaatggaatacattttatttgatgcttgtttccaaacacattttttagaagggtaacttataattatgccctggaggccaagggttctgctttacaagctaaataaactaaggccttcatttcctaatttgccgagaaaatgaagttaatgagtataaatgtctctgtttctccctgtaaaattttcttaaatcttttgttctctggtataaaatattatccaatttagatgtagtttcattattcagtttaataagagtatttcatagtgtttgcaagagagcgcttcttccatctttcgttttctcaattcttaaagagcatgtaactcctgccacttgaatagtttgagaacttgaaaaggcttggcaatcagtgtgctcgggaaggtgtcaagcaccttcgaacttctgcaaaataacatcattgtacaagactgataataataactgctctgcagagacctcttaaatgtatggtgagcacattaaatactacaagaataagtcatagggtaaaaaactaacatgttaaaagagcatagaaaaccgtgaaggcttgattcttgatccactctccagtctataatcccaccatgataaaggtgttcctcgtcttgataaaggttgccggtcccagcccccacatcctccatagcctgccttcctagggtctgacctacttctctttgttgtcctggcacattcaggtgatgaaggattcggctccggaactgaatgtgagtagttctgaaacagaggaggacaaggaagaagctaaaccagatgg

SEQ ID NO: 11550 - DNA, 102 bp, Homo sapiens
tttttttttttttttttgagacggagtcttgctctgtcacccaggctggattacaatggtgcgatcttggctcactgcaacctctgcctcccgggttcaagc

SEQ ID NO: 11551 - DNA, 1569 bp, Homo sapiens
aatgaaccttaattttcttttttttttgagtcagagtctcgctctgtcgcccagactggagtgcagtggtgcgatctcaatttactgcaacctccgcctcccgggttcaagtgattctcctgcctcagcctcccaagtagctgggattacagatgtgcaccaccaggcttggctaatttttgtatttttagtagagacagggttttcccatgttggtcaggccggtctggaactcctgacctcaagtgatccactcacctcagcctcccaaagtgctgggattacaggtgtgactcaccacgcccagcctgaagcttaattttcaagacccaatctgagggtctgggagggaccctagcaatgtgttcacttggttaatttttaaaaagttttattggtatataatatatgaatgagaaaattcataaatattataagtgtgtagtttaagatttttcacaaactgaacacacatatataactagcatccagatcaagaaacagaacattgccagtatgtggtcacatatctttgaagaatttgcaaatgtaagttatctaaaccacagtcagctaaaattgccgtctttttacctgacttcccctttgttacactcttccttatgttgggtggcattggaatggctgtgggcacttttggggtctggctatggggaaattgacttggagagatatttagttggattttagcaggatatgtttacatggttcatagcctctttgtgtatagtcaaggtattactagccatcccagtatgggaatggtttctaggaatactctatgtctgttgtgctaactcatggggcattgtgacataaacgtgcatagctagaggttgtctagcaatatgaatgtgtcctatggcatctggcacccaaagtgtgtggttagtagaggaaaaacaaggtttgatgtcaaaagccagtctggggaaaattctttaagattttgtagctttaatgaaagagacttgttaagaattttcccaggtttgaccatagtcctaaaagttgatataacattatttattgatgatgttcctgtgctaaaagaaaacttttctaagccatcaataacaacaggctgagcgtggtggcttacgcctgtaatcccagcactttgggaggctgaggcaggcagatcacttgaggtcaggagtttgagaccagcctgcccaacatgacgaaacactgtctctaataaaaatacaaaaattggtcaggcgcagtggctcatgcctgtaatcccagcactttgagaaactgaggtgagtggatcacttgaggtcaggagttcaagaccagcctggccaccatggtgaaaccccatctctattagaaatacaaaaattagtcgggcttggtggcacatgcctgtaatcctagctacttgggaggctgaggtaggagaatcacttgaacccaggaggtggaggttgcagtgagccgccaagatcgtgccactgcactccagcctgggcaacagagtgagactctgtcaaaaaaaaaaaaaaaaaaaagaaaaaggaaaaaaaaaaaactcatggg

SEQ ID NO: 11552 - DNA, 1569 bp, Homo sapiens
aatgaaccttaattttcttttttttttgagtcagagtctcgctctgtcgcccagactggagtgcagtggtgcgatctcaatttactgcaacctccgcctcccgggttcaagtgattctcctgcctcagcctcccaagtagctgggattacagatgtgcaccaccaggcttggctaatttttgtatttttagtagagacagggttttcccatgttggtcaggccggtctggaactcctgacctcaagtgatccactcacctcagcctcccaaagtgctgggattacaggtgtgactcaccacgcccagcctgaagcttaattttcaagacccaatctgagggtctgggagggaccctagcaatgtgttcacttggttaatttttaaaaagttttattggtatataatatatgaatgagaaaattcataaatattataagtgtgtagtttaagatttttcacaaactgaacacacatatataactagcatccagatcaagaaacagaacattgccagtatgtggtcacatatctttgaagaatttgcaaatgtaagttatctaaaccacagtcagctaaaattgccgtctttttacctgacttcccctttgttacactcttccttatgttgggtggcattggaatggctgtgggcacttttggggtctggctatggggaaattgacttggagagatatttagttggattttagcaggatatgtttacatggttcatagcctctttgtgtatagtcaaggtattactagccatcccagtatgggaatggtttctaggaatactctatgtctgttgtgctaactcatggggcattgtgacataaacgtgcatagctagaggttgtctagcaatatgaatgtgtcctatggcatctggcacccaaagtgtgtggttagtagaggaaaaacaaggtttgatgtcaaaagccagtctggggaaaattctttaagattttgtagctttaatgaaagagacttgttaagaattttcccaggtttgaccatagtcctaaaagttgatataacattatttattgatgatgttcctgtgctaaaagaaaacttttctaagccatcaataacaacaggctgagcgtggtggcttacgcctgtaatcccagcactttgggaggctgaggcaggcagatcacttgaggtcaggagtttgagaccagcctgcccaacatgacgaaacactgtctctaataaaaatacaaaaattggtcaggcgcagtggctcatgcctgtaatcccagcactttgagaaactgaggtgagtggatcacttgaggtcaggagttcaagaccagcctggcccccatggtgaaaccccatctttattagaaatacaaaaattagtcgggcttggtggcacatgcctgtaatcctagctacttgggaggctgaggtaggagaatcacttgaacccaggaggtggaggttgcagtgagccgccaagatcgtgccactgcactccagcctgggcaacagagtgagactctgtccaaaaaaaaaaaaaaaaaaagaaaaaggaaaaaaaaaaaactcatggg

SEQ ID NO: 11553 - DNA, 38771 bp, Homo sapiens; identical to SEQ ID NO: 7561
  SITE (7892): n equals a,t,g, or c
  SITE (7893): n equals a,t,g, or c
  SITE (7894): n equals a,t,g, or c
  SITE (7895): n equals a,t,g, or c
  SITE (7896): n equals a,t,g, or c
  SITE (7897): n equals a,t,g, or c
  SITE (7898): n equals a,t,g, or c
  SITE (7899): n equals a,t,g, or c
  SITE (7900): n equals a,t,g, or c
  SITE (7901): n equals a,t,g, or c
  SITE (7902): n equals a,t,g, or c
  SITE (7903): n equals a,t,g, or c
  SITE (7904): n equals a,t,g, or c
  SITE (7905): n equals a,t,g, or c
  SITE (7906): n equals a,t,g, or c
  SITE (7907): n equals a,t,g, or c
  SITE (7908): n equals a,t,g, or c
  SITE (7909): n equals a,t,g, or c
  SITE (7910): n equals a,t,g, or c
  SITE (7911): n equals a,t,g, or c
  SITE (7912): n equals a,t,g, or c
  SITE (7913): n equals a,t,g, or c
  SITE (7914): n equals a,t,g, or c
  SITE (7915): n equals a,t,g, or c
  SITE (7916): n equals a,t,g, or c
  SITE (7917): n equals a,t,g, or c
  SITE (7918): n equals a,t,g, or c
  SITE (7919): n equals a,t,g, or c
  SITE (7920): n equals a,t,g, or c
  SITE (7921): n equals a,t,g, or c
  SITE (7922): n equals a,t,g, or c
  SITE (7923): n equals a,t,g, or c
  SITE (7924): n equals a,t,g, or c
  SITE (7925): n equals a,t,g, or c
  SITE (7926): n equals a,t,g, or c
  SITE (7927): n equals a,t,g, or c
  SITE (7928): n equals a,t,g, or c
  SITE (7929): n equals a,t,g, or c
  SITE (7930): n equals a,t,g, or c
  SITE (7931): n equals a,t,g, or c
  SITE (7932): n equals a,t,g, or c
  SITE (7933): n equals a,t,g, or c
  SITE (7934): n equals a,t,g, or c
  SITE (7935): n equals a,t,g, or c
  SITE (7936): n equals a,t,g, or c
  SITE (7937): n equals a,t,g, or c
  SITE (7938): n equals a,t,g, or c
  SITE (7939): n equals a,t,g, or c
  SITE (7940): n equals a,t,g, or c
  SITE (7941): n equals a,t,g, or c
  SITE (7942): n equals a,t,g, or c
  SITE (7943): n equals a,t,g, or c
  SITE (7944): n equals a,t,g, or c
  SITE (7945): n equals a,t,g, or c
  SITE (7946): n equals a,t,g, or c
  SITE (7947): n equals a,t,g, or c
  SITE (7948): n equals a,t,g, or c
  SITE (7949): n equals a,t,g, or c
  SITE (7950): n equals a,t,g, or c
  SITE (7951): n equals a,t,g, or c
  SITE (7952): n equals a,t,g, or c
  SITE (7953): n equals a,t,g, or c
  SITE (7954): n equals a,t,g, or c
  SITE (7955): n equals a,t,g, or c
  SITE (7956): n equals a,t,g, or c
  SITE (7957): n equals a,t,g, or c
  SITE (7958): n equals a,t,g, or c
  SITE (7959): n equals a,t,g, or c
  SITE (7960): n equals a,t,g, or c
  SITE (7961): n equals a,t,g, or c
  SITE (7962): n equals a,t,g, or c
  SITE (7963): n equals a,t,g, or c
  SITE (7964): n equals a,t,g, or c
  SITE (7965): n equals a,t,g, or c
  SITE (7966): n equals a,t,g, or c
  SITE (7967): n equals a,t,g, or c
  SITE (7968): n equals a,t,g, or c
  SITE (7969): n equals a,t,g, or c
  SITE (7970): n equals a,t,g, or c
  SITE (7971): n equals a,t,g, or c
  SITE (7972): n equals a,t,g, or c
  SITE (7973): n equals a,t,g, or c
  SITE (7974): n equals a,t,g, or c
  SITE (7975): n equals a,t,g, or c
  SITE (7976): n equals a,t,g, or c
  SITE (7977): n equals a,t,g, or c
  SITE (7978): n equals a,t,g, or c
  SITE (7979): n equals a,t,g, or c
  SITE (7980): n equals a,t,g, or c
  SITE (7981): n equals a,t,g, or c
  SITE (7982): n equals a,t,g, or c
  SITE (7983): n equals a,t,g, or c
  SITE (7984): n equals a,t,g, or c
  SITE (7985): n equals a,t,g, or c
  SITE (7986): n equals a,t,g, or c
  SITE (7987): n equals a,t,g, or c
  SITE (7988): n equals a,t,g, or c
  SITE (7989): n equals a,t,g, or c
  SITE (7990): n equals a,t,g, or c
  SITE (7991): n equals a,t,g, or c
  SITE (7992): n equals a,t,g, or c
  SITE (7993): n equals a,t,g, or c
  SITE (7994): n equals a,t,g, or c
  SITE (7995): n equals a,t,g, or c
  SITE (7996): n equals a,t,g, or c
  SITE (7997): n equals a,t,g, or c
  SITE (7998): n equals a,t,g, or c
  SITE (7999): n equals a,t,g, or c
  SITE (8000): n equals a,t,g, or c
  SITE (8001): n equals a,t,g, or c
  SITE (8002): n equals a,t,g, or c
  SITE (8003): n equals a,t,g, or c
  SITE (8004): n equals a,t,g, or c
  SITE (8005): n equals a,t,g, or c
  SITE (8006): n equals a,t,g, or c
  SITE (8007): n equals a,t,g, or c
  SITE (8008): n equals a,t,g, or c
  SITE (8009): n equals a,t,g, or c
  SITE (8010): n equals a,t,g, or c
  SITE (8011): n equals a,t,g, or c
  SITE (8012): n equals a,t,g, or c
  SITE (8013): n equals a,t,g, or c
  SITE (8014): n equals a,t,g, or c
  SITE (8015): n equals a,t,g, or c
  SITE (8016): n equals a,t,g, or c
  SITE (8017): n equals a,t,g, or c
  SITE (8018): n equals a,t,g, or c
  SITE (8019): n equals a,t,g, or c
  SITE (8020): n equals a,t,g, or c
  SITE (8021): n equals a,t,g, or c
  SITE (8022): n equals a,t,g, or c
  SITE (8023): n equals a,t,g, or c
  SITE (8024): n equals a,t,g, or c
  SITE (8025): n equals a,t,g, or c
  SITE (8026): n equals a,t,g, or c
  SITE (8027): n equals a,t,g, or c
  SITE (8028): n equals a,t,g, or c
  SITE (8029): n equals a,t,g, or c
  SITE (8030): n equals a,t,g, or c
  SITE (8031): n equals a,t,g, or c
  SITE (8032): n equals a,t,g, or c
  SITE (8033): n equals a,t,g, or c
  SITE (8034): n equals a,t,g, or c
  SITE (8035): n equals a,t,g, or c
  SITE (8036): n equals a,t,g, or c
  SITE (8037): n equals a,t,g, or c
  SITE (8038): n equals a,t,g, or c
  SITE (8039): n equals a,t,g, or c
  SITE (8040): n equals a,t,g, or c
  SITE (8041): n equals a,t,g, or c
  SITE (8042): n equals a,t,g, or c
  SITE (8043): n equals a,t,g, or c
  SITE (8044): n equals a,t,g, or c
  SITE (8045): n equals a,t,g, or c
  SITE (8046): n equals a,t,g, or c
  SITE (8047): n equals a,t,g, or c
  SITE (8048): n equals a,t,g, or c
  SITE (8049): n equals a,t,g, or c
  SITE (8050): n equals a,t,g, or c
  SITE (8051): n equals a,t,g, or c
  SITE (8052): n equals a,t,g, or c
  SITE (8053): n equals a,t,g, or c
  SITE (8054): n equals a,t,g, or c
  SITE (8055): n equals a,t,g, or c
  SITE (8056): n equals a,t,g, or c
  SITE (8057): n equals a,t,g, or c
  SITE (8058): n equals a,t,g, or c
  SITE (8059): n equals a,t,g, or c
  SITE (8060): n equals a,t,g, or c
  SITE (8061): n equals a,t,g, or c
  SITE (8062): n equals a,t,g, or c
  SITE (8063): n equals a,t,g, or c
  SITE (8064): n equals a,t,g, or c
  SITE (8065): n equals a,t,g, or c
  SITE (8066): n equals a,t,g, or c
  SITE (8067): n equals a,t,g, or c
  SITE (8068): n equals a,t,g, or c
  SITE (8069): n equals a,t,g, or c
  SITE (8070): n equals a,t,g, or c
  SITE (8071): n equals a,t,g, or c
  SITE (8072): n equals a,t,g, or c
  SITE (8073): n equals a,t,g, or c
  SITE (8074): n equals a,t,g, or c
  SITE (8075): n equals a,t,g, or c
  SITE (8076): n equals a,t,g, or c
  SITE (8077): n equals a,t,g, or c
  SITE (8078): n equals a,t,g, or c
  SITE (8079): n equals a,t,g, or c
  SITE (8080): n equals a,t,g, or c
  SITE (8081): n equals a,t,g, or c
  SITE (8082): n equals a,t,g, or c
  SITE (8083): n equals a,t,g, or c
  SITE (8084): n equals a,t,g, or c
  SITE (8085): n equals a,t,g, or c
  SITE (8086): n equals a,t,g, or c
  SITE (8087): n equals a,t,g, or c
  SITE (8088): n equals a,t,g, or c
  SITE (8089): n equals a,t,g, or c
  SITE (8090): n equals a,t,g, or c
  SITE (8091): n equals a,t,g, or c
  SITE (8092): n equals a,t,g, or c
  SITE (8093): n equals a,t,g, or c
  SITE (8094): n equals a,t,g, or c
  SITE (8095): n equals a,t,g, or c
  SITE (8096): n equals a,t,g, or c
  SITE (8097): n equals a,t,g, or c
  SITE (8098): n equals a,t,g, or c
  SITE (8099): n equals a,t,g, or c
  SITE (8100): n equals a,t,g, or c
  SITE (8101): n equals a,t,g, or c
  SITE (8102): n equals a,t,g, or c
  SITE (8103): n equals a,t,g, or c
  SITE (8104): n equals a,t,g, or c
  SITE (8105): n equals a,t,g, or c
  SITE (8106): n equals a,t,g, or c
  SITE (8107): n equals a,t,g, or c
  SITE (8108): n equals a,t,g, or c
  SITE (8109): n equals a,t,g, or c
  SITE (8110): n equals a,t,g, or c
  SITE (8111): n equals a,t,g, or c
  SITE (8112): n equals a,t,g, or c
  SITE (8113): n equals a,t,g, or c
  SITE (8114): n equals a,t,g, or c
  SITE (8115): n equals a,t,g, or c
  SITE (8116): n equals a,t,g, or c
  SITE (8117): n equals a,t,g, or c
  SITE (8118): n equals a,t,g, or c
  SITE (8119): n equals a,t,g, or c
  SITE (8120): n equals a,t,g, or c
  SITE (8121): n equals a,t,g, or c
  SITE (8122): n equals a,t,g, or c
  SITE (8123): n equals a,t,g, or c
  SITE (8124): n equals a,t,g, or c
  SITE (8125): n equals a,t,g, or c
  SITE (8126): n equals a,t,g, or c
  SITE (8127): n equals a,t,g, or c
  SITE (8128): n equals a,t,g, or c
  SITE (8129): n equals a,t,g, or c
  SITE (8130): n equals a,t,g, or c
  SITE (8131): n equals a,t,g, or c
  SITE (8132): n equals a,t,g, or c
  SITE (8133): n equals a,t,g, or c
  SITE (8134): n equals a,t,g, or c
  SITE (8135): n equals a,t,g, or c
  SITE (8136): n equals a,t,g, or c
  SITE (8137): n equals a,t,g, or c
  SITE (8138): n equals a,t,g, or c
  SITE (8139): n equals a,t,g, or c
  SITE (8140): n equals a,t,g, or c
  SITE (8141): n equals a,t,g, or c
  SITE (8142): n equals a,t,g, or c
  SITE (8143): n equals a,t,g, or c
  SITE (8144): n equals a,t,g, or c
  SITE (8145): n equals a,t,g, or c
  SITE (8146): n equals a,t,g, or c
  SITE (8147): n equals a,t,g, or c
  SITE (8148): n equals a,t,g, or c
  SITE (8149): n equals a,t,g, or c
  SITE (8150): n equals a,t,g, or c
  SITE (8151): n equals a,t,g, or c
  SITE (8152): n equals a,t,g, or c
  SITE (8153): n equals a,t,g, or c
  SITE (8154): n equals a,t,g, or c
  SITE (8155): n equals a,t,g, or c
  SITE (8156): n equals a,t,g, or c
  SITE (8157): n equals a,t,g, or c
  SITE (8158): n equals a,t,g, or c
  SITE (8159): n equals a,t,g, or c
  SITE (8160): n equals a,t,g, or c
  SITE (8161): n equals a,t,g, or c
  SITE (8162): n equals a,t,g, or c
  SITE (8163): n equals a,t,g, or c
  SITE (8164): n equals a,t,g, or c
  SITE (8165): n equals a,t,g, or c
  SITE (8166): n equals a,t,g, or c
  SITE (8167): n equals a,t,g, or c
  SITE (8168): n equals a,t,g, or c
  SITE (8169): n equals a,t,g, or c
  SITE (8170): n equals a,t,g, or c
  SITE (8171): n equals a,t,g, or c
  SITE (8172): n equals a,t,g, or c
  SITE (8173): n equals a,t,g, or c
  SITE (8174): n equals a,t,g, or c
  SITE (8175): n equals a,t,g, or c
  SITE (8176): n equals a,t,g, or c
  SITE (8177): n equals a,t,g, or c
  SITE (8178): n equals a,t,g, or c
  SITE (8179): n equals a,t,g, or c
  SITE (8180): n equals a,t,g, or c
  SITE (8181): n equals a,t,g, or c
  SITE (8182): n equals a,t,g, or c
  SITE (8183): n equals a,t,g, or c
  SITE (8184): n equals a,t,g, or c
  SITE (8185): n equals a,t,g, or c
  SITE (8186): n equals a,t,g, or c
  SITE (8187): n equals a,t,g, or c
  SITE (8188): n equals a,t,g, or c
  SITE (8189): n equals a,t,g, or c
  SITE (8190): n equals a,t,g, or c
  SITE (8191): n equals a,t,g, or c
  SITE (8192): n equals a,t,g, or c
  SITE (8193): n equals a,t,g, or c
  SITE (8194): n equals a,t,g, or c
  SITE (8195): n equals a,t,g, or c
  SITE (8196): n equals a,t,g, or c
  SITE (8197): n equals a,t,g, or c
  SITE (8198): n equals a,t,g, or c
  SITE (8199): n equals a,t,g, or c
  SITE (8200): n equals a,t,g, or c
  SITE (8201): n equals a,t,g, or c
  SITE (8202): n equals a,t,g, or c
  SITE (8203): n equals a,t,g, or c
  SITE (8204): n equals a,t,g, or c
  SITE (8205): n equals a,t,g, or c
  SITE (8206): n equals a,t,g, or c
  SITE (8207): n equals a,t,g, or c
  SITE (8208): n equals a,t,g, or c
  SITE (8209): n equals a,t,g, or c
  SITE (8210): n equals a,t,g, or c
  SITE (8211): n equals a,t,g, or c
  SITE (8212): n equals a,t,g, or c
  SITE (8213): n equals a,t,g, or c
  SITE (8214): n equals a,t,g, or c
  SITE (8215): n equals a,t,g, or c
  SITE (8216): n equals a,t,g, or c
  SITE (8217): n equals a,t,g, or c
  SITE (8218): n equals a,t,g, or c
  SITE (8219): n equals a,t,g, or c
  SITE (8220): n equals a,t,g, or c
  SITE (8221): n equals a,t,g, or c
  SITE (8222): n equals a,t,g, or c
  SITE (8223): n equals a,t,g, or c
  SITE (8224): n equals a,t,g, or c
  SITE (8225): n equals a,t,g, or c
  SITE (8226): n equals a,t,g, or c
  SITE (8227): n equals a,t,g, or c
  SITE (8228): n equals a,t,g, or c
  SITE (8229): n equals a,t,g, or c
  SITE (8230): n equals a,t,g, or c
  SITE (8231): n equals a,t,g, or c
  SITE (8232): n equals a,t,g, or c
  SITE (8233): n equals a,t,g, or c
  SITE (8234): n equals a,t,g, or c
  SITE (8235): n equals a,t,g, or c
  SITE (8236): n equals a,t,g, or c
  SITE (8237): n equals a,t,g, or c
  SITE (8238): n equals a,t,g, or c
  SITE (8239): n equals a,t,g, or c
  SITE (8240): n equals a,t,g, or c
  SITE (8241): n equals a,t,g, or c
  SITE (8242): n equals a,t,g, or c
  SITE (8243): n equals a,t,g, or c
  SITE (8244): n equals a,t,g, or c
  SITE (8245): n equals a,t,g, or c
  SITE (8246): n equals a,t,g, or c
  SITE (8247): n equals a,t,g, or c
  SITE (8248): n equals a,t,g, or c
  SITE (8249): n equals a,t,g, or c
  SITE (8250): n equals a,t,g, or c
  SITE (8251): n equals a,t,g, or c
  SITE (8252): n equals a,t,g, or c
  SITE (8253): n equals a,t,g, or c
  SITE (8254): n equals a,t,g, or c
  SITE (8255): n equals a,t,g, or c
  SITE (8256): n equals a,t,g, or c
  SITE (8257): n equals a,t,g, or c
  SITE (8258): n equals a,t,g, or c
  SITE (8259): n equals a,t,g, or c
  SITE (8260): n equals a,t,g, or c
  SITE (8261): n equals a,t,g, or c
  SITE (8262): n equals a,t,g, or c
  SITE (8263): n equals a,t,g, or c
  SITE (8264): n equals a,t,g, or c
  SITE (8265): n equals a,t,g, or c
  SITE (8266): n equals a,t,g, or c
  SITE (8267): n equals a,t,g, or c
  SITE (8268): n equals a,t,g, or c
  SITE (8269): n equals a,t,g, or c
  SITE (8270): n equals a,t,g, or c
  SITE (8271): n equals a,t,g, or c
  SITE (8272): n equals a,t,g, or c
  SITE (8273): n equals a,t,g, or c
  SITE (8274): n equals a,t,g, or c
  SITE (8275): n equals a,t,g, or c
  SITE (8276): n equals a,t,g, or c
  SITE (8277): n equals a,t,g, or c
  SITE (8278): n equals a,t,g, or c
  SITE (8279): n equals a,t,g, or c
  SITE (8280): n equals a,t,g, or c
  SITE (8281): n equals a,t,g, or c
  SITE (8282): n equals a,t,g, or c
  SITE (8283): n equals a,t,g, or c
  SITE (8284): n equals a,t,g, or c
  SITE (8285): n equals a,t,g, or c
  SITE (8286): n equals a,t,g, or c
  SITE (8287): n equals a,t,g, or c
  SITE (8288): n equals a,t,g, or c
  SITE (8289): n equals a,t,g, or c
  SITE (8290): n equals a,t,g, or c
  SITE (8291): n equals a,t,g, or c
  SITE (8292): n equals a,t,g, or c
  SITE (8293): n equals a,t,g, or c
  SITE (8294): n equals a,t,g, or c
  SITE (8295): n equals a,t,g, or c
  SITE (8296): n equals a,t,g, or c
  SITE (8297): n equals a,t,g, or c
  SITE (8298): n equals a,t,g, or c
  SITE (8299): n equals a,t,g, or c
  SITE (8300): n equals a,t,g, or c
  SITE (8301): n equals a,t,g, or c
  SITE (8302): n equals a,t,g, or c
  SITE (8303): n equals a,t,g, or c
  SITE (8304): n equals a,t,g, or c
  SITE (8305): n equals a,t,g, or c
  SITE (8306): n equals a,t,g, or c
  SITE (8307): n equals a,t,g, or c
  SITE (8308): n equals a,t,g, or c
  SITE (8309): n equals a,t,g, or c
  SITE (8310): n equals a,t,g, or c
  SITE (8311): n equals a,t,g, or c
  SITE (8312): n equals a,t,g, or c
  SITE (8313): n equals a,t,g, or c
  SITE (8314): n equals a,t,g, or c
  SITE (8315): n equals a,t,g, or c
  SITE (8316): n equals a,t,g, or c
  SITE (8317): n equals a,t,g, or c
  SITE (8318): n equals a,t,g, or c
  SITE (8319): n equals a,t,g, or c
  SITE (8320): n equals a,t,g, or c
  SITE (8321): n equals a,t,g, or c
  SITE (8322): n equals a,t,g, or c
  SITE (8323): n equals a,t,g, or c
  SITE (8324): n equals a,t,g, or c
  SITE (8325): n equals a,t,g, or c
  SITE (8326): n equals a,t,g, or c
  SITE (8327): n equals a,t,g, or c
  SITE (8328): n equals a,t,g, or c
  SITE (8329): n equals a,t,g, or c
  SITE (8330): n equals a,t,g, or c
  SITE (8331): n equals a,t,g, or c
  SITE (8332): n equals a,t,g, or c
  SITE (8333): n equals a,t,g, or c
  SITE (8334): n equals a,t,g, or c
  SITE (8335): n equals a,t,g, or c
  SITE (8336): n equals a,t,g, or c
  SITE (8337): n equals a,t,g, or c
  SITE (8338): n equals a,t,g, or c
  SITE (8339): n equals a,t,g, or c
  SITE (8340): n equals a,t,g, or c
  SITE (8341): n equals a,t,g, or c
  SITE (8342): n equals a,t,g, or c
  SITE (8343): n equals a,t,g, or c
  SITE (8344): n equals a,t,g, or c
  SITE (8345): n equals a,t,g, or c
  SITE (8346): n equals a,t,g, or c
  SITE (8347): n equals a,t,g, or c
  SITE (8348): n equals a,t,g, or c
  SITE (8349): n equals a,t,g, or c
  SITE (8350): n equals a,t,g, or c
  SITE (8351): n equals a,t,g, or c
  SITE (8352): n equals a,t,g, or c
  SITE (8353): n equals a,t,g, or c
  SITE (8354): n equals a,t,g, or c
  SITE (8355): n equals a,t,g, or c
  SITE (8356): n equals a,t,g, or c
  SITE (8357): n equals a,t,g, or c
  SITE (8358): n equals a,t,g, or c
  SITE (8359): n equals a,t,g, or c
  SITE (8360): n equals a,t,g, or c
  SITE (8361): n equals a,t,g, or c
  SITE (8362): n equals a,t,g, or c
  SITE (8363): n equals a,t,g, or c
  SITE (8364): n equals a,t,g, or c
  SITE (8365): n equals a,t,g, or c
  SITE (8366): n equals a,t,g, or c
  SITE (8367): n equals a,t,g, or c
  SITE (8368): n equals a,t,g, or c
  SITE (8369): n equals a,t,g, or c
  SITE (8370): n equals a,t,g, or c
  SITE (8371): n equals a,t,g, or c
  SITE (8372): n equals a,t,g, or c
  SITE (8373): n equals a,t,g, or c
  SITE (8374): n equals a,t,g, or c
  SITE (8375): n equals a,t,g, or c
  SITE (8376): n equals a,t,g, or c
  SITE (8377): n equals a,t,g, or c
  SITE (8378): n equals a,t,g, or c
  SITE (8379): n equals a,t,g, or c
  SITE (8380): n equals a,t,g, or c
  SITE (8381): n equals a,t,g, or c
  SITE (8382): n equals a,t,g, or c
  SITE (8383): n equals a,t,g, or c
  SITE (8384): n equals a,t,g, or c
  SITE (8385): n equals a,t,g, or c
  SITE (8386): n equals a,t,g, or c
  SITE (8387): n equals a,t,g, or c
  SITE (8388): n equals a,t,g, or c
  SITE (8389): n equals a,t,g, or c
  SITE (8390): n equals a,t,g, or c
  SITE (8391): n equals a,t,g, or c
  SITE (8392): n equals a,t,g, or c
  SITE (8393): n equals a,t,g, or c
  SITE (8394): n equals a,t,g, or c
  SITE (8395): n equals a,t,g, or c
  SITE (8396): n equals a,t,g, or c
  SITE (8397): n equals a,t,g, or c
  SITE (8398): n equals a,t,g, or c
  SITE (8399): n equals a,t,g, or c
  SITE (8400): n equals a,t,g, or c
  SITE (8401): n equals a,t,g, or c
  SITE (8402): n equals a,t,g, or c
  SITE (8403): n equals a,t,g, or c
  SITE (8404): n equals a,t,g, or c
  SITE (8405): n equals a,t,g, or c
  SITE (8406): n equals a,t,g, or c
  SITE (8407): n equals a,t,g, or c
  SITE (8408): n equals a,t,g, or c
  SITE (8409): n equals a,t,g, or c
  SITE (8410): n equals a,t,g, or c
  SITE (8411): n equals a,t,g, or c
  SITE (8412): n equals a,t,g, or c
  SITE (8413): n equals a,t,g, or c
  SITE (8414): n equals a,t,g, or c
  SITE (8415): n equals a,t,g, or c
  SITE (8416): n equals a,t,g, or c
  SITE (8417): n equals a,t,g, or c
  SITE (8418): n equals a,t,g, or c
  SITE (8419): n equals a,t,g, or c
  SITE (8420): n equals a,t,g, or c
  SITE (8421): n equals a,t,g, or c
  SITE (8422): n equals a,t,g, or c
  SITE (8423): n equals a,t,g, or c
  SITE (8424): n equals a,t,g, or c
  SITE (8425): n equals a,t,g, or c
  SITE (8426): n equals a,t,g, or c
  SITE (8427): n equals a,t,g, or c
  SITE (8428): n equals a,t,g, or c
  SITE (8429): n equals a,t,g, or c
  SITE (8430): n equals a,t,g, or c
  SITE (8431): n equals a,t,g, or c
  SITE (8432): n equals a,t,g, or c
  SITE (8433): n equals a,t,g, or c
  SITE (8434): n equals a,t,g, or c
  SITE (8435): n equals a,t,g, or c
  SITE (8436): n equals a,t,g, or c
  SITE (8437): n equals a,t,g, or c
  SITE (8438): n equals a,t,g, or c
  SITE (8439): n equals a,t,g, or c
  SITE (8440): n equals a,t,g, or c
  SITE (8441): n equals a,t,g, or c
  SITE (8442): n equals a,t,g, or c
  SITE (8443): n equals a,t,g, or c
  SITE (8444): n equals a,t,g, or c
  SITE (8445): n equals a,t,g, or c
  SITE (8446): n equals a,t,g, or c
  SITE (8447): n equals a,t,g, or c
  SITE (8448): n equals a,t,g, or c
  SITE (8449): n equals a,t,g, or c
  SITE (8450): n equals a,t,g, or c
  SITE (8451): n equals a,t,g, or c
  SITE (8452): n equals a,t,g, or c
  SITE (8453): n equals a,t,g, or c
  SITE (8454): n equals a,t,g, or c
  SITE (8455): n equals a,t,g, or c
  SITE (8456): n equals a,t,g, or c
  SITE (8457): n equals a,t,g, or c
  SITE (8458): n equals a,t,g, or c
  SITE (8459): n equals a,t,g, or c
  SITE (8460): n equals a,t,g, or c
  SITE (8461): n equals a,t,g, or c
  SITE (8462): n equals a,t,g, or c
  SITE (8463): n equals a,t,g, or c
  SITE (8464): n equals a,t,g, or c
  SITE (8465): n equals a,t,g, or c
  SITE (8466): n equals a,t,g, or c
  SITE (8467): n equals a,t,g, or c
  SITE (8468): n equals a,t,g, or c
  SITE (8469): n equals a,t,g, or c
  SITE (8470): n equals a,t,g, or c
  SITE (8471): n equals a,t,g, or c
  SITE (8472): n equals a,t,g, or c
  SITE (8473): n equals a,t,g, or c
  SITE (8474): n equals a,t,g, or c
  SITE (8475): n equals a,t,g, or c
  SITE (8476): n equals a,t,g, or c
  SITE (8477): n equals a,t,g, or c
  SITE (8478): n equals a,t,g, or c
  SITE (8479): n equals a,t,g, or c
  SITE (8480): n equals a,t,g, or c
  SITE (8481): n equals a,t,g, or c
  SITE (8482): n equals a,t,g, or c
  SITE (8483): n equals a,t,g, or c
  SITE (8484): n equals a,t,g, or c
  SITE (8485): n equals a,t,g, or c
  SITE (8486): n equals a,t,g, or c
  SITE (8487): n equals a,t,g, or c
  SITE (8488): n equals a,t,g, or c
  SITE (8489): n equals a,t,g, or c
  SITE (8490): n equals a,t,g, or c
  SITE (8491): n equals a,t,g, or c
  SITE (8492): n equals a,t,g, or c
  SITE (8493): n equals a,t,g, or c
  SITE (8494): n equals a,t,g, or c
  SITE (8495): n equals a,t,g, or c
  SITE (8496): n equals a,t,g, or c
  SITE (8497): n equals a,t,g, or c
  SITE (8498): n equals a,t,g, or c
  SITE (8499): n equals a,t,g, or c
  SITE (8500): n equals a,t,g, or c
  SITE (8501): n equals a,t,g, or c
  SITE (8502): n equals a,t,g, or c
  SITE (8503): n equals a,t,g, or c
  SITE (8504): n equals a,t,g, or c
  SITE (8505): n equals a,t,g, or c
  SITE (8506): n equals a,t,g, or c
  SITE (8507): n equals a,t,g, or c
  SITE (8508): n equals a,t,g, or c
  SITE (8509): n equals a,t,g, or c
  SITE (8510): n equals a,t,g, or c
  SITE (8511): n equals a,t,g, or c
  SITE (8512): n equals a,t,g, or c
  SITE (8513): n equals a,t,g, or c
  SITE (8514): n equals a,t,g, or c
  SITE (8515): n equals a,t,g, or c
  SITE (8516): n equals a,t,g, or c
  SITE (8517): n equals a,t,g, or c
  SITE (8518): n equals a,t,g, or c
  SITE (8519): n equals a,t,g, or c
  SITE (8520): n equals a,t,g, or c
  SITE (8521): n equals a,t,g, or c
  SITE (8522): n equals a,t,g, or c
  SITE (8523): n equals a,t,g, or c
  SITE (8524): n equals a,t,g, or c
  SITE (8525): n equals a,t,g, or c
  SITE (8526): n equals a,t,g, or c
  SITE (8527): n equals a,t,g, or c
  SITE (8528): n equals a,t,g, or c
  SITE (8529): n equals a,t,g, or c
  SITE (8530): n equals a,t,g, or c
  SITE (8531): n equals a,t,g, or c
  SITE (8532): n equals a,t,g, or c
  SITE (8533): n equals a,t,g, or c
  SITE (8534): n equals a,t,g, or c
  SITE (8535): n equals a,t,g, or c
  SITE (8536): n equals a,t,g, or c
  SITE (8537): n equals a,t,g, or c
  SITE (8538): n equals a,t,g, or c
  SITE (8539): n equals a,t,g, or c
  SITE (8540): n equals a,t,g, or c
  SITE (8541): n equals a,t,g, or c
  SITE (8542): n equals a,t,g, or c
  SITE (8543): n equals a,t,g, or c
  SITE (8544): n equals a,t,g, or c
  SITE (8545): n equals a,t,g, or c
  SITE (8546): n equals a,t,g, or c
  SITE (8547): n equals a,t,g, or c
  SITE (8548): n equals a,t,g, or c
  SITE (8549): n equals a,t,g, or c
  SITE (8550): n equals a,t,g, or c
  SITE (8551): n equals a,t,g, or c
  SITE (8552): n equals a,t,g, or c
  SITE (8553): n equals a,t,g, or c
  SITE (8554): n equals a,t,g, or c
  SITE (8555): n equals a,t,g, or c
  SITE (8556): n equals a,t,g, or c
  SITE (8557): n equals a,t,g, or c
  SITE (8558): n equals a,t,g, or c
  SITE (8559): n equals a,t,g, or c
  SITE (8560): n equals a,t,g, or c
  SITE (8561): n equals a,t,g, or c
  SITE (8562): n equals a,t,g, or c
  SITE (8563): n equals a,t,g, or c
  SITE (8564): n equals a,t,g, or c
  SITE (8565): n equals a,t,g, or c
  SITE (8566): n equals a,t,g, or c
  SITE (8567): n equals a,t,g, or c
  SITE (8568): n equals a,t,g, or c
  SITE (8569): n equals a,t,g, or c
  SITE (8570): n equals a,t,g, or c
  SITE (8571): n equals a,t,g, or c
  SITE (8572): n equals a,t,g, or c
  SITE (8573): n equals a,t,g, or c
  SITE (8574): n equals a,t,g, or c
  SITE (8575): n equals a,t,g, or c
  SITE (8576): n equals a,t,g, or c
  SITE (8577): n equals a,t,g, or c
  SITE (8578): n equals a,t,g, or c
  SITE (8579): n equals a,t,g, or c
  SITE (8580): n equals a,t,g, or c
  SITE (8581): n equals a,t,g, or c
  SITE (8582): n equals a,t,g, or c
  SITE (8583): n equals a,t,g, or c
  SITE (8584): n equals a,t,g, or c
  SITE (8585): n equals a,t,g, or c
  SITE (8586): n equals a,t,g, or c
  SITE (8587): n equals a,t,g, or c
  SITE (8588): n equals a,t,g, or c
  SITE (8589): n equals a,t,g, or c
  SITE (8590): n equals a,t,g, or c
  SITE (8591): n equals a,t,g, or c
  SITE (8592): n equals a,t,g, or c
  SITE (8593): n equals a,t,g, or c
  SITE (8594): n equals a,t,g, or c
  SITE (8595): n equals a,t,g, or c
  SITE (8596): n equals a,t,g, or c
  SITE (8597): n equals a,t,g, or c
  SITE (8598): n equals a,t,g, or c
  SITE (8599): n equals a,t,g, or c
  SITE (8600): n equals a,t,g, or c
  SITE (8601): n equals a,t,g, or c
  SITE (8602): n equals a,t,g, or c
  SITE (8603): n equals a,t,g, or c
  SITE (8604): n equals a,t,g, or c
  SITE (8605): n equals a,t,g, or c
  SITE (8606): n equals a,t,g, or c
  SITE (8607): n equals a,t,g, or c
  SITE (8608): n equals a,t,g, or c
  SITE (8609): n equals a,t,g, or c
  SITE (8610): n equals a,t,g, or c
  SITE (8611): n equals a,t,g, or c
  SITE (8612): n equals a,t,g, or c
  SITE (8613): n equals a,t,g, or c
  SITE (8614): n equals a,t,g, or c
  SITE (8615): n equals a,t,g, or c
  SITE (8616): n equals a,t,g, or c
  SITE (8617): n equals a,t,g, or c
  SITE (8618): n equals a,t,g, or c
  SITE (8619): n equals a,t,g, or c
  SITE (8620): n equals a,t,g, or c
  SITE (8621): n equals a,t,g, or c
  SITE (8622): n equals a,t,g, or c
  SITE (8623): n equals a,t,g, or c
  SITE (8624): n equals a,t,g, or c
  SITE (8625): n equals a,t,g, or c
  SITE (8626): n equals a,t,g, or c
  SITE (8627): n equals a,t,g, or c
  SITE (8628): n equals a,t,g, or c
  SITE (8629): n equals a,t,g, or c
  SITE (8630): n equals a,t,g, or c
  SITE (8631): n equals a,t,g, or c
  SITE (8632): n equals a,t,g, or c
  SITE (8633): n equals a,t,g, or c
  SITE (8634): n equals a,t,g, or c
  SITE (8635): n equals a,t,g, or c
  SITE (8636): n equals a,t,g, or c
  SITE (8637): n equals a,t,g, or c
  SITE (8638): n equals a,t,g, or c
  SITE (8639): n equals a,t,g, or c
  SITE (8640): n equals a,t,g, or c
  SITE (8641): n equals a,t,g, or c
  SITE (8642): n equals a,t,g, or c
  SITE (8643): n equals a,t,g, or c
  SITE (8644): n equals a,t,g, or c
  SITE (8645): n equals a,t,g, or c
  SITE (8646): n equals a,t,g, or c
  SITE (8647): n equals a,t,g, or c
  SITE (8648): n equals a,t,g, or c
  SITE (8649): n equals a,t,g, or c
  SITE (8650): n equals a,t,g, or c
  SITE (8651): n equals a,t,g, or c
  SITE (8652): n equals a,t,g, or c
  SITE (8653): n equals a,t,g, or c
  SITE (8654): n equals a,t,g, or c
  SITE (8655): n equals a,t,g, or c
  SITE (8656): n equals a,t,g, or c
  SITE (8657): n equals a,t,g, or c
  SITE (8658): n equals a,t,g, or c
  SITE (8659): n equals a,t,g, or c
  SITE (8660): n equals a,t,g, or c
  SITE (8661): n equals a,t,g, or c
  SITE (8662): n equals a,t,g, or c
  SITE (8663): n equals a,t,g, or c
  SITE (8664): n equals a,t,g, or c
  SITE (8665): n equals a,t,g, or c
  SITE (8666): n equals a,t,g, or c
  SITE (8667): n equals a,t,g, or c
  SITE (8668): n equals a,t,g, or c
  SITE (8669): n equals a,t,g, or c
  SITE (8670): n equals a,t,g, or c
  SITE (8671): n equals a,t,g, or c
  SITE (8672): n equals a,t,g, or c
  SITE (8673): n equals a,t,g, or c
  SITE (8674): n equals a,t,g, or c
  SITE (8675): n equals a,t,g, or c
  SITE (8676): n equals a,t,g, or c
  SITE (8677): n equals a,t,g, or c
  SITE (8678): n equals a,t,g, or c
  SITE (8679): n equals a,t,g, or c
  SITE (8680): n equals a,t,g, or c
  SITE (8681): n equals a,t,g, or c
  SITE (8682): n equals a,t,g, or c
  SITE (8683): n equals a,t,g, or c
  SITE (8684): n equals a,t,g, or c
  SITE (8685): n equals a,t,g, or c
  SITE (8686): n equals a,t,g, or c
  SITE (8687): n equals a,t,g, or c
  SITE (8688): n equals a,t,g, or c
  SITE (8689): n equals a,t,g, or c
  SITE (8690): n equals a,t,g, or c
  SITE (8691): n equals a,t,g, or c
  SITE (8692): n equals a,t,g, or c
  SITE (8693): n equals a,t,g, or c
  SITE (8694): n equals a,t,g, or c
  SITE (8695): n equals a,t,g, or c
  SITE (8696): n equals a,t,g, or c
  SITE (8697): n equals a,t,g, or c
  SITE (8698): n equals a,t,g, or c
  SITE (8699): n equals a,t,g, or c
  SITE (8700): n equals a,t,g, or c
  SITE (8701): n equals a,t,g, or c
  SITE (8702): n equals a,t,g, or c
  SITE (8703): n equals a,t,g, or c
  SITE (8704): n equals a,t,g, or c
  SITE (8705): n equals a,t,g, or c
  SITE (8706): n equals a,t,g, or c
  SITE (8707): n equals a,t,g, or c
  SITE (8708): n equals a,t,g, or c
  SITE (8709): n equals a,t,g, or c
  SITE (8710): n equals a,t,g, or c
  SITE (8711): n equals a,t,g, or c
  SITE (8712): n equals a,t,g, or c
  SITE (8713): n equals a,t,g, or c
  SITE (8714): n equals a,t,g, or c
  SITE (8715): n equals a,t,g, or c
  SITE (8716): n equals a,t,g, or c
  SITE (8717): n equals a,t,g, or c
  SITE (8718): n equals a,t,g, or c
  SITE (8719): n equals a,t,g, or c
  SITE (8720): n equals a,t,g, or c
  SITE (8721): n equals a,t,g, or c
  SITE (8722): n equals a,t,g, or c
  SITE (8723): n equals a,t,g, or c
  SITE (8724): n equals a,t,g, or c
  SITE (8725): n equals a,t,g, or c
  SITE (8726): n equals a,t,g, or c
  SITE (8727): n equals a,t,g, or c
  SITE (8728): n equals a,t,g, or c
  SITE (8729): n equals a,t,g, or c
  SITE (8730): n equals a,t,g, or c
  SITE (8731): n equals a,t,g, or c
  SITE (8732): n equals a,t,g, or c
  SITE (8733): n equals a,t,g, or c
  SITE (8734): n equals a,t,g, or c
  SITE (8735): n equals a,t,g, or c
  SITE (8736): n equals a,t,g, or c
  SITE (8737): n equals a,t,g, or c
  SITE (8738): n equals a,t,g, or c
  SITE (8739): n equals a,t,g, or c
  SITE (8740): n equals a,t,g, or c
  SITE (8741): n equals a,t,g, or c
  SITE (8742): n equals a,t,g, or c
  SITE (8743): n equals a,t,g, or c
  SITE (8744): n equals a,t,g, or c
  SITE (8745): n equals a,t,g, or c
  SITE (8746): n equals a,t,g, or c
  SITE (8747): n equals a,t,g, or c
  SITE (8748): n equals a,t,g, or c
  SITE (8749): n equals a,t,g, or c
  SITE (8750): n equals a,t,g, or c
  SITE (8751): n equals a,t,g, or c
  SITE (8752): n equals a,t,g, or c
  SITE (8753): n equals a,t,g, or c
  SITE (8754): n equals a,t,g, or c
  SITE (8755): n equals a,t,g, or c
  SITE (8756): n equals a,t,g, or c
  SITE (8757): n equals a,t,g, or c
  SITE (8758): n equals a,t,g, or c
  SITE (8759): n equals a,t,g, or c
  SITE (8760): n equals a,t,g, or c
  SITE (8761): n equals a,t,g, or c
  SITE (8762): n equals a,t,g, or c
  SITE (8763): n equals a,t,g, or c
  SITE (8764): n equals a,t,g, or c
  SITE (8765): n equals a,t,g, or c
  SITE (8766): n equals a,t,g, or c
  SITE (8767): n equals a,t,g, or c
  SITE (8768): n equals a,t,g, or c
  SITE (8769): n equals a,t,g, or c
  SITE (8770): n equals a,t,g, or c
  SITE (8771): n equals a,t,g, or c
  SITE (8772): n equals a,t,g, or c
  SITE (8773): n equals a,t,g, or c
  SITE (8774): n equals a,t,g, or c
  SITE (8775): n equals a,t,g, or c
  SITE (8776): n equals a,t,g, or c
  SITE (8777): n equals a,t,g, or c
  SITE (8778): n equals a,t,g, or c
  SITE (8779): n equals a,t,g, or c
  SITE (8780): n equals a,t,g, or c
  SITE (8781): n equals a,t,g, or c
  SITE (8782): n equals a,t,g, or c
  SITE (8783): n equals a,t,g, or c
  SITE (8784): n equals a,t,g, or c
  SITE (8785): n equals a,t,g, or c
  SITE (8786): n equals a,t,g, or c
  SITE (8787): n equals a,t,g, or c
  SITE (8788): n equals a,t,g, or c
  SITE (8789): n equals a,t,g, or c
  SITE (8790): n equals a,t,g, or c
  SITE (8791): n equals a,t,g, or c
  SITE (8792): n equals a,t,g, or c
  SITE (8793): n equals a,t,g, or c
  SITE (8794): n equals a,t,g, or c
  SITE (8795): n equals a,t,g, or c
  SITE (8796): n equals a,t,g, or c
  SITE (8797): n equals a,t,g, or c
  SITE (8798): n equals a,t,g, or c
  SITE (8799): n equals a,t,g, or c
  SITE (8800): n equals a,t,g, or c
  SITE (8801): n equals a,t,g, or c
  SITE (8802): n equals a,t,g, or c
  SITE (8803): n equals a,t,g, or c
  SITE (8804): n equals a,t,g, or c
  SITE (8805): n equals a,t,g, or c
  SITE (8806): n equals a,t,g, or c
  SITE (8807): n equals a,t,g, or c
  SITE (8808): n equals a,t,g, or c
  SITE (8809): n equals a,t,g, or c
  SITE (8810): n equals a,t,g, or c
  SITE (8811): n equals a,t,g, or c
  SITE (8812): n equals a,t,g, or c
  SITE (8813): n equals a,t,g, or c
  SITE (8814): n equals a,t,g, or c
  SITE (8815): n equals a,t,g, or c
  SITE (8816): n equals a,t,g, or c
  SITE (8817): n equals a,t,g, or c
  SITE (8818): n equals a,t,g, or c
  SITE (8819): n equals a,t,g, or c
  SITE (8820): n equals a,t,g, or c
  SITE (8821): n equals a,t,g, or c
  SITE (8822): n equals a,t,g, or c
  SITE (8823): n equals a,t,g, or c
  SITE (8824): n equals a,t,g, or c
  SITE (8825): n equals a,t,g, or c
  SITE (8826): n equals a,t,g, or c
  SITE (8827): n equals a,t,g, or c
  SITE (8828): n equals a,t,g, or c
  SITE (8829): n equals a,t,g, or c
  SITE (8830): n equals a,t,g, or c
  SITE (8831): n equals a,t,g, or c
  SITE (8832): n equals a,t,g, or c
  SITE (8833): n equals a,t,g, or c
  SITE (8834): n equals a,t,g, or c
  SITE (8835): n equals a,t,g, or c
  SITE (8836): n equals a,t,g, or c
  SITE (8837): n equals a,t,g, or c
  SITE (8838): n equals a,t,g, or c
  SITE (8839): n equals a,t,g, or c
  SITE (8840): n equals a,t,g, or c
  SITE (8841): n equals a,t,g, or c
  SITE (8842): n equals a,t,g, or c
  SITE (8843): n equals a,t,g, or c
  SITE (8844): n equals a,t,g, or c
  SITE (8845): n equals a,t,g, or c
  SITE (8846): n equals a,t,g, or c
  SITE (8847): n equals a,t,g, or c
  SITE (8848): n equals a,t,g, or c
  SITE (8849): n equals a,t,g, or c
  SITE (8850): n equals a,t,g, or c
  SITE (8851): n equals a,t,g, or c
  SITE (8852): n equals a,t,g, or c
  SITE (8853): n equals a,t,g, or c
  SITE (8854): n equals a,t,g, or c
  SITE (8855): n equals a,t,g, or c
  SITE (8856): n equals a,t,g, or c
  SITE (8857): n equals a,t,g, or c
  SITE (8858): n equals a,t,g, or c
  SITE (8859): n equals a,t,g, or c
  SITE (8860): n equals a,t,g, or c
  SITE (8861): n equals a,t,g, or c
  SITE (8862): n equals a,t,g, or c
  SITE (8863): n equals a,t,g, or c
  SITE (8864): n equals a,t,g, or c
  SITE (8865): n equals a,t,g, or c
  SITE (8866): n equals a,t,g, or c
  SITE (8867): n equals a,t,g, or c
  SITE (8868): n equals a,t,g, or c
  SITE (8869): n equals a,t,g, or c
  SITE (8870): n equals a,t,g, or c
  SITE (8871): n equals a,t,g, or c
  SITE (8872): n equals a,t,g, or c
  SITE (8873): n equals a,t,g, or c
  SITE (8874): n equals a,t,g, or c
  SITE (8875): n equals a,t,g, or c
  SITE (8876): n equals a,t,g, or c
  SITE (8877): n equals a,t,g, or c
  SITE (8878): n equals a,t,g, or c
  SITE (8879): n equals a,t,g, or c
  SITE (8880): n equals a,t,g, or c
  SITE (8881): n equals a,t,g, or c
  SITE (8882): n equals a,t,g, or c
  SITE (8883): n equals a,t,g, or c
  SITE (8884): n equals a,t,g, or c
  SITE (8885): n equals a,t,g, or c
  SITE (8886): n equals a,t,g, or c
  SITE (8887): n equals a,t,g, or c
  SITE (8888): n equals a,t,g, or c
  SITE (8889): n equals a,t,g, or c
  SITE (8890): n equals a,t,g, or c
  SITE (8891): n equals a,t,g, or c
  SITE (8892): n equals a,t,g, or c
  SITE (8893): n equals a,t,g, or c
  SITE (8894): n equals a,t,g, or c
  SITE (8895): n equals a,t,g, or c
  SITE (8896): n equals a,t,g, or c
  SITE (8897): n equals a,t,g, or c
  SITE (8898): n equals a,t,g, or c
  SITE (8899): n equals a,t,g, or c
  SITE (8900): n equals a,t,g, or c
  SITE (8901): n equals a,t,g, or c
  SITE (8902): n equals a,t,g, or c
  SITE (8903): n equals a,t,g, or c
  SITE (8904): n equals a,t,g, or c
  SITE (8905): n equals a,t,g, or c
  SITE (8906): n equals a,t,g, or c
  SITE (8907): n equals a,t,g, or c
  SITE (8908): n equals a,t,g, or c
  SITE (8909): n equals a,t,g, or c
  SITE (8910): n equals a,t,g, or c
  SITE (8911): n equals a,t,g, or c
  SITE (8912): n equals a,t,g, or c
  SITE (8913): n equals a,t,g, or c
  SITE (8914): n equals a,t,g, or c
  SITE (8915): n equals a,t,g, or c
  SITE (8916): n equals a,t,g, or c
  SITE (8917): n equals a,t,g, or c
  SITE (8918): n equals a,t,g, or c
  SITE (8919): n equals a,t,g, or c
  SITE (8920): n equals a,t,g, or c
  SITE (8921): n equals a,t,g, or c
  SITE (8922): n equals a,t,g, or c
  SITE (8923): n equals a,t,g, or c
  SITE (8924): n equals a,t,g, or c
  SITE (8925): n equals a,t,g, or c
  SITE (8926): n equals a,t,g, or c
  SITE (8927): n equals a,t,g, or c
  SITE (8928): n equals a,t,g, or c
  SITE (8929): n equals a,t,g, or c
  SITE (8930): n equals a,t,g, or c
  SITE (8931): n equals a,t,g, or c
  SITE (8932): n equals a,t,g, or c
  SITE (8933): n equals a,t,g, or c
  SITE (8934): n equals a,t,g, or c
  SITE (8935): n equals a,t,g, or c
  SITE (8936): n equals a,t,g, or c
  SITE (8937): n equals a,t,g, or c
  SITE (8938): n equals a,t,g, or c
  SITE (8939): n equals a,t,g, or c
  SITE (8940): n equals a,t,g, or c
  SITE (8941): n equals a,t,g, or c
  SITE (8942): n equals a,t,g, or c
  SITE (8943): n equals a,t,g, or c
  SITE (8944): n equals a,t,g, or c
  SITE (8945): n equals a,t,g, or c
  SITE (8946): n equals a,t,g, or c
  SITE (8947): n equals a,t,g, or c
  SITE (8948): n equals a,t,g, or c
  SITE (8949): n equals a,t,g, or c
  SITE (8950): n equals a,t,g, or c
  SITE (8951): n equals a,t,g, or c
  SITE (8952): n equals a,t,g, or c
  SITE (8953): n equals a,t,g, or c
  SITE (8954): n equals a,t,g, or c
  SITE (8955): n equals a,t,g, or c
  SITE (8956): n equals a,t,g, or c
  SITE (8957): n equals a,t,g, or c
  SITE (8958): n equals a,t,g, or c
  SITE (8959): n equals a,t,g, or c
  SITE (8960): n equals a,t,g, or c
  SITE (8961): n equals a,t,g, or c
  SITE (8962): n equals a,t,g, or c
  SITE (8963): n equals a,t,g, or c
  SITE (8964): n equals a,t,g, or c
  SITE (8965): n equals a,t,g, or c
  SITE (8966): n equals a,t,g, or c
  SITE (8967): n equals a,t,g, or c
  SITE (8968): n equals a,t,g, or c
  SITE (8969): n equals a,t,g, or c
  SITE (8970): n equals a,t,g, or c
  SITE (8971): n equals a,t,g, or c
  SITE (8972): n equals a,t,g, or c
  SITE (8973): n equals a,t,g, or c
  SITE (8974): n equals a,t,g, or c
  SITE (8975): n equals a,t,g, or c
  SITE (8976): n equals a,t,g, or c
  SITE (8977): n equals a,t,g, or c
  SITE (8978): n equals a,t,g, or c
  SITE (8979): n equals a,t,g, or c
  SITE (8980): n equals a,t,g, or c
  SITE (8981): n equals a,t,g, or c
  SITE (8982): n equals a,t,g, or c
  SITE (8983): n equals a,t,g, or c
  SITE (8984): n equals a,t,g, or c
  SITE (8985): n equals a,t,g, or c
  SITE (8986): n equals a,t,g, or c
  SITE (8987): n equals a,t,g, or c
  SITE (8988): n equals a,t,g, or c
  SITE (8989): n equals a,t,g, or c
  SITE (8990): n equals a,t,g, or c
  SITE (8991): n equals a,t,g, or c
  SITE (8992): n equals a,t,g, or c
  SITE (8993): n equals a,t,g, or c
  SITE (8994): n equals a,t,g, or c
  SITE (8995): n equals a,t,g, or c
  SITE (8996): n equals a,t,g, or c
  SITE (8997): n equals a,t,g, or c
  SITE (8998): n equals a,t,g, or c
  SITE (8999): n equals a,t,g, or c
  SITE (9000): n equals a,t,g, or c
  SITE (9001): n equals a,t,g, or c
  SITE (9002): n equals a,t,g, or c
  SITE (9003): n equals a,t,g, or c
  SITE (9004): n equals a,t,g, or c
  SITE (9005): n equals a,t,g, or c
  SITE (9006): n equals a,t,g, or c
  SITE (9007): n equals a,t,g, or c
  SITE (9008): n equals a,t,g, or c
  SITE (9009): n equals a,t,g, or c
  SITE (9010): n equals a,t,g, or c
  SITE (9011): n equals a,t,g, or c
  SITE (9012): n equals a,t,g, or c
  SITE (9013): n equals a,t,g, or c
  SITE (9014): n equals a,t,g, or c
  SITE (9015): n equals a,t,g, or c
  SITE (9016): n equals a,t,g, or c
  SITE (9017): n equals a,t,g, or c
  SITE (9018): n equals a,t,g, or c
  SITE (9019): n equals a,t,g, or c
  SITE (9020): n equals a,t,g, or c
  SITE (9021): n equals a,t,g, or c
  SITE (9022): n equals a,t,g, or c
  SITE (9023): n equals a,t,g, or c
  SITE (9024): n equals a,t,g, or c
  SITE (9025): n equals a,t,g, or c
  SITE (9026): n equals a,t,g, or c
  SITE (9027): n equals a,t,g, or c
  SITE (9028): n equals a,t,g, or c
  SITE (9029): n equals a,t,g, or c
  SITE (9030): n equals a,t,g, or c
  SITE (9031): n equals a,t,g, or c
  SITE (9032): n equals a,t,g, or c
  SITE (9033): n equals a,t,g, or c
  SITE (9034): n equals a,t,g, or c
  SITE (9035): n equals a,t,g, or c
  SITE (9036): n equals a,t,g, or c
  SITE (9037): n equals a,t,g, or c
  SITE (9038): n equals a,t,g, or c
  SITE (9039): n equals a,t,g, or c
  SITE (9040): n equals a,t,g, or c
  SITE (9041): n equals a,t,g, or c
  SITE (9042): n equals a,t,g, or c
  SITE (9043): n equals a,t,g, or c
  SITE (9044): n equals a,t,g, or c
  SITE (9045): n equals a,t,g, or c
  SITE (9046): n equals a,t,g, or c
  SITE (9047): n equals a,t,g, or c
  SITE (9048): n equals a,t,g, or c
  SITE (9049): n equals a,t,g, or c
  SITE (9050): n equals a,t,g, or c
  SITE (9051): n equals a,t,g, or c
  SITE (9052): n equals a,t,g, or c
  SITE (9053): n equals a,t,g, or c
  SITE (9054): n equals a,t,g, or c
  SITE (9055): n equals a,t,g, or c
  SITE (9056): n equals a,t,g, or c
  SITE (9057): n equals a,t,g, or c
  SITE (9058): n equals a,t,g, or c
  SITE (9059): n equals a,t,g, or c
  SITE (9060): n equals a,t,g, or c
  SITE (9061): n equals a,t,g, or c
  SITE (9062): n equals a,t,g, or c
  SITE (9063): n equals a,t,g, or c
  SITE (9064): n equals a,t,g, or c
  SITE (9065): n equals a,t,g, or c
  SITE (9066): n equals a,t,g, or c
  SITE (9067): n equals a,t,g, or c
  SITE (9068): n equals a,t,g, or c
  SITE (9069): n equals a,t,g, or c
  SITE (9070): n equals a,t,g, or c
  SITE (9071): n equals a,t,g, or c
  SITE (9072): n equals a,t,g, or c
  SITE (9073): n equals a,t,g, or c
  SITE (9074): n equals a,t,g, or c
  SITE (9075): n equals a,t,g, or c
  SITE (9076): n equals a,t,g, or c
  SITE (9077): n equals a,t,g, or c
  SITE (9078): n equals a,t,g, or c
  SITE (9079): n equals a,t,g, or c
  SITE (9080): n equals a,t,g, or c
  SITE (9081): n equals a,t,g, or c
  SITE (9082): n equals a,t,g, or c
  SITE (9083): n equals a,t,g, or c
  SITE (9084): n equals a,t,g, or c
  SITE (9085): n equals a,t,g, or c
  SITE (9086): n equals a,t,g, or c
  SITE (9087): n equals a,t,g, or c
  SITE (9088): n equals a,t,g, or c
  SITE (9089): n equals a,t,g, or c
  SITE (9090): n equals a,t,g, or c
  SITE (9091): n equals a,t,g, or c
  SITE (9092): n equals a,t,g, or c
  SITE (9093): n equals a,t,g, or c
  SITE (9094): n equals a,t,g, or c
  SITE (9095): n equals a,t,g, or c
  SITE (9096): n equals a,t,g, or c
  SITE (9097): n equals a,t,g, or c
  SITE (9098): n equals a,t,g, or c
  SITE (9099): n equals a,t,g, or c
  SITE (9100): n equals a,t,g, or c
  SITE (9101): n equals a,t,g, or c
  SITE (9102): n equals a,t,g, or c
  SITE (9103): n equals a,t,g, or c
  SITE (9104): n equals a,t,g, or c
  SITE (9105): n equals a,t,g, or c
  SITE (9106): n equals a,t,g, or c
  SITE (9107): n equals a,t,g, or c
  SITE (9108): n equals a,t,g, or c
  SITE (9109): n equals a,t,g, or c
  SITE (9110): n equals a,t,g, or c
  SITE (9111): n equals a,t,g, or c
  SITE (9112): n equals a,t,g, or c
  SITE (9113): n equals a,t,g, or c
  SITE (9114): n equals a,t,g, or c
  SITE (9115): n equals a,t,g, or c
  SITE (9116): n equals a,t,g, or c
  SITE (9117): n equals a,t,g, or c
  SITE (9118): n equals a,t,g, or c
  SITE (9119): n equals a,t,g, or c
  SITE (9120): n equals a,t,g, or c
  SITE (9121): n equals a,t,g, or c
  SITE (9122): n equals a,t,g, or c
  SITE (9123): n equals a,t,g, or c
  SITE (9124): n equals a,t,g, or c
  SITE (9125): n equals a,t,g, or c
  SITE (9126): n equals a,t,g, or c
  SITE (9127): n equals a,t,g, or c
  SITE (9128): n equals a,t,g, or c
  SITE (9129): n equals a,t,g, or c
  SITE (9130): n equals a,t,g, or c
  SITE (9131): n equals a,t,g, or c
  SITE (9132): n equals a,t,g, or c
  SITE (9133): n equals a,t,g, or c
  SITE (9134): n equals a,t,g, or c
  SITE (9135): n equals a,t,g, or c
  SITE (9136): n equals a,t,g, or c
  SITE (9137): n equals a,t,g, or c
  SITE (9138): n equals a,t,g, or c
  SITE (9139): n equals a,t,g, or c
  SITE (9140): n equals a,t,g, or c
  SITE (9141): n equals a,t,g, or c
  SITE (9142): n equals a,t,g, or c
  SITE (9143): n equals a,t,g, or c
  SITE (9144): n equals a,t,g, or c
  SITE (9145): n equals a,t,g, or c
  SITE (9146): n equals a,t,g, or c
  SITE (9147): n equals a,t,g, or c
  SITE (9148): n equals a,t,g, or c
  SITE (9149): n equals a,t,g, or c
  SITE (9150): n equals a,t,g, or c
  SITE (9151): n equals a,t,g, or c
  SITE (9152): n equals a,t,g, or c
  SITE (9153): n equals a,t,g, or c
  SITE (9154): n equals a,t,g, or c
  SITE (9155): n equals a,t,g, or c
  SITE (9156): n equals a,t,g, or c
  SITE (9157): n equals a,t,g, or c
  SITE (9158): n equals a,t,g, or c
  SITE (9159): n equals a,t,g, or c
  SITE (9160): n equals a,t,g, or c
  SITE (9161): n equals a,t,g, or c
  SITE (9162): n equals a,t,g, or c
  SITE (9163): n equals a,t,g, or c
  SITE (9164): n equals a,t,g, or c
  SITE (9165): n equals a,t,g, or c
  SITE (9166): n equals a,t,g, or c
  SITE (9167): n equals a,t,g, or c
  SITE (9168): n equals a,t,g, or c
  SITE (9169): n equals a,t,g, or c
  SITE (9170): n equals a,t,g, or c
  SITE (9171): n equals a,t,g, or c
  SITE (9172): n equals a,t,g, or c
  SITE (9173): n equals a,t,g, or c
  SITE (9174): n equals a,t,g, or c
  SITE (9175): n equals a,t,g, or c
  SITE (9176): n equals a,t,g, or c
  SITE (9177): n equals a,t,g, or c
  SITE (9178): n equals a,t,g, or c
  SITE (9179): n equals a,t,g, or c
  SITE (9180): n equals a,t,g, or c
  SITE (9181): n equals a,t,g, or c
  SITE (9182): n equals a,t,g, or c
  SITE (9183): n equals a,t,g, or c
  SITE (9184): n equals a,t,g, or c
  SITE (9185): n equals a,t,g, or c
  SITE (9186): n equals a,t,g, or c
  SITE (9187): n equals a,t,g, or c
  SITE (9188): n equals a,t,g, or c
  SITE (9189): n equals a,t,g, or c
  SITE (9190): n equals a,t,g, or c
  SITE (9191): n equals a,t,g, or c
  SITE (9192): n equals a,t,g, or c
  SITE (9193): n equals a,t,g, or c
  SITE (9194): n equals a,t,g, or c
  SITE (9195): n equals a,t,g, or c
  SITE (9196): n equals a,t,g, or c
  SITE (9197): n equals a,t,g, or c
  SITE (9198): n equals a,t,g, or c
  SITE (9199): n equals a,t,g, or c
  SITE (9200): n equals a,t,g, or c
  SITE (9201): n equals a,t,g, or c
  SITE (9202): n equals a,t,g, or c
  SITE (9203): n equals a,t,g, or c
  SITE (9204): n equals a,t,g, or c
  SITE (9205): n equals a,t,g, or c
  SITE (9206): n equals a,t,g, or c
  SITE (9207): n equals a,t,g, or c
  SITE (9208): n equals a,t,g, or c
  SITE (9209): n equals a,t,g, or c
  SITE (9210): n equals a,t,g, or c
  SITE (9211): n equals a,t,g, or c
  SITE (9212): n equals a,t,g, or c
  SITE (9213): n equals a,t,g, or c
  SITE (9214): n equals a,t,g, or c
  SITE (9215): n equals a,t,g, or c
  SITE (9216): n equals a,t,g, or c
  SITE (9217): n equals a,t,g, or c
  SITE (9218): n equals a,t,g, or c
  SITE (9219): n equals a,t,g, or c
  SITE (9220): n equals a,t,g, or c
  SITE (9221): n equals a,t,g, or c
  SITE (9222): n equals a,t,g, or c
  SITE (9223): n equals a,t,g, or c
  SITE (9224): n equals a,t,g, or c
  SITE (9225): n equals a,t,g, or c
  SITE (9226): n equals a,t,g, or c
  SITE (9227): n equals a,t,g, or c
  SITE (9228): n equals a,t,g, or c
  SITE (9229): n equals a,t,g, or c
  SITE (9230): n equals a,t,g, or c
  SITE (9231): n equals a,t,g, or c
  SITE (9232): n equals a,t,g, or c
  SITE (9233): n equals a,t,g, or c
  SITE (9234): n equals a,t,g, or c
  SITE (9235): n equals a,t,g, or c
  SITE (9236): n equals a,t,g, or c
  SITE (9237): n equals a,t,g, or c
  SITE (9238): n equals a,t,g, or c
  SITE (9239): n equals a,t,g, or c
  SITE (9240): n equals a,t,g, or c
  SITE (9241): n equals a,t,g, or c
  SITE (9242): n equals a,t,g, or c
  SITE (9243): n equals a,t,g, or c
  SITE (9244): n equals a,t,g, or c
  SITE (9245): n equals a,t,g, or c
  SITE (9246): n equals a,t,g, or c
  SITE (9247): n equals a,t,g, or c
  SITE (9248): n equals a,t,g, or c
  SITE (9249): n equals a,t,g, or c
  SITE (9250): n equals a,t,g, or c
  SITE (9251): n equals a,t,g, or c
  SITE (9252): n equals a,t,g, or c
  SITE (9253): n equals a,t,g, or c
  SITE (9254): n equals a,t,g, or c
  SITE (9255): n equals a,t,g, or c
  SITE (9256): n equals a,t,g, or c
  SITE (9257): n equals a,t,g, or c
  SITE (9258): n equals a,t,g, or c
  SITE (9259): n equals a,t,g, or c
  SITE (9260): n equals a,t,g, or c
  SITE (9261): n equals a,t,g, or c
  SITE (9262): n equals a,t,g, or c
  SITE (9263): n equals a,t,g, or c
  SITE (9264): n equals a,t,g, or c
  SITE (9265): n equals a,t,g, or c
  SITE (9266): n equals a,t,g, or c
  SITE (9267): n equals a,t,g, or c
  SITE (9268): n equals a,t,g, or c
  SITE (9269): n equals a,t,g, or c
  SITE (9270): n equals a,t,g, or c
  SITE (9271): n equals a,t,g, or c
  SITE (9272): n equals a,t,g, or c
  SITE (9273): n equals a,t,g, or c
  SITE (9274): n equals a,t,g, or c
  SITE (9275): n equals a,t,g, or c
  SITE (9276): n equals a,t,g, or c
  SITE (9277): n equals a,t,g, or c
  SITE (9278): n equals a,t,g, or c
  SITE (9279): n equals a,t,g, or c
  SITE (9280): n equals a,t,g, or c
  SITE (9281): n equals a,t,g, or c
  SITE (9282): n equals a,t,g, or c
  SITE (9283): n equals a,t,g, or c
  SITE (9284): n equals a,t,g, or c
  SITE (9285): n equals a,t,g, or c
  SITE (9286): n equals a,t,g, or c
  SITE (9287): n equals a,t,g, or c
  SITE (9288): n equals a,t,g, or c
  SITE (9289): n equals a,t,g, or c
  SITE (9290): n equals a,t,g, or c
  SITE (9291): n equals a,t,g, or c
  SITE (9292): n equals a,t,g, or c
  SITE (9293): n equals a,t,g, or c
  SITE (9294): n equals a,t,g, or c
  SITE (9295): n equals a,t,g, or c
  SITE (9296): n equals a,t,g, or c
  SITE (9297): n equals a,t,g, or c
  SITE (9298): n equals a,t,g, or c
  SITE (9299): n equals a,t,g, or c
  SITE (9300): n equals a,t,g, or c
  SITE (9301): n equals a,t,g, or c
  SITE (9302): n equals a,t,g, or c
  SITE (9303): n equals a,t,g, or c
  SITE (9304): n equals a,t,g, or c
  SITE (9305): n equals a,t,g, or c
  SITE (9306): n equals a,t,g, or c
  SITE (9307): n equals a,t,g, or c
  SITE (9308): n equals a,t,g, or c
  SITE (9309): n equals a,t,g, or c
  SITE (9310): n equals a,t,g, or c
  SITE (9311): n equals a,t,g, or c
  SITE (9312): n equals a,t,g, or c
  SITE (9313): n equals a,t,g, or c
  SITE (9314): n equals a,t,g, or c
  SITE (9315): n equals a,t,g, or c
  SITE (9316): n equals a,t,g, or c
  SITE (9317): n equals a,t,g, or c
  SITE (9318): n equals a,t,g, or c
  SITE (9319): n equals a,t,g, or c
  SITE (9320): n equals a,t,g, or c
  SITE (9321): n equals a,t,g, or c
  SITE (9322): n equals a,t,g, or c
  SITE (9323): n equals a,t,g, or c
  SITE (9324): n equals a,t,g, or c
  SITE (9325): n equals a,t,g, or c
  SITE (9326): n equals a,t,g, or c
  SITE (9327): n equals a,t,g, or c
  SITE (9328): n equals a,t,g, or c
  SITE (9329): n equals a,t,g, or c
  SITE (9330): n equals a,t,g, or c
  SITE (9331): n equals a,t,g, or c
  SITE (9332): n equals a,t,g, or c
  SITE (9333): n equals a,t,g, or c
  SITE (9334): n equals a,t,g, or c
  SITE (9335): n equals a,t,g, or c
  SITE (9336): n equals a,t,g, or c
  SITE (9337): n equals a,t,g, or c
  SITE (9338): n equals a,t,g, or c
  SITE (9339): n equals a,t,g, or c
  SITE (9340): n equals a,t,g, or c
  SITE (9341): n equals a,t,g, or c
  SITE (9342): n equals a,t,g, or c
  SITE (9343): n equals a,t,g, or c
  SITE (9344): n equals a,t,g, or c
  SITE (9345): n equals a,t,g, or c
  SITE (9346): n equals a,t,g, or c
  SITE (9347): n equals a,t,g, or c
  SITE (9348): n equals a,t,g, or c
  SITE (9349): n equals a,t,g, or c
  SITE (9350): n equals a,t,g, or c
  SITE (9351): n equals a,t,g, or c
  SITE (9352): n equals a,t,g, or c
  SITE (9353): n equals a,t,g, or c
  SITE (9354): n equals a,t,g, or c
  SITE (9355): n equals a,t,g, or c
  SITE (9356): n equals a,t,g, or c
  SITE (9357): n equals a,t,g, or c
  SITE (9358): n equals a,t,g, or c
  SITE (9359): n equals a,t,g, or c
  SITE (9360): n equals a,t,g, or c
  SITE (9361): n equals a,t,g, or c
  SITE (9362): n equals a,t,g, or c
  SITE (9363): n equals a,t,g, or c
  SITE (9364): n equals a,t,g, or c
  SITE (9365): n equals a,t,g, or c
  SITE (9366): n equals a,t,g, or c
  SITE (9367): n equals a,t,g, or c
  SITE (9368): n equals a,t,g, or c
  SITE (9369): n equals a,t,g, or c
  SITE (9370): n equals a,t,g, or c
  SITE (9371): n equals a,t,g, or c
  SITE (9372): n equals a,t,g, or c
  SITE (9373): n equals a,t,g, or c
  SITE (9374): n equals a,t,g, or c
  SITE (9375): n equals a,t,g, or c
  SITE (9376): n equals a,t,g, or c
  SITE (9377): n equals a,t,g, or c
  SITE (9378): n equals a,t,g, or c
  SITE (9379): n equals a,t,g, or c
  SITE (9380): n equals a,t,g, or c
  SITE (9381): n equals a,t,g, or c
  SITE (9382): n equals a,t,g, or c
  SITE (9383): n equals a,t,g, or c
  SITE (9384): n equals a,t,g, or c
  SITE (9385): n equals a,t,g, or c
  SITE (9386): n equals a,t,g, or c
  SITE (9387): n equals a,t,g, or c
  SITE (9388): n equals a,t,g, or c
  SITE (9389): n equals a,t,g, or c
  SITE (9390): n equals a,t,g, or c
  SITE (9391): n equals a,t,g, or c
  SITE (9392): n equals a,t,g, or c
  SITE (9393): n equals a,t,g, or c
  SITE (9394): n equals a,t,g, or c
  SITE (9395): n equals a,t,g, or c
  SITE (9396): n equals a,t,g, or c
  SITE (9397): n equals a,t,g, or c
  SITE (9398): n equals a,t,g, or c
  SITE (9399): n equals a,t,g, or c
  SITE (9400): n equals a,t,g, or c
  SITE (9401): n equals a,t,g, or c
  SITE (9402): n equals a,t,g, or c
  SITE (9403): n equals a,t,g, or c
  SITE (9404): n equals a,t,g, or c
  SITE (9405): n equals a,t,g, or c
  SITE (9406): n equals a,t,g, or c
  SITE (9407): n equals a,t,g, or c
  SITE (9408): n equals a,t,g, or c
  SITE (9409): n equals a,t,g, or c
  SITE (9410): n equals a,t,g, or c
  SITE (9411): n equals a,t,g, or c
  SITE (9412): n equals a,t,g, or c
  SITE (9413): n equals a,t,g, or c
  SITE (9414): n equals a,t,g, or c
  SITE (9415): n equals a,t,g, or c
  SITE (9416): n equals a,t,g, or c

SEQ ID NO: 11554 - DNA, 1694 bp, Homo sapiens
atttaatagctctttgaacctaattcagttcttttcatggtcttacctcaatgcaggtccaagacaaagtttctaggcctgttccttgctatttgccccagtgtagctctccagacaaaatggccttctttcacttactgaaaggcactgggttatttcctccctcgctgtcttcatctgtgctatgctttgtggctgatctttttgcctggactattcaccgttctgctcttctcttcctcttgcccctctccgtcttttcctgctaattccagattacctttaagatcttagtttggatgtcattgtcctagggacacccatcttgacacctatattatattaggttaatttttccagaatgtgctttcataagacaatctatacttctcagcatttaacataattgtaatgaattaattacttgtgtaattattctttaatgcctgtcttcttcactagattgtaagccttctgaaggcagagaccacatctgtcttctattgctctggcttctaggacagtgcctggaaagtagttgtttagccataagtatttattgaatgaatacaagggctgtgctgtgctaggttctcattcattcagcagacatctgtggagcacctgctctgtgccagccccttggcatgagaggaaggtgggacataccaagattaacaaatcgaggaaatcgcatctgctagaggagcaggaacatagactcctgtaactgtagcccatggcaggaagtggagagtaaatatggagatgaagttagaaaggcaagtaggtggtttttgatgctgctttcttgttcaataaattgagtacctgctgtgtgccggggctgggcattcagtagtgaagacgagagaattcctaccttcaggaagattatagtctagcagggaaaagaagcaaagaaaccttttcctcctaggccaacaggtatttatggagagagtaggtgagcactttgaggtggtccttttggtctaagaatctgtattgagacttcacacttcattagacctgggcgaggcagttaaaaatactctcattaaccagagtgaaattccaagggaaaaggaagggaggataaggaacattgtttcctctcattgcatctgtggttaattcaggctctgaaatccttcccatgggtcatggacctatggtttcctatcctaagttggaatatgtgcagttaaatacctaaccattctcagtgtgccattgtctcatttgattcccacatagccctctgaggtgcacaggcaggaatgcctatttttcagctgggcaaacaggctctggaaggcagacttgcccaaggtgacacagtttgaactgggaagggatcagaaatctctctggctggctgggtgcggtggctcatgcctgtaatcccagcactttgggaggccgaggtgggcggatcacgaggtcaggagtttgagaccagcctgaccaacatggtaaaaccccacctctactaaaaatacaaaaaaaaattagccgggcatggtggtgcacgcctgtaatcccagctactcaggaggctgaggcaggagaatcacttgaccccgggaggcagaggttgcagtgagccgaggccaagatagtcccattgtactccagcctgggcaacagagcgagactctgtctcaaaaaaaaaaaaaaaaaaaaagaaa

SEQ ID NO: 11555 - DNA, 5775 bp, Homo sapiens; identical to SEQ ID NO: 7562

SEQ ID NO: 11556 - DNA, 738 bp, Homo sapiens; identical to SEQ ID NO: 7563

SEQ ID NO: 11557 - DNA, 1707 bp, Homo sapiens
tctgatgatgtgtgtatttcagggaccggtcagcggcaaccacctatttctgcaagcaggccccagaagagaaccagcccaccaatgaatcgctgcaggaggaatggatccctttccgtcgagttgaggaaggggagaaggaatttcatgttcggaatccccaggtaagtttgtgccagttggggagggagagttaatgagcctgttctctccctactatatttgatagcaagacttttagttaaccctctcttgaaatgtcagtcatagtgggtctgagtttgccacatcagtggaaatacataggatattaatcaggactcttgcaattgctgtgacagaaccccaacttaggcttacctaggcaaaaaagggaatgatgggctcatataagtagactgtaggaagagaaggacaattggaaccagacttaaatgccgtcaggatttgttcttcatcctcatttctgtctctctcttggttggtgggtctcatcttcaaactggcctactttccaaggttagaaccataagttgttttttttttttgtttttgagacaggatcttgctctgtcgcccagattggagtgcagtggcatgatcatggctcactgcagtctcaatcttctgggctcaagagatcttcctacctcagtgtcctgagtagctgggactacacacatgcaccactatgcgcagctaatttttttttatttttatttttttgggacagagtctcactctgtcacccaggctagagtgcagtggcaccaacacggctcaatggcaacctcaatctcctaggctcgagtgaccctcctacctcagcctcctgagtagctgggactacaggcacacaccaccacacaattttgtttttttagtagagacggggtcttgctatgttgcccaggctggtctcaaactcctgaactcaagcgatcctcccactgtggccttccaaagtgctggagatataggtgtgagccacggcacccagtcagaaccacagctcttgacagctctgaccttgtgtgtgttcagccttgtcacctatgagaataggactgtgtttgagttgctccctcagtcccttaccctggtgccaaactgcagtttgaaaaatcctggagagggattccaggcctggggagaagtaacaaaatgggaagttcccaccagaaatacattgttagaatgggagtgggaaggccatcctcaaaagccagggttaacaagagaaggaaagggggtaagtgcttgggagacaaaaacaatagatgtctgatgtaaatgggcagtggaatccagtactggtttgctaataacagcactcttaattccttttgtttttaaaatgctttcatgtacatcatctcattggatccttctgacagccctgtggttatgtagttagagtcagaacaacagggctgagtctgttctaatgttaggcagtgcttatgtgagctgcaaggtagctgagccttctcaggacatggcacccaaggtgcttgctgaggcgtgggtgggtagactatctgtgcattcttccttggctctgtacgtgagggagattctcgctggacagttgtggagtgttccagtcccactgggactgtctctgttgcaggtgcatcagcgggtaagcgagtgtttacgggtgttgaagatcctgcaagaggtcactgctgggcagactgtctt

SEQ ID NO: 11558 - DNA, 1105 bp, Homo sapiens
gggattataggcatgagccaccgtgcctggcctattctgtagtcttttgtatattacttaggattttctacaaatgcttatgtcatcagataataaagatagttttacttttctcttgcctgttcttatttcttttatttgtttttcttacctcactgtactgggaagtaacaccagtataatagtgaataaaaatggtatgagcaggtgcacatggctttttcttgatcttggaagggacttttttatactaacattaattttttaaaaaaaaattagtcttatttttcaacctgacttaagtcatttaataattactaggaaccaagattttgttgttatttgtcagcatagtaatccttttaagattatattttaaatttttttagaatgaagaaaatgtgcctttttatatgttatttggacttttgataaggaggaatcgaagaattgcatttgagaatattctcagagttcaattataaatctttttagaagaaatttaaagaaaatattaatagtaattctatcagatattcatcaatacatataatttgatttggtttaattaggtaaggtataggatgcaagaacaacaaaatagaattgataggtgtaattatagaaagatactggtagctgtgtgttgttttttctcttagacacagacacagaatttaacacctggaaagcagcatggaactgttagcagtttatatatatataatagtggtcattaaagaagaaaataaatgtttgtatgtattttgtttataattttagaagtacagttcttttaagcctgcacaataagctttttaagaaaggtatatataagtttaacttggccggcacggtggtggcaggcagatcacttgaggtcaggagttcgagaccagcttaaccaacatgctgaaaccctgtctctactgaaaatataaaaattagctaggtgtggtggcacgctgtaattccagctactctggaggctgaggcagaattgcttgagcctgggaggcagaggttgcagtgagctgagatcactccaccctactgcagcctgggtgacagagcgagactctgtctcaaaaaaaaaaaaaaaaaa

SEQ ID NO: 11559 - DNA, 1105 bp, Homo sapiens; identical to SEQ ID NO: 11558

SEQ ID NO: 11560 - DNA, 119 bp, Homo sapiens
ctgggctcaagggatcctcctacctcagcttcccaaagtgctgggattataggcatgagccattatgcctggcccaaagttctttatattttctagatgttaattcttcatcagatagg

SEQ ID NO: 11561 - DNA, 119 bp, Homo sapiens; identical to SEQ ID NO: 11560

SEQ ID NO: 11562 - DNA, 102 bp, Homo sapiens; identical to SEQ ID NO: 5404

SEQ ID NO: 11563 - DNA, 93 bp, Homo sapiens; identical to SEQ ID NO: 5411

SEQ ID NO: 11564 - DNA, 607 bp, Homo sapiens
gacagattcattttgcctgatgtcaaattccataggaatggaatctcatagtatctatcatttgcgtttggcttcttatattcaacatagtgtttttgaggttttttttttaatgtgcttgtaccagtttattttccttttttattggttagtagtattttatttggaatgtaccacagtttatccattcacctcttgatggacatttgagttgtttgtcatttttggcaaaacaagtatttatctcaagaagaatgtgactggagtgagacctagccattggtgggtaaaaaactagcaccaaaggcggggcgcggtggctcaagcctgtaatcccagcactttgggaggcaaggcgggcggatcacgagaccaggagatcgagaccatcctggctaacacggtaaaaccccatctctactaaaaatacaaaaaattagccagggcgccttggcaggcgcctgtagtcccagctacaggctgaggcaggagaatgacgtgaatccgtgaggcagagcttgcagtgagctgagatcgcgccactgcactccagcctgggtgacagagcaaaactccgtctaaaaaaaaaaaaaaaaaaaaaaaaact

SEQ ID NO: 11565 - DNA, 101 bp, Homo sapiens
gggagcagagcttgcagtgagcagagatcacgccactgcactccagcctgggtgacagagcaagactctgtctcaaaaaaaaaaaaaaaaaaaaaaaagaa

SEQ ID NO: 11566 - DNA, 162 bp, Homo sapiens; identical to SEQ ID NO: 5244

SEQ ID NO: 11567 - DNA, 153 bp, Homo sapiens; identical to SEQ ID NO: 5246

SEQ ID NO: 11568 - DNA, 142 bp, Homo sapiens; identical to SEQ ID NO: 5249

SEQ ID NO: 11569 - DNA, 110 bp, Homo sapiens
agatggagtctcgctctgtcaccaggctggagtgcagtggcccgatctcggctcaccgcaatctctgcctcccgggttcaagtgatcctcctgcctcagcctcctgagta

SEQ ID NO: 11570 - DNA, 368 bp, Homo sapiens; identical to SEQ ID NO: 5252

SEQ ID NO: 11571 - DNA, 4704 bp, Homo sapiens; identical to SEQ ID NO: 5253

SEQ ID NO: 11572 - DNA, 2295 bp, Homo sapiens
gcgcaaattcgtggatcgctccgctgaatccgcccgcgcgtcgccgccgtcgtcgccgccccccgtcccggcccccctgggttccctcagcccagccctgtccagcccggttcccgggaggatgaagttcgtgtacaaagaagagcatccgttcgagaagcgccgctctgagggcgagaagatccgaaagaaatacccggaccgggtgccggtgaggacagtagccagggccgagggcgcgggacgcttacgctgacgccacagcctggccttggatctgggacaggcagcgcagggatcaggctgctggctgtggtggggttggcagcgagcctgaaactgctgtccttgggacccaggatgaaaggagtggggtagtggtggatgtggggttgagagggatgtggacaggagagagaaaccttagcatttgaggccttagagagtttgacagcctgagcttcaaatggtcatccccccagctagctaaggttgcgagattgaatcactagtcgacccaaacaagtcacctccgtctaagatagttgtttatggtgacgccctattgggggatggatcctggatatttaaatgagctccagtcagtgaggtcaggatctctgggactcagtgctgcaccgcgtgtacaaagacaaagagatgaatctggggtagatttaggtgctaggaatattgtttcttgagttcttgacaggtgcagcttcggggctgcattccttctgtctcctaattttcatctctttatcaggtgatagtagaaaaggctcccaaagctcggataggagacctggacaaaaagaaatacctggtgccttctgatctcacaggtgggaacctgatccaagactcaggcttgcttcctgtgggtgggagtgcagtctctgcgggaggaggctccacctagcagctgttcttttgagggcatttttgacctctgtgactttcttgcatcttgtatcttttgcagttggtcagttctacttcttgatccggaagcgaattcatctccgagctgaggatgccttgtttttctttgtcaacaatgtcattccacccaccagtgccacaatgggtcagctgtaccaggtatggtgactgggaagtggtggaggctttggagaggaatcttggaagagcgtgaggggaagaaagtgttgttacatcagtagttttggactagcttcctggcttgccttaaagtttcataatagccgtgggttgggggtttggacagaacagtaggagtagagagaaggaaagagaacagtgagctagagaaactatctgttcgggactcttcccagtccccctccccattccaaagcagcagaaaacagtttgaggcctttttgcccaggactgcagagattatactgctcgtgtggtaggccttggagtcagtgaaggagtcaggcaatggtttgtggttctagaagaacgtgtctgggtcgtggttggtttaagttactggagcccagttgctgaacagttttctgctttcatcccaggaacaccatgaagaagacttctttctctacattgcctacagtgacgaaagtgtctacggtctgtgaagctgctgcccctgagctggaggggggtctcattctacaaagagagaggtggcccccctttcttgacctcctcctccttcaagctcaaacaccacctcccttattcaggaccggcacttcttaatgtttgtggctttctctccagcctctcttaggaggggtaatggtggagttggcatcttgtaactctcctttctcctttcttcccctttctctgcccgcctttcccatcctgctgtagacttcttgattgtcagtctgtgtcacatccagtgattgttttggtttctgttccctttctgactgcccaaggggctcagaaccccagcaatcccttcctttcactaccttcttttttgggggtagttggaagggactgaaattgtggggggaaggtaggaggcacatcaataaagaggaaaccaccaagctgaactgaattttgccttgtgttgctcccctcgtcccgctgattttaagtctttccaaggtgtcagtgggtttcagtggtggggaaagaagagtactgggtacaagctggagggatagaagtatattttggtttattctgttcatgttgggcttttccctgtctgcaaaaagagggtgcttttgttgtgatggaatggaatactgaggattatttcttgaaactttagttttataacacgcatgtgaaactaaatgttaaaaatgctca

SEQ ID NO: 11573 - DNA, 2299 bp, Homo sapiens
gcgcaaattcgtggatcgctccgctgaatccgcccgcgcgtcgccgccgtcgtcgccgccccccgtcccggcccccctgggttccctcagcccagccctgtccagcccggttcccgggaggatgaagttcgtgtacaaagaagagcatccgttcgagaagcgccgctctgagggcgagaagatccgaaagaaatacccggaccgggtgccggtgaggacagtagccagggccgagggcgcgggacgcttacgctgacgccacagcctggccttggatctgggacaggcagcgcagggatcaggctgctggctgtggtggggttggcagcgagcctgaaactgctgtccttgggacccaggatgaaaggagtggggtagtggtggatgtggggttgagagggatgtggacaggagagagaaaccttagcatttgaggccttagagagtttgacagcctgagcttcaaatggtcatccccccagctagctaaggttgcgagattgaatcactagtcgacccaaacaagtcacctccgtctgattaagatagttgtttatggtgacgccctattgggggatggatcctggatatttaaatgagctccagtcagtgaggtcaggatctctgggactcagtgctgcaccgcgtgtacaaagacaaagagatgaatctggggtagatttaggtgctaggaatattgtttcttgagttcttgacaggtgcagcttcggggctgcattccttctgtctcctaattttcatctctttatcaggtgatagtagaaaaggctcccaaagctcggataggagacctggacaaaaagaaatacctggtgccttctgatctcacaggtgggaacctgatccaagactcaggcttgcttcctgtgggtgggagtgcagtctctgcgggaggaggctccacctagcagctgttcttttgagggcatttttgacctctgtgactttcttgcatcttgtatcttttgcagttggtcagttctacttcttgatccggaagcgaattcatctccgagctgaggatgccttgtttttctttgtcaacaatgtcattccacccaccagtgccacaatgggtcagctgtaccaggtatggtgactgggaagtggtggaggctttggagaggaatcttggaagagcgtgaggggaagaaagtgttgttacatcagtagttttggactagcttcctggcttgccttaaagtttcataatagccgtgggttgggggtttggacagaacagtaggagtagagagaaggaaagagaacagtgagctagagaaactatctgttcgggactcttcccagtccccctccccattccaaagcagcagaaaacagtttgaggcctttttgcccaggactgcagagattatactgctcgtgtggtaggccttggagtcagtgaaggagtcaggcaatggtttgtggttctagaagaacgtgtctgggtcgtggttggtttaagttactggagcccagttgctgaacagttttctgctttcatcccaggaacaccatgaagaagacttctttctctacattgcctacagtgacgaaagtgtctacggtctgtgaagctgctgcccctgagctggaggggggtctcattctacaaagagagaggtggcccccctttcttgacctcctcctccttcaagctcaaacaccacctcccttattcaggaccggcacttcttaatgtttgtggctttctctccagcctctcttaggaggggtaatggtggagttggcaacttgtaactctcctttctcctttcttcccctttctctgcccgcctttcccatcctgctgtagacttcttgattgtcagtctgtgtcacatccagtgattgttttggtttctgttccctttctgactgcccaaggggctcagaaccccagcaatcccttcctttcactaccttcttttttgggggtagttggaagggactgaaattgtggggggaaggtaggaggcacatcaataaagaggaaaccaccaagctgaactgaattttgccttgtgttgctcccctcgtcccgctgattttaagtctttccaaggtgtcagtgggtttcagtggtggggaaagaagagtactgggtacaagctggagggatagaagtatattttggtttattctgttcatgttgggcttttccctgtctgcaaaaagagggtgcttttgttgtgatggaatggaatactgaggattatttcttgaaactttagttttataacacgcatgtgaaactaaatgttaaaaatgctca

SEQ ID NO: 11574 - DNA, 4682 bp, Homo sapiens
gccgctccccgggggaggggagcggcttggtgcgcctgcgccagcctgtggctttctgggaatcaaagttccggaggttcatgcggtcccttttccgctgttcccggacggactacaaaacccttggtgcactgcgcctcggcgccggcggggggaggagggagagaagaggagggagggaggagagaggaggaggaggaggaggaggagggagcaggcggccggcggcgcggggggagggggcccggtccgggagtgcgggaggcagtggtagagggaggtggcggcagcggctagcggactcgagtctcaaccgggctgaggcggacacttctgtggagcgaagcagtgggagcatcgagcactagaggcggcaccgggatccccggctccggggaggggggcgccggaccgggaggaggggagggggcgatgctggaagccatggcggagcccagtcccgaaggtgagctctcgaccggtgcagagcgctgagccggcggggggcgggcgaggaatcaattggcaaacttggaggtcgagccccggagcccagcgggggagttcggggagggggtcgggaggctggccctggaggtgggagagcgacgagttgagagaccttggagaaagaggagtgggaaactgggctggggtagttggagatcagacggtgtgggggtgcgggggataggagcttgaaacccggagcctcgggggttagggcccgaaagggccaccggcagattggggccctggaactggaaggttaggggaatccagtggccggagagttgctcaggagggaggacgtagaagaggctgagtgaggggcccggtagttcgccgaggtggggtagtttgtggcggtggtaccggagctccgagtagttgccgccggagaatgcccggtgattgtcggagaggtgggcaggtagttgtggggagaagagggggtctgggtattgtctacggcagacggacctgtaccggggggtagttgtggagagagcgagccaggaagcgaggcgagctgggtagttgtagggggtggtggggcggggtggggggggttaagaccggcgacttgtcgggcgggggggtagggttggtccgcgagggttaagagcctgggagttgctgagggtgaggggggcatcggcggcagcagcggtggctgctgtggagagagagagagagtggctggttggggggaaggggccagagttgaggggtccatagcctagtaactgggtggtgagtacgggggcggaggggggggcggcggccggagagggctaggaacagggccggggggcccggtggggagcccgaaaagctggagacggggaggggccaaagccccggatgggggcggagggacggcgaaattgtggggagcgcggtatgggcgggtgggggggcaggtgggggccgcgtccgggttagagctcccgggtctgtcccggccgtgaagtagcgttggatgcgtgtgcctgtgtgtgtctggggtgggggtgaggggcgcgccgggccgcgtgctcgagtagaaggggccggagggcggggagcggttcggcgtggtcatcctggaccctgggggctggcgggcggcgtgtgcggtctcggagggcccgaggcggtggagcgcggccgggtaggaactcggggctccgggcgcgtgtgaaggacgggggcggctggcggcggcccggacgcggccccgggagcggtacggtggggtggggcgctgagggatccgagtagactggagtcgagagagaccgtgagttgggggggcggggcgccgggcctccggttgggggaaggggagcgctatagcgaggcctcagagggcgccgcgcccaggctccgcccctcgcggggcggaagggggagccggggcggatccaacacagctgggggcctgctggcctggcagagggacctgggagagcagggggttcacttaggaacaacggggtttagagggggagttttacacagattgttcctagtgtcttgactcagcttttattgcttttccagatccacctccgacccttaagccagagactcaggtgaggtttgccttacctttgcagcctagtagccctgcctgacaacgccccccgccccccttttctagacctcacttagggactgtgtttctgggaatgccattcttaaactgtgtggctttgcatgtgatccatatctccttcctttcagccaccagagaaacggcggagaacaattgaggatttcaacaaattctgcagttttgttttggcatatgctggttacattccccctagcaaagaggtaggggcaagagaattactgacttgaggctggtgtggtgggactatagagtgactgttgttcaaacagaactgtattgctttatagaaggaggcccctagaaattatatgtaagaccagggaagttggagactcttagggctgtggtaggaaagctggtatgcggggagtggatggccgggatagctagcttgaacagcagtgaaaaggaagggggatttggagtcgctggttgagattttggcatagtcttgaggtgctgtgaatggaaggtgtttatggataaattttagggagatgaaaatggtaacaaatgaggctatacagaaaaagagctaaggacataacggctccggtctgggtgatacagtgttccacaggccctgggcaggggcagcggtgaggtgtcagacttgagggtagaggtaacacggactggtcaagaggacatgctgatgggaattggggtggggagaagtttttggagtacagtgggatttagtggttgaggtaggacattttggggtaaatccagtcactccttttcaagctgggtttgtggaggggctgagatgacactggggttctgctgaccctggtctcttcccccttttaaggaaagtgactggccagcctctggctccagctctccattgcgaggagagagtgcggccgacagtgatggctgggactcggccccctcagatcttcgaaccatccagacttttgttaagaaagcaaagtcatccaagagaagggcagctcaagcaggtcccacccagccaggacccccaaggtccactttctctcgtctgcaggcccccgacagtgctaccttgcttgagaagatgaagctcaaggactctctctttgatctggatgggcccaaagtggcatctcctttgtcccccacatccctgacacatacctcccggccccctgctgctcttacccccgtgcccctttcccagggggacctctcccatcctcctcgaaagaaggaccgaaagaaccgaaagttggggccaggagctggggctggctttggggtgcttcggaggcctcggccaactcctggggatggggaaaagagatctcgaatcaagaagagcaagaagcggaagttaaaaaaggcagaacggggggatagactcccacctcctgggcctccccaggcaccccccagtgatacagactctgaagaggaggaggaagaggaggaagaggaagaagaagaagagatggcaacagtggtagggggtgaagccccagtccctgtgctgccaacaccccctgaggctcctaggccccctgccacagtgcaccctgaaggagtccctcctgctgacagtgaaagcaaggaggtgggcagcactgaaacaagccaagatggagatgccagctccagtgaaggcgagatgcgggtcatggacgaggacatcatggtagaatcaggtgagaggtttgggctggggcgaggggtttgagggtgttgtggatccaacagctcaggcagaataccaaacaaacctttttttccccaggtgatgactcatgggatctgatcacatgttactgtcgaaagccctttgcagggcggcccatgattgagtgcagcctgtgtgggacgtggatccacctctcctgtgctaagattaagaagaccaacgtccccgacttcttttattgccagaaatgcaaggaactgaggccagaggcccggcggttaggggggcctcccaaatctggagagccctgatggcaccaactttagcctggaacttccaaatgacaacatgatttgggaactgagcctcagggtcctcagcctatcccctggagcttggatactgtctgcacttcaaggcaggaattctcaagggagacttgtttgaaaatgagtgtctcactttcccaccctatccttcctccccactctgtggacttgaaattgaatccattacggttggggatgggaggctgtctgtgtcccgacacataatctctgtctcttggacctgccaccatcactttctgggtcaggattggaattgggatggaatgggacagttgtctataaaactctagtgtaaatattagcactcccctccctcatcttttcttctatttcactccccatttattttcttctacaccggttgtatttttaattttggacttcccctattgggcatggcagctcaaaggtggagtactagagcctggccaagtgaggaaggaaagcagaaaggtgacgattctcactcacctcttttgtttttaataatatcggccgctgtttgtacagacagcctgcgtgttgtaaataaagcagagtgggctcttttgtgtttata

SEQ ID NO: 11575 - DNA, 8056 bp, Homo sapiens
ccccactgccccctcccccaattatccttccccttccctccaggtctcggaggaccccatcctagccctacctgtctcggcccgcaacctccccgaagccgtcggtgccactcccagcccatgtgggcccccgcgggctgcccacgcctgtcccccagctccccgttccgctgggctttaccctcgccaggggtggctttctgagccgcccgctccgtgcccctctctgcagcctctcctgccactcggggcccccgttccccctcccggcggcggggggctgcccccggggggctggcggagctgggccgcgggggccccggggccggcggtgccggggtcatcgggatgatgcggacgcagtgtctgctggggctgcgcacgttcgtggccttcgccgccaagctctggagcttcttcatttaccttctgcggaggcagatccgcacggtgagccagggtgggcgctggcggtgttggggacgtctggcggtgttggggacatctgtccgtggtgctcaggggttttcggagtgtcgggcctctgtttgggcctaggaagggaatcctggctggggcttttctcgccagagaattgggcaccctaagcggggcgaggtgggagacccttgtaatagaaccttgcccttgggggttttgatggggctagatgggacaggatttggcaactcttgggggctaaggtggtgggtggggcgctctttaagaaagctggagttgttgctaaagaaaccaagaggcggggaacacctgtttgatgacagccggatctgtggatgtgggcttgggaaagaccctatttggaacctcggtgtgtgtttggtcctataacaaggaagagacagacttgtgtgtcaagggtggaggtgggtgggagggcatacgttacaaacaaggacgggaacttgggaaagccctgggtgtgaaggagaaacgcctgcggttcccattaagagaattcctccaaaaaggctgtgaaaatttatttcatagtgtgagtgtaggtatctggatttattgaagactaaagcagatgcttttacgatgggcctctttaattgtgggagggagttcaaggtgggtgctgtgcccaccattgaagtttgggtgtccctgtcagaggacagcgctgggcagttgtagggcttgaaaatgaggacgtttgcttctccaggagagcctagcattctgagggaaactgtccggatggacccaagcatctctgggtcccctctcccttagcttttctccaaggtcagaggtccttcagctaacagcactttaaatgaatgtgctcttgtggtctcaccaccaccagggagaatcctcggaaggagtctggggagaatttagtaagcggagacacaggttctgggtctgtactgtggtctgtaccccttagcatacctcaatacaatttgaaagaataaacccaggttggggtgacctggggtccagagaatttccagaaagccctcagtggtagtggtggttgatttaactgatttgggagaatgggtctggccttgggttcattctgtcctttaccagtctgcttccacttcctgatttagggcgcgaacagtacaggatggttgtggctgtaggcagcagcgctattcccccgagacaagagctaggagccaagaaaaatttagggtcagagatgctgggatatgtgtggggctatctcctggggttttcttttcttttctgagacagtctcgctttgtcgcccaggctggagtgcagtggtgccatctccgctcactgcaacctccacttcctgggttcaagcgattctcctgcttcagcctctcgaatagctgggattacaggcacctgccaccacacctggctaatttttgtaattttagtagaaacgggttttcaccatgttggccaggatggtctcaaactcctgacctcaagtgatctgcccgccttggcctcacaaaagtactgggattgagccactgcacccggcctccagcggttttctttatgggttgactgccatcttctctgacgttctcgctccaacacatcagttttctgggcatacggagtggtgcttcagctcatccacaggttacttccaaaattgctctcctttgggcagcactgaccccatagccttttgtcctcccttcccttccaatctggtttctttccccaccccgcttctggcagatgcttggagcattccctacatgcccagcatatgcaacccgagatagcaaggctggacactggagctctttcggacctcatcatggcccagggagaaaagaagggcagatcttgattagggggagagagccctgtgggtttagaagggagaacctggttctggtgtggcttggggcctaggtatgcactgaagagggtttgtacctttgaagaaaagtgtggaagagggaattgccaggctttgtatggggagatgtgcgtattaggaaatagcccctagagaatgcttggagaagcagagctggatgaggtggtgacgtccttgtcccttattcacctctcacttaacggccctgacttcactctggcctcctccagaccctgccagtcagcctggcaggggctttccagtgttctttgcctcaccctgggtaccaggataaggagactgttcagagggctgaggttctctgaacttgtgacttggctagaagggacagaagtggacaggtggctggttaaaataggcctggtggcttctagccagaggaacttagctgacctgacaacctctggattccctcattctatattcccattaaggacccagggatctcctcccgactcctactccatgtgcactagggaatctgaggcacttagttcccaatgatggtagttgctacaaataattcttggggtgaaggttgcgttgtgggggtcgtttctttgttcagtgtagcaggataatatcacagttaagagggcagcttcggccgggggtggtggctcttgcctgtaatcccagcactttgggaagctgaggcaggtggatcatgaggtcaggagctcaagaccagcctggccaatatggtgaaaccccgtctctactaaaaatacaaaaattagctgggcgtggttcgcgcgcctatagtcccagctgcttaggaggctgaggcaggagaattgcttgaacctgggaggtggaggttgcagtgagctgagatcgcgccactgcactccagcctgggcaatggagtgagactcccttctcaaaaaaaaaaaaaagaaaaaaaaagagggcacgttcttgggttgaactgcattggtacaatcctggctctatcacttcattgattctacttttttttttttttttttttttttttttgcgacggagtcttgctctgtcaccaggctggagtacagtggtgcgatctcggctcactgcaacctctgcctcctgggttcaagccactctgctgcctcagcctcccgagtagctggggctatgggcacgcaccaccacgcccagctaatttttatatttttagtagagacggggtttcaccatgttggccaggatggtctccgtctcttgaccttgtgatccgcctgccttggcctcccaaagtgctgggattacaggcatgagccactgcgcctggctgattctactaatatcaactgaccacttttgctactgtgttctaggcactgggaatacagccatgatctagacaaaatcatattctcatggagttttcattttaattagggagagaaacaacttaagataattcctagctgtgtggcctcagtttctttaaccttaaaacaggtataacagtaatattatggttgttttgaggattaaatgaaaaaggccagcgtagtggctcattcctgtaatcccagcactttgggaggcaaaggcaggaggatcacaaggtcaggagtttgagaccagccaggccaatatagttaaaccccgcctctactagaaatacaaaaatgagccgagcgtggtggtgcacgcctgtagtcccagctattagggaggctgaggcaggagaattgcttgaacctgggaggcggaggttgcagtgagccgagatcatgccgctgcactccagcctgggcaacagagcgagactccatctcaaaaaaaaaaaaaaaagaagaagaaataagcctaaattacatacatagtacctgtggtaaatgttcattatgtgctccctgttactgttactggggaaggcttccttatcaagggtttcaatcctcttttgtgctatttgtaggtaattcagtaccaaactgttcgatatgatatcctccccttatctcctgtgtcccggaatcggctaggtaagtatgtggtgggaagcctcctttagggtgaagtaggggctagctctgggtcagaggtcggtcaatattattcctccccactctggttcagcccaggtgaagaggaagatcctggtgctggatctggatgagacacttattcactcccaccatgatggggtcctgaggcccacagtccggcctggtacgcctcctgacttcatcctcaaggtgtgtggtggtggggagtgatgaaatggttccatctgttcctctgcccaaacctggactccctttcccagtcccagagcatctgtctccatccgctggcaccagtgtcagcctggaggagggaagcagatgggtggggcgttttctaggcctgggttgtggtggtcatgacatcccccagcccatcttgttcctctgtaggtggtaatagacaaacatcctgtccggttttttgtacataagaggccccatgtggatttcttcctggaagtggtgagttttggagagctaaagggagctctgtaatgaaggaatggttttagggctctgggaattgggaggatttggaggaaggggtgaggagaaacgggttagagcagttttctagaggggaggctgtgtaatggtaggggagtggctttcagtacttggggttcatttgttgtgctgatgtaattcttttccgctggcatctttctcttttgttcttgcatttctgaatcataagagtgtaggatgcctaacactgagtttggaggtttgggctgggggttcagaatttcgtgtcctcagagacatttgatgttgatggaaggcctgaaggactatgccattgcctttctgaaagataactgtatgtctaaaggaatcatcaccttgtatggcatcgccctctcccccaatctatttcaggtgagccagtggtacgagctggtggtgtttacagcaagcatggagatctatggctctgctgtggcagataaactggacaatagcagaagcattcttaagaggagatattacagacaggtaagctagaatcccagtctaagagtgtggcttgggagggaggccaccagggagggatctgggtttgaggagagtatcctggagagaggcctgctacatgatcccctgccttccagcactgcactttggagttgggcagctacatcaaggacctctctgtggtccacagtgacctctccagcattgtgatcctggataactccccaggggcttacaggagccatccaggtacgggggaaggtggtgagtctggcaggaccagaacatggttctgagaaggtatttttgcaggagacctgggctttggtccttgagagctgggattccctagattatccctagtttgctgtaagtcgaaatgcaagttatttttgtgtttcaaatgagataccatatatgtccatttcataagtcggatttcttatatcatttttttcatttttaaaatttatttttggctgggcacggtggattatgcttgtaatcccagcactttgggaggccgaggcaggcggatcacgaggtcagaagttcgagaccagcctaacaaacatggtgaaaccccatctctactaaaaatagaaaaaactagccaggcgtggtggcgcacgcctgtaatcccagcaactcgggaggctgaggcaggagaatcgcttgaacccgggaggcggaggttgcagtgagccgagattgcaccattgcactccagcctgggtgacagagcgagacgccgtctcaaaaaaaataaataataaataaataaaaataaaatttatttttatttattttttgagatagggtctcactctgttcccaggctggagtgcagtgtcatgatcatagctcactgcagcctcgatctcccaggctcaagtgatccttctgcctcagcctctcagtagttgggactacaggcgtgcaccaccatgcccagctaatttttttattttttatttttttttgagacagagtctcgcactgtcacccaggctggaatgcagtggcgtgatctcggcttactgcaacctccgacttccaggttcaagcaattctcctgcctcagcctcccaagtagctgggatcacaggcacctgccaccacgcgcagctaattttttgtatttttagtagcgacggagtttcaccacgttggccaggctggtcttgaattcctgacctcgtgattcgtccgctttggcctcccaaagtgctgggattacaggcgtaagccactgcccttggccaattttttgatttttagtagagaagggatctcattatgttgcccaggctggactcaaactcctgagctcaagtgatcctcccacctcggcctctcaaagtgttgggataacaggtgtgagccactgcgcctggccaagtgtgtttcaagtgaggcacaatggcagtaagcttgactagaagcatcaataggtatgagatctggtgattaaaacttagtttcggagcataaaccaggaaagttttacttaggttgttgacttccggtagtgggaggcatatatttttaacaataattcctccttccctccaagaagagaaaaacaccgtctctcttgaattctgtttcttctcatctgcattttcacccaccctagacaatgccatccccatcaaatcctggttcagtgaccccagcgacacagcccttctcaacctgctcccaatgctggatgccctcaggtaagggaagtgggctctggacacttggatatctcaagaaaggaggaggtgggggatcctcagagggaataaaaaaggtttgtcctgttttaactctgttcccttaagaatttaacatttggacccaggtcgtcttacttcaaagctcatcactttagctagtaggctgtgggcaaattgaacctatctaatcatgaatatggtgataatttaggtcccacatctccagtgatgctgccttacaagagtgttgtgagggtatgaactataaggtactctaccaatgcaagttattgtcaccccaggttcaccgctgatgttcgttccgtgctgagccgaaaccttcaccaacatcggctctggtgacagctgctccccctccacctgagttggggtgggggggaaagggagggcgagcccttgggatgccgtctgatgccctgtccaatgtgaggactgcctgggcagggtctgcccctcccacccctctctgccctgggagccctacactccacttgggagtctggatggacacatgggccaggggctctgaagcagcctcactcttaacttcgtgttcacactccatggaaaccccagactgggacacaggcggaagcctaggagagccgaatcagtgtttgtgaagaggcaggactggccagagtgacagacatacggtgatccaggaggctcaaagagaagccaagtcagctttgttgtgatttgattttttttaaaaaactcttgtacaaaactgatctaattcttcactcctgctccaagggctgggctgtgggtgggatactgggattttgggccactggattttccctaaatttgtcccccctttactctccctctatttttctctccttagactccctcagacctgtaaccagctttgtgtcttttttccttttctctcttttaaaccatgcattataactttgaaaccaaag

SEQ ID NO: 11576 - DNA, 554 bp, Homo sapiens
ggagagttagcccttgggatgccgtctgatgccctgtccaatgtgaggactgcctgggcagggtctgcccctcccacccctctctgccctgggagccctacactccacttggagtctggatggacacatgggccaggggctctgaagcagcctcactcttaacttcgtgttcacactccatggaaaccccagactgggacacaggcggaagcctaggagagccgaatcagtgtttgtgaagaggcaggactggccagagtgacagacatacggtgatccaggaggctcaaagagaagccaagtcagctttgttgtgatttgattttttttaaaaaactcttgtacaaaactgatctaattcttcactcctgctccaagggctgggctgtgggtgggatactgggattttgggccactggattttccctaaatttgtcccccctttactctccctctatttttctctccttagactccctcagacctgtaaccagctttgtgtcttttttccttttctctcttttaaaccatgcattataactttgaaaccaaag

SEQ ID NO: 11577 - DNA, 2454 bp, Homo sapiens
gattgcaacccccactttttttttttttgctttccatttgcttggtaaatattcacccatccctttattttcagcctatatgtgtctttacacatgagatggatctcctgaattcatcacatgaatgggtcttaactctatccaatttgccagtctgtgccttttaattggagcatttaacccatttaaatttaggattaatattgttatgtgtgaattttatcctgtcattatgatgctagcttgttattttgctcattagttgatgcagattcttcatagtgttgatggtctttaacttttggtttgtttttgcagtggctggtaccagtttttccttttgatatttagtgcttccttcaggagctcttgtaaggcaagcctggtggtgataaaatctctcagcatctgcttgtctgtaaaggattttatttctactttgcttatgatgcttagtttggctggatatgaaattctgggttgaaaattcttttctttaagaatgttaagtattggctgctactctcttctggcttgtagggtttctacagagagatctgctgttagtctgatgggcttccctttgtgggtaacctgacctttctcttgggctgctcttaacattttttctttcatttcaaccttggtgaatctgatgattatctgtcttggggttgttcttcttgaggagtatcttagtggtcttctctgtatttcctgaatttgaatgttggcctgtcttgctaggttagggaagttctcctggataatatcttgaagtgtgttttccaacttggttccattctccccatcgctttcgggtacagcaatcaaatgtaggtttggtcttttcacatagtcctgtatttcttggaggctttgtttgttctttttcattcttttttctctgatcttttcttcatgctttatttcattaagttgatcgtcagtctctgatatcctttcttccacttgatctattcggctattgatacttgtgtatgcttcacgaagttctcctgctgtttttcagctcaatcaggtcatttatgttctttaaactggttattctagttagcaattcctctaacctttttttcaaagctcttagcttccttgcattgggttagaacatgctcctgtagcttggaggagtttgttattacccgccttctgaagtctccttctgtcaatttgtcaaactgattccccatccacttttgttcccttgctggtgaggcgttgtgatcctttggaggagaagaggtattctggtttttggcattttcagcctttttgtgctggtttttcctcatcttcgtggatttatctaccttttggtctttgctgttggtgacctttggatggagtttttgcatgatgttggtgttgatgctattgctttcagtttattagtttttcttctaacagtcaggcccctctgctgcaggtctgctggagtttgctgcgggtccactccagaccctgtgtccttgagtatcaccagtggaggctgcagaacagcaaagactgactagaaaaaaatcaccgtgagactagtgttaagcatgagaactagtattaaatgaaagttataaagaatagtgtgtaatgactatatgttttggcaaagaaatataattcagctgtaaaaaacagtgggaagagcatatgcaaaaaattttaaaaactattttctgccatcatacttttgactgtagtgtttgttttgttgctcaggtattttctgtgtattgtgcagcagagcaaatgaataattatacattattctaattttgttatctcctgtgtccttgagagctaggaatcttaatgtggaagaaattatatactgtttatatttatatagatgtaagaaggctaaatcctctacttctgatttttaattagaagtatcagtatgaacttgagattctttaatgtcatttaaaaatagtatataccttatatttgtgtgtatatatatatttgtgcatatgtatatgtatgttaatctgagaatgttttatgtgtattgtggcataaatcaaatgaatatttatgtgatattttaatgctggcatttccttgctatgtctatggaaaagtcccagaaatgaacaaacctagttctgtgaatgtggtcttgaaatgctgttttctgcctgggtgcagtggtccattcctataatcccagcactttgggaggccaaggcaggtggatcacatgaggtcaggagttcgagatcagcctggccaacatggtgaaaccccatctctactaaaaatactaaaattagtcaggcatggtggcagacacatgtaatcccagctactcaggtggctgaggcaggagaatcgcttgaaccctggagggggaggttgcagtaagccaaggttgtgccattgtactctagcctgggcgacaaaagcgaaaccgtctcaaaaaaagaa

SEQ ID NO: 11578 - DNA, 109 bp, Homo sapiens
gtttttttttttttttttttttttttgagatggagtttcgctcttgttgcccaggctggagtgcaatatcacaatctcggctcatcgcaacctccgcctcccgggttca

SEQ ID NO: 11579 - DNA, 311 bp, Homo sapiens
tgagaagaatgtatattctgttgatttggggtggagagttctgtagatgtctattaggtctgcttggtccagagctgagttcaagtcctgaatatccttgttaattttctgtttcgttgatctgactaatattgacattggggtgttaatgtctcccactgttactgtctgggagtctaaatctctttgtagatctctaagaacttggttatgaatctgggtggtcctgtattgcgtgcatatatatttaggatagttagctcttcttgttgcattgatccctttaccattatgtaatgggcttctttgtc

SEQ ID NO: 11580 - DNA, 311 bp, Homo sapiens
ggtggagaggacgggcaggtgttcacgtgcccagttaagagtgagatgggtttttatcttcgagtgctacgcctcgtttatgtatttcaggagttgctggggcactgtgggtcagcggctccgggcacctcctgtgcttgaggcagacaccgtctccccgacctcgcttcaccccgtgggtgaaaatgctctgggagctgagaaaaactagtttgtgatcttacagactttcagggctgcacagttttgtaaataggtaaaacactttccagtgttacgattttagtaaattcgtgcttttaaatgatgga

SEQ ID NO: 11581 - DNA, 311 bp, Homo sapiens; identical to SEQ ID NO: 11580

SEQ ID NO: 11582 - DNA, 776 bp, Homo sapiens; identical to SEQ ID NO: 5231
  SITE (709): n equals a,t,g, or c
  SITE (738): n equals a,t,g, or c

SEQ ID NO: 11583 - DNA, 878 bp, Homo sapiens; identical to SEQ ID NO: 5232
  SITE (741): n equals a,t,g, or c

SEQ ID NO: 11584 - DNA, 150 bp, Homo sapiens; identical to SEQ ID NO: 5233

SEQ ID NO: 11585 - DNA, 845 bp, Homo sapiens; identical to SEQ ID NO: 5234

SEQ ID NO: 11586 - DNA, 311 bp, Homo sapiens; identical to SEQ ID NO: 11580

SEQ ID NO: 11587 - DNA, 482 bp, Homo sapiens
ccgggctcctgatgccggggtgaccgggcccttgttaggagctccactctgggccccgcgtggagggacaccccgatgcgctgttgccaggcccccgggtctcttcgaggcacaagaataggctgagcgtggaaggttctgagcgcgggagattctgagcgcattgcccttaccagtctctgctgcccagcttgggccacccagcgtctcccagccggccgacttggtttcttcattaattttgcagttcacttttattgagcactccatactgttgaatccagcttttatagaaacaaccagtttcccttccccctccgttttcattggctcatgtatttaactgaattataaaattgtggtcacaagcgaggttgccgtgaccaggttggtgacccagccctgcctctcggcctgtacggcgcagtccatggagcgtggggggctggaggggaacacattgatatagttttgtgtttctc

SEQ ID NO: 11588 - DNA, 482 bp, Homo sapiens; identical to SEQ ID NO: 11587

SEQ ID NO: 11589 - DNA, 482 bp, Homo sapiens
ccgggctcctgatgccagggtgaccgggcccttgttaggagctccactctgggccccgcgtggagggacaccccgatgcgctgttgccaggcccccgggtctcttcgaggcacaagaataggctgagcgtggaaggttctgagcgcgggagattctgagcgcattgcccttaccagtctctgctgcccagcttgggccacccagcgtctcccagccggccgacttggtttcttcattaattttgcagttcacttttattgagcactccatactgttgaatccagcttttatagaaacaaccagtttcccttccccctccgttttcattggctcatgtatttaactgaattataaaattgtggtcacaagcgaggttgccgtgaccaggttggtgacccagccctgcctctcggcctgtacggcgcagtccatggagcgtggggggctggaggggaacacattgatatagttttgtgtttctc

SEQ ID NO: 11590 - DNA, 1395 bp, Homo sapiens
tgtttttcttgaagtagatctttttttctttttaaaggctgataatggaggccccaaagtagccatctgttactttgttccattactctaattgcttgcctcttaggatctggctaggactaacagttttcaaaattgagtaacacacttgacaaaaaaaaaggaaccaaactcaaactcaactgttatctagaaaaaagactgtgtaaatatgtgtgagaggcaagtatactctgtttgccctcttgtaagagggataggggaggccactcagctgctagcactctgttctctcccctcatcctctccagaatgtattttagaacttgactcttctaatgactgaagaaaaggtggggtatgggaagatggcctgggactgcagggtcacttacactcacctggctaagagttgagatctggctggtgccctggagtggcacctgccactcacctaatcctaaacaatccagggtgtgggcccaggattgccctctgccttttgaaacaccctccctggttccggcttctaagaccaacagggaggctactttggtggcagggagctgactcaccctccagttggaactggtgctaaaagcctccatttaacggcagccgactgcttggccccaagtgggctgccttgtgggggggaaagttcagtggaaagtgttggaggaagcagggtggtgtgtgaatatccaagtagtgctggtgctattaagctctgacacagtcagggaggtcagttaaaatgtggtcttatggccgggcgcagtggctcgcgcctgtaatcccagcactttgggaggctgaggtgggcagatcacctgaggtcaggagttcgagaccagcctggccaacatggtgaaaccccgtctctaccaataatacaaaaattaactgggcatggtggcaggtgcctgtaatcccagctacttgggaggctgaggcaggagaatcgcttgaacctgagaggtggaggttgcagtgagccaagatcgcgctactgcactccagcctgagtgacagaacaagactccatctcaaaaaaaaaaaaaaaaatcagatgacagaggggagcggggacaagttttaagtctaagcctcctgggtggggagttctgctgtttcaacatatgctccagtcatggcagactttggccagacagcgccctttttcagagtgaactgagtgtagcacaagttatctgccagtgctagttagcaaacagaatggagccaaaaaagaattgatttgggaaggcccaaggaatttgaaaccgttgagatgaacactttccgtttttgctacactgatttatgttgtgctgggaattgtacaagcctttgaccagaccttagggttgttctttaaaaaaaaaaaaaaaa

SEQ ID NO: 11591 - DNA, 486 bp, Homo sapiens
cgttcaggttttctgaatagctgaaatatcaacatgtttatctcttcccttgccttagtatatcctagagcagtgttttccccggctttatctttattccttcatttaatgaactccgtgttttcatcactcacattttgttcccttccctcagtttccttcctttgccttcatttatgtatttagtttacagaataacaaaagcactcgtgttacttttaaacaaggtaaaacttaaacagttttttcctccgtttctttttttatggaaataagaggcaagtgatagcaagtgggtaattcaatggcagtggtaactgaagcactgacctgttacaagagagacggaagcttctacttgagcagatacaaatactgtcatccgtggagatttgaaagaagtctttctatcactgggtagtttgagagctcattagtcttctttagaatgggtttaaacttggaaacatcaaagcaagttacaag

SEQ ID NO: 11592 - DNA, 241 bp, Homo sapiens
cagttccctctcccaatttctaaaagtggcctgggtaacctcatcaccctctgttgtcctggaagggtgagatctcttgaaggttatgccaaatctcattacagcaagaagaaatgactcacttgctaagttttcgtgttcattgaaacatcactatttcaggggcctcaatgtttcaaccctgaccgttggctttttttttggagacggagttttgctcttgttgcccatgtggctgtat

SEQ ID NO: 11593 - DNA, 13751 bp, Homo sapiens
aagttgttagctgacaaagtgatattaaaggagatcctccccattttgttagtatctgtaaattcatgtatctgtattttctgagttttgtggtcacagaaagaaagaatgaacaaatagagtaattttctgtactcacatttcggtaaaatgaaggtgggatatacaagtttacacttacagtctgtgcagcccatatacgttttctggttctggggttgtttttatattctctgcatggagactggcaacatcagcatcacatgagtaccacctgactctagtgacctagtctctttcaacctgatttttaattgtttggtcttttttgtttgtttttaactgcttcttgcagggctaccccataggagtgtgcccagaatagcctgttttgtcttttagttctgcaacatcagaagacaaagagtaaatattatatgtgcatgagggatgctcttaaaaaatggttcattttactttcagtaagaggccaggtttcttgatgcacaacttttttgtttgttttacagtggaagatagatgataagcctgtaaaaattgacaagtgggatggatcagctgtgaaaaactctttggatgattctgccaaaaaggtactttcttgaggaggggttggttagtatctatacagctgatggccatctctcctgggaaatcttttccttttgtaacttggagtgaccttagttttcagtgttagaaattaagtcagaaagcagtttctaaaatttctcacagaaaaagtcagaggaagtgtgttgaaatatcaccaacatggcacatgtatacatatgtaacaaacctgcacgttgtgcacatgtaccctaaaacttaaagtataataataataaaattaaaaaaaaaagaaatatagatgttggctatctcaagaaagctggtaattttttgtttttgagattaattagcctagagcacagaagggtgagagaagataggacattcattcatgataaatcatctctccatttgtaaaagtaaaacattttagctgtgggaaaagttgaggagtttaaagttttttatatgagggattgatgaactttttctcttggttcttcatagaaggcttgagttttacttgtttggtgtggtaaatcccaactggagggaactacttggtaattcatatgattcttttatcatggaaatcaagaataaaagcacatactggggaggaagtattcctattagcttgattccttgtttttctcaccaggtacttctggaaaaatacaaatatgtggagaattttggtctaattgatggtcgcctcaccatctgtacaatctcctgtttctttgccatagtggctttgatttgggattatatgcacccctttccagagtccaaacccgttttggctttgtgtgtcatatcatatcctttatttatgctcaggttgttttctagtgactatttttttaaatctgctgatatttctccctacaaaaaacaaaacggactttcatattagggcttgctaatgttagaattcaacattttgagctgtgatgtttatatagtaaatatctatcagtttatatagtaactgtcactgatattttatgttttgtatggttattttatcgtaattcatttttgttattaatgtagaggttattgtcctaatatgagcacttaatagcaaaacacatagtaatagtgaacccagctcttctcatttctagcccagaacttttcccgttagacgtggctgcttcaagccactcattctaggatattaggaaaggatctgattttggagactcagatctgtattaagtttacttgaagctgaggagctgaactggaaagtactgagcatgagatacaagtgtggcttgtattacagtggaattaagaacttattctggagctagagaatatgggtttgaaatccaaggtatctgtgatcttgtgctaatgaaaatttacttatttttgagatgatttgaataccactcatttataaatatgggtagcattcagaattatcataaagattaaatgagagattttatattgtatttgatacataatcatttcctttcccctcttttttatgataaatgtaagatcatggtcgttgcctacccagcgtgattttttttctcaagaagttgaatataaagaacttaattatacttcactattaaaataggtaattttggttggtagtttacttttttaaacaatgttaccactacctaaattttgttttgttttcttttttttgagacagggtcttaccgtgtcacccaggctgaagtacagtggtgtgatcatgactcactgcagcgtcagcctcctggctcgagcaattctcccacctcaacctcctgagtagacgggcacatgccaccatgtctgcctaatttttaaattttttacagagacaaggtcctactacgttgcctaggctggtctcaaaactcctgggcccaagcaatcctcccaaagtgctgggattacaggcataagccactgtgcccagccaacctgaaatatgttttaaaacttcatgttggggatttatcttcagaggcagttagcaaacctctgataaagcagatcctagtcaaaaattgtattatccagattgccccacatttcccccagaagtggcaccaggtgatccttgactcctttcagtaatcagattaatcatcccagtatgaatttttcactattaaggcagttcagaagaataatattccataggttctagagacagttcccaggggaattccaaagagatttgaaaatgatagcaacattattacaaatatctggcctcccaagagaactaccttgatggtaattcatttgtttggttatatttgtttaataaaacaaggtcttatttttgtcatgtcagttttatttataatgtagggactaccattataaatgtcttctgttgctgggcatcgtggctcatgcctgtaatcccaacactttgagaggccaaggcgggcgaatcacttgagcccaagagttcaaggccagcctgagcaacttggagaaatctgtcactactaaaaatacaaaaattagctgggcatggtggcgcatgcctgtagtcccagatagttgggaggctgaggcacaagaatcacttgaatccagggggcggaagtcacagtgagccgagatctgctactgcactccagcctgggcgatagagcaagactctgtctcaaaataaataaattaattagataaaataaaaaataaattagctgggtgtagtggcacacacctataatcccagctactgaggaagctgagatgggaggattgcttgagcctgggatgttgaggctgcagtgagctgagatcatgccactgtactctagcctgggtgacagagtgagaccctgtctcaaaaaaaaaagtcttctgtatcctagactgcatatatccttcatctctaaatctcatgataattctaaaacatcagtattatcccaattttaaaggtaaggatactaagacttggggaaggaagttatttgttacaatcatactgattaaaggccaagatttaaatctaggattatctctactctaaagtccatatactttgtactatattttcctgcctttcctgttcatgaaatttatctattttttaactcttctttaatggaatgcttcatgaatttgcctgtcatccttgtgctagggccatgctaacctctgtatcgttctaattttagtatatgtgctgccgaagcgagcactgttcatgaaatttatttttattttatttattttatttttattttttgatacagggtctcactctgttgcccaggctggagtgcagtggcacgatcttgcctcactatagcctctgcctcccaggttcaagtgattctcctgcctcagccacacaagtagctgggattacgggcctgcaccactacatccagctaatttttttttggtttttgtgggttttttttgtttttttttttttttgagacagagtcttgctgtgtcacacaggctggagcacagtggcacgatctcggctcactgcaaccctgcaacctctgcttcctgggttcaagccattctcatgcctcagcctcctgagtagcaggactacaggcatgtaccaccatgcccagctaatttttgtatttttggtagagacatggggtttcaccatgttggccaggctcatctcgaactcctgacctcaagtgatctgcccacctcagcctcccaaagtgctgggattacaggtgtgagccaccacgcctagccttaatttttgtatttttagtagaaatggggtctcccattgttccttgttggccaggctggtttcaaactccaggtctcaagcaatccacctgcctcggcctcccagagtgctggtattaaaggtgtgagccatcgtgcccagccttgtttatgaaatttaaatggcacagtatacacaaagctcttatgccagtttttggcaaactataagtgcttattaactatggtacttaatactgtcaaaaacaatataataataagtctatatgcatataggaagtaatcgtagtactatttgacatactctcttatagtaaactatttgggtcacttttcttctcttaataacccttaaaatcagttgaacatggtcaagtccactgggactattcgttgttttttataaagaaataagcactattataacaaagtcttgacaaactaggtatcttattatacatgttgtctttgaacataaagatgagagctagtttatgctctgtatctttttcttttcttcctttctgaggtgtttgcagaattaaccagagagagccttgcttctcttggtatataaacataaggatgaaaatgaaatagctaaattttcagtgttttggcagcaagacaaagctgtcttctttaggactatcattatgaaagtttttatatctgttgcttgtcaatttgtgttacttctcttttatgtttgggtattttccccttaactttatttgaacctattttgtgatgatggggattctgaccatttatacctcatataaggagaagagcatctttctcgtggcccacaggaaagatcctacaggaatggatcctgatgatatttggcagctgtcctccagtcttaaaaggtatgactatcctcacagatttttaaatcctggtgttggatttgccctggcatgttgtcattatcaacagaagacttattatgtgcctactctatgtggatcatagggctagtcatataaaatgaagaaaggagtatggatgatctagaaggtttgtcctagccctatagttctgagattgcgttatcacagaaatgctctgaggataaactgtgggagaaggtactttttcctgtggccagttaacagagacgattaagcatacaaaagtataaaggccaaagatgtgagatcagttatctttgaagaattccattagcttctgtgtcttctatgatcctgtcttctctccacgaatacaatcaagaatatctggagcagtgcactgggcaactcaaaaaaagcacaatctagagtctgtttctgaccagtgtcaggtataactttgtgcagctgacacacatgtgttttgtaggtaccaagaactaggttcatgttccaattcagtttctttctagctgtataactttgggtaaatcatataaattatctgaggtttagtggggtcaaaaatgatgcctagagtttctgggaagatgaaataccaattataataatagcaaatgtttattgaacatttactgtatgttgggtattctgctaaatgcattatctcattaagttttagaacactcattttatagataagaatacaggcccaaagtttaaatcaactcttccagtatcatatagcccaaaagtggtagagcaggaattccagcccaagtttgaaaccagaattcatactcgtagtcactatcttaaaaacctattatacttaactggtgcataatagccgcacaaattataggtacaattatttatatatgaagttaagtgtagcatctgtgccatacagactgtctcattgccaacttgtagaagcgcctatgagaaagggaagcagaccttcattctgttgttgcagctgagttcttgcttatctcctgacagggcttctagctgccctttggcctcagccatcataatctgcatcctctaccaggccactgaagctgagttgcagaattctaaaacctagcggcattataatttcattatttttattctgacttttgtattttttaagaacttttatataattcacctaccatacatacagttcacccatttaaagtgtacagttcaaaagtacctagtagtatttacagatatttgcaaccattatcacagtcaattttagagcattttcatcacctcaaaaaaaaaacctctgtactctagctaatcacttccctatcctcccacttgcctgagccctgggcaaccaccagtctactttctctgttctcttttatggacatttcatatgaatggaatcatacaatatgtggtcttttataactgggttctttcacttagtgcaattacttcctatgtatactgcacacaaggttcgttcatgttgtagcatgtatcagtacttcattcctttctatggtcaagtaacattccattttgtttatccatttgttgacagacatttgggttgtttctactttttggctattatgaataatgttgctatacatatttgtgtacatgtttttaggtagacatgttttcatttctcttgggtaatacacctgggagaagacttgtatggtatgctaactctctttgtttgatgaactgccagactgttgtccaaagtggctgccctattttacaatctcactagcagtgtacaagggttctgatttttttcacgtttcctgctgatttttaccaactgccgtattgttggtggagtggaatgtgaatgttcttgctctcttcccggctttctgctgatgtcttctccctcccccacctcaccgactgatttagtagcttaacagtggctgattctgatgtcttattcccactgccaggtcatgtgatgtgaaaatggcaatgaaaggtttcacagactactagttgccacgtgcagacaacacaagctatgtgactctctcgcaaaaagtgattttgtcactccccagcaaattcattatacagtctaaactccttcagcatatgaagtattacagcattcatcccctagtgacatctccagctttcttttatgcccctctcaaaatacattctcttactctggcaatattatggaatttgcaatatgctaagttatccaagtttccagtgaccccgtacctttaaacatattcttctctctggcttagctatctttctgtaacctggctcactcctacttccaagaagccttccctgacataccttagtcttccttaacatgccttagtctaaattaggtggtcctagttattctttttttttttgagatggagtttcactcttgtcacccaggctggagcgcaatgacgcgatcttggctcactgcaacctcctcatccggcttcaagtgattctcctgcctcagcctcctgagtagctgggattacggacccacgaccacacccggctaatttttgtattttttgtagagatggggtttcaccatgttggccaggctggacttgaactcgtgacctcaagtgatcgcctagccttggcctcccaaagtggtgggattacaggtgtgagccaccacgcccagcccatcctagttattttctttcaggcaatttatgctttacacttctggtgaggttaccaacatgggagcctatagattgagttttataatactggtgtcctccctccctggggccccgcccctcctgcttccataagtgttgagcgtccgttatccagttcactatgtcacgttgtatctcttatgccccggttgggatcttttctcacgtcacccccgtgggtaagccagacccacgcctcacgggcctggcgtggcatgttttgttatgtgaatgattgacattcatctgggctgggctgcagccttgacctcctaattagtctttgcctgcagcccagtcattgtcagccatccacaaagtcccctataacctagccatctctatgaacattcccttctcttttttttttttttaaacaacaaattggatccactgaaacttttatttaactttgtaatatgaacatttaccatataaggttataagacaatataaaatctatctcatttcatttatagcatagctataaatcaatctaatctctcttattaatgttttaaaaaaaaaaatatatttttttttttcctgcatacttaggcaatattttccccaagggatatatcattctcagtaaactaccgcaagaacaaaaaaccaaacatcgcatattctcactcataggtgggaattgaacaatgagatcacatggacacaggaaggggaacatcccttctctttcttaccctaagtgaaacctgaccataacctctgaggacatatttccactgcagactgcaagtggtggctgatgtttctctcacagccttcattactccggtactacaggtagagatgggtctctcctttgcagcttccaatgcgtcctcttccctaaaatcccccctttgaatgcatgtcatcacattgtgccacttctatgcctcttctttgcggttaaacacacacctagtcttttgaagataattcctggctcattggcactctctctaacatttgtcctttcttaagtcttggtgattgccatattcacatagatggttattctagtaacttggcctctcagttttacttcctttcttcccattatcctgttttctatcatgccttaaacatttattttcatagacataccctagtagaccttgcaattaataagaacaaattacctgcaataatttcagttttaagtatcccaccctgaccattgcttcctgttactctcatttatttccttctagttctcttgtcacggcatttcttctgccccagtggcatctgtaacccacttcacttcctccttacctggcttagattccatgacacttctgtagtccagttactctctccctgtcctggaggatctttcatatcttccctgtcctcaaacctgctaggcctcctcccccatctttactctcggttttttgttgttgggaagatagaagccatcataagtctaccatcactactcacctacttccaagtacctatctaaggccttccctcccttgggtctatgggattctatctcttctctcttacttgatgttttcctctctgctggatcattccttctgacatacaaatatactgtaatttctcccaactgaaaaaaaaaaaggttttctttccccttctgcttctcacacagtctcctcatttctctgctctccttttcttcttgtgctatcacctggatctgctcttgtctcctttacttgacctgtcagcagcatttgacatagctaattacccttactttgtaatactttttttttttaactaggcttctcagataccacacacttctaattttcttcttaccttaatgtttgttcctcagtctcctttgtgattcttcatctcccatttttttacatttgaaatgccaccagggcttgttctggaacctcttctctatgatgaagatctctaaatttgtattttcatccttgacctcttctctgaactctaaatatattctggcattctttttgatgttggatcctaataggcatctcaaagtcaacaggtccaaaacctaactcatctctcactcatccaaacctgcccttccctcagtttttcccacttcaataaatggcagtgctgtccttacagagctctggagtcatttggactcctctttctcagtccttctttagtctgtcagcaaatcctgttagctccaccatctaaatgtattgtccaaccatttaccatctccacagctaccatcctctctcacatatgttactgtaatgatgttcttttatggtttggtttttttgagacagagtctcacactttcatctaggctggagtgcagtggcgcgatctcggctcgctgcaagctccgcctcctgggttcacaccattctcctgcctcagcctcccaaatagctgggactacaggcaccagccaccacgtctggctaattttttgtatttttagtagagacggggtttcaccatgttagccaggatggtctggatctcctgacctcgtgatctgcccgccttggcctcccaaagtgctgggattataggtatgagccacggcacccggcccactgtaatgatgttgtaatggacttctgcagccctctctccacccatagtctattcccaggacagcaagcaaagtgatccttttgaaacataagtcagatcaactcagtcttttgctcaaaactctctcagagaaattgccaaaatcctaaggatggcttagaagtccatacatgtctattctctgcactccacacaccgatgcaaacataccctcatctccttggctctcatcctctcccacttcattctgttcacattaggcccctttctgttcttaagacatttcagggatgttcttgcctcagggcctttgcacttgctgttcctttttcctggaacattctttttccagatagcttattctcttacctttcttgtctctgctcagacatctgcttagtgaaggcttttctgcccatctatttaagagaacatcttctttttttatactgtctgttccctcacacacactaaaatgaaagtcccaaaaggcagacatttatattatgttcactgccgtatatccttaccatctaaaactgcctgtcacatataggtaggctcagtaaatatctgaattaatgaacatttctaaaatgtatcaggtcacaactcatcagatcatggactgccaccaaagccatgtaactgccaataaaactgggcacagaagtctaaaaattactgtgatatcaattagcagttggtcagaacttgagaaaatattttgaggtgttgaaaatagttaaaggaacttcactactagctctccaagttgggagttactgcctagaccaacaattattgaggagctgtgaccttttgagcactagttaatgatagacactgttttagtcatgacagtaatcctgaaagcaggtggaagttctcccattttaaacatgcagaaatagagcctcaagaaactgcttcatttaaagataatactagcttgacaatccactgaatatgtcctaataaatggaaacagggtgggggatgtcagcctaccagtaattggtgtcattaaaccctcttgaatgaatggacatagtaatggccttcagggtaccttgaagtatagctaaaggaatctctggagttcatttagtaaagcagttggcatccctggcctgggatcagagtaaaacctggagctagattgattacagagtgcaaggactaggcaccccgggattggagagcatccttgaaagcaagggttcttcatttatttataaaaatttgattgcctactagaagcccagctaagagtatgaagcaattaagacaacaatctttgctcaagaatctcctagacaatcctgattcaagcaccagaaacaaagggaaaagaaacctcccagtctagtgaagaaagtagtacacatcatgtcaacagataggtaattttgttgataccataagagcctattattaggcctggcatatgacaggaggtcagtatttgagttgagtattgattgatggtactgtggaagacagaggaaacacatctgacccagattggtaggctttcccagaaaagtttatgcccaagtatagtgttaacaaataagaacttctcaggtgagataggggagaagagtctgcgaggaaaacctgtctagcatggcaaatacgaagtccagagatgagagaagatggtccacgtggtttaaaagtctacaacaaggtaaaggaggtacacagtaattaaagtaggaaagatatgtcaacacctaagaatcagaactagtatcttgaaaagttaggagccctggggttttgtttttgcttttgcttttaaaggatgtgtttgttccctgtatcaccgtgcccagcttactccttttcttcggaaacacttggtgccgtattgttactggttgaatctctgtgtttggtttttaatttgttatctttgcccccatgcttaggtttgatgacaaatacaccttgaagctgaccttcatcagtgggagaacaaagcagcagcgggaagccgagttcacaaagtccattgctaagttttttgaccacagtgggacactggtcatggatgcatatgagcctgaaatatccaggctccatgacagtcttgccatagaaagaaaaataaagtagccaattctaaaagtagccctctttctcctggatcttgctgaattagtggcttggggggtgggggagataaaaagaacttaaaatgggtaaagtaagaaatgttaaaaagtcctgttttgtcctgaaattttagtctattctgggtaaataggattttctgacacagatatgagaagttgtagctctgatgtctagctgtagtctccttgatctgctgattgcattattttaatttgcttttctgggaaagcagttttgctaaaagctgtacagactttttcttttgtacctagcagtactttatatagtatagctttgggccatgtagcattttaagactcaattttaaaaaattattaatctgttgctgactcttaattcctatttcaatatgtgtttccttgaagaattcaggatacaacttcttgtgtatgacagctttcctacacacactatttttgtgggtgtgtatatatctgatttgggaagaatttaaaaaacacatagctttttaatttgtttgaaacagactttctgcctgttacatttttgcttttaaccaattaaagaagccaatggcattttagttttatattgtgttttccactagtatatccctgttgatttgtttgtgccttttattaactgccattttctaaaatttttttcaataaaaggaaggaagatgtgaaaaaaatggagtcatagttttgatggagagaacagagaaacaagtgttaacatctttctactataggtttttttcatttttaggctattttacttgtcaaaggcccctgagaacctgtagctaaggaactcttagctttccagtgataataacaataataacaacattctgtacttactttgtgccagaaatgctccaagtactttacatgtgttaataatgctcacagcaatcctaagaggcaggtgctgttattatccccattttacacatgaggaaactgagatacaaaagttaaataattgtcacacagctagtgatagaactgggattcaaacctggggagtccggcttcagagtttgtggtcctgcagagacaaaacagccgcttttccagtattttcccagtatggtcagagaagacctgggtgcttgccaagatcctttgacctttaggaatatttccctacagcctta

SEQ ID NO: 11594 - DNA, 5204 bp, Homo sapiens
aagttgttagctgacaaagtgatattaaaggagatcctccccattttgttagtatctgtaaattcatgtatctgtattttctgagttttgtggtcacagaaagaaagaatgaacaaatagagtaattttctgtactcacatttcggtaaaatgaaggtgggatatacaagtttacacttacagtctgtgcagcccatatacgttttctggttctggggttgtttttatattctctgcatggagactggcaacatcagcatcacatgagtaccacctgactctagtgacctagtctctttcaacctgatttttaattgtttggtcttttttgtttgtttttaactgcttcttgcagggctaccccataggagtgtgcccagaatagcctgttttgtcttttagttctgcaacatcagaagacaaagagtaaatattatatgtgcatgagggatgctcttaaaaaatggttcattttactttcagtaagaggccaggtttcttgatgcacaacttttttgtttgttttacagtggaagatagatgataagcctgtaaaaattgacaagtgggatggatcagctgtgaaaaactctttggatgattctgccaaaaaggtactttcttgaggaggggttggttagtatctatacagctgatggccatctctcctgggaaatcttttccttttgtaacttggagtgaccttagttttcagtgttagaaattaagtcagaaagcagtttctaaaatttctcacagaaaaagtcagaggaagtgtgttgaaatatcaccaacatggcacatgtatacatatgtaacaaacctgcacgttgtgcacatgtaccctaaaacttaaagtataataataatcaaattaaaaaaaaaagaaatatagatgttggctatctcaagaaagctggtaattttttgtttttgagattaattagcctagagcacagaaggttgagagaagataggacattcattcatgataaatcatctctccatttgtaaaagtaaaacattttagctgtgggaaaagttgaggagtttaaagttttttatatgagggattgatgaactttttctcttggttctttatagaaggcttgagttttacttgtttggtgtggtaaaatcccaactggagggaactacttggtaattcatatgattcttttatcatggaaatcaagaataaaagcacatactggggaggaagtattcctattagcttgattccttctttttctcaccaggtacttctggaaaaatacaaatatgtggagaattttggtctaattgatggtcgcctcaccatctgtacaatctcctgtttctttgccatagtggctttgatttgggattatatgcacccctttccagagtccaaacccgttttggctttgtgtgtcatatcatatcctttatttatgctcaggttgttttctagtgactatttttttaaatctgctgatatttctccctacaaaaaacaaaacggactttcatattagggcttgctaatgttagaattcaacattttgagctgtgatgtttatatagtaaatatctatcagtttatatagtaactgtcactgatattttatgttttgtatggttattttatcgtaattcatttttgttattaatgtagaggttattgtcctaatatgagcacttaatagcaaaacacatagtaatagtgaacccagctcttctcatttctagcccagaacttttcccgttagacgtggctgcttcaagccactcattctaggatattaggaaaggatctgattttggagactcagatctgtattaagtttacttgaagctgaggagctgaactggaaagtactgagcatgagatacaagtgtggcttgtattacagtggaattaagaacttattctggagctagagaatatgggtttgaaatccaaggtatctgtgatcttgtgctaatgaaaatttacttatttttgagatgatttgaataccactcatttataaatatgggtagcattcagaattatcataaagattaaatgagagattttatattgtatttgatacataatcatttcctttcccctcttttttatgataaatgtaagatcatggtcgttgcctacccagcgtgattttttttctcaagaagttgaatataaagaacttaattatacttcactattaaaataggtaattttggttggtagtttacttttttaaacaatgttaccactacctaaattttgttttgttttcgttttttttgagacagggtcttaccgtgtcacccaggctgaagtacagtggtgtgatcatgactcactgcagcgtcagcctcctggctcgagcaattctcccacctcaacctcctgagtagacgggcacatgccaccatgtctgcctaatttttaaattttttacagagacaaggtcctactacgttgcctaggctggtctcaaaactcctgggcccaagcaatcctcccaaagtgctgggattacaggcataagccactgtgcccagccaacctgaaatatgttttaaaacttcatgttggggatttatcttcagaggcagttagcaaacctctgataaagcagatcctagtcaaaaattgtattatccagattgccccacatagcccccagaagtggcaccaggtgatccttgactcctttcagtaatcagattaatcatcccagtatgaatttttcactattaaggcagttcagaagaataatattccataggttctagagacagttcccaggggaattccaaagagatttgaaaatgatagcaacattattacaaatatctggcctcccaagagaactaccttgatggtaattcatttgtttggttatatttgtttaataaaacaaggtcttatttttgtcatgtcagttttatttataatagtagggactaccattataaatgtcttctgttgctgggcatcgtggctcatgcctgtaatcccaacactttgagaggccaaggcgggcgaatcgcttgagcccaagagttcaaggccagcctgagcaacttggagaaatctgtcactactaaaaatacaaaaattagctgggcatggtggcgcatgcctgtagtcccagatagttgggaggctgaggcacaagaatcacttgaatccagggggcggaagtcacagtgagccgagatctgctactgcactccagcctgggcgatagagcaagactctgtctcaaaataaataaattaattagataaaataaaaaataaattagctgggtgtagtggcacacacctataatcccagctactgaggaagctgagatgggaggattgcttgagcctgggatgttgaggctgcagtgagctgagatcatgccactgtactctagcctgggtgacagagtgagaccctgtctcaaaaaaaaaagtcttctgtatcctagactgcatatatccttcatctctaaatctcatgataattctaaaacatcagtattatcccaattttaaaggtaaggatactaagacttggggaaggaagttatttgttacaatcatactgattaaaggccaagatttaaatctaggattatctctactctaaagtccatatactttgtactatattttcctgcctttcctgttcatgaaatttatctattttttaactcttctttaatggaatgcttcatgaatttgcctgtcatccttgtgctagggccatgctaacctctgtatcgttctaattttagtatatgtactgccgaagcgagcactgttcatgaaatttatttttattttatttattttatttttattttttgatacagggtctcactctgttgcccaggctggagtgcagtggcacgatcttgcctcactatagcctctgcctcccaggttcaagtgattctcctgcctcagccacacaagtagctgggattacgggcctgcaccactacatccagctaatttttttttggtttttgtgggttttttttgtttttttttttttttgagacagagtcttgctgtgtcacacaggctggagcacagtggcatgatctcggctcactgcaaccctgcaacctctgcttcctgggttcaagccattctcatgcctcagcctcctgagtagcaggactacaggcatgtaccaccatgcccagctaatttttgtatttttggtagagacatggggtttcaccatgttggccaggctcatctcgaactcctgacctcaagtgatctgcccacctcagcctcccaaagtgctgggattacaggtgtgagccaccacgcctagccttaatttttgtatttttagtagaaatggggtctcccattgttccttgttggccaggctggtttcaaactccaggtctcaagcaatccacctgcctcggcctcccagagtgctggtattaaaggtgtgagccatcgtgcccagccttgtttatgaaatttaaatggcacagtatacacaaagctcttatgccagtttttggcaaactataagtgcttattaactatggtacttaatactgtcaaaaacaatataataataagtctatatgcatataggaagtaatcgtagtactatttgacatactctcttatagtaaactatttgggtcacttttcttctcttaataacccttaaaatcagttgaacatggtcaagtccactgggactattcgttgttttttataaagaaataagcactattataacaaagtcttgacaaactaggtatcttattatacatgttgtctttgaacataaagatgagagctagtttatgctctgtatctttttcttttcttcctttctgaggtgtttgcagaattaaccagagagagccttgcttctcttggtatataaacataaggatgaaaatgaaatagctaaattttcagtgttttggcagcaagacaaagctgtcttctttaggactatcattatgaaagtttttatatctgttgcttgtcaatttgtgttacttctcttttatgtttgggtattttccccttaactttatttgaacctattttgtgatgatggggattctgaccatttatacctcatataaggagaagagcatctttctcgtggcccacaggaaagatcctacaggaatggatcctgatgatatttggcagctgtcctccagtcttaaaaggtatga

SEQ ID NO: 11595 - DNA, 372 bp, Homo sapiens
aagcatgtaaccggataagtgtatttttacaatggaggagttacagtcatcttggtatttgtgggagattggttccaggatccccaagcataccaaaatccaaggatgctcaagtcccttatataaaatggtatagcatttgcatataacctacacacatcctcccatatacttttaatcacctctggattacctataatacctaatataatgtaaatgctatgtaaatagttatactgcattggttttttaatttatattttttgttattttttaaaatatatttttaatccatggttggttaaatctgtagatatagagggccaactgtactgttagacacaagggtctcgaggcttgcagatagagact

SEQ ID NO: 11596 - DNA, 345 bp, Homo sapiens
gcgcctatgagaaagggaagcagaccttcattctgttgttgcagctgagttcttgcttatctcctgacagggcttctagctgccctttggcctcagccatcataatctgcatcctctaccaggccactgaagctgagttgcagaattctaaaactagcggcattataatttcattatttttattctgacttttgtattttttaagaacttttatataattcacctaccatacatacagttcacccatttaaagtgtacagttcaaaagtacctagtagtatttacagatatttgcaaccattatcacagtcaattttagagcattttcatcacctcaaaaaaaaa

SEQ ID NO: 11597 - DNA, 495 bp, Homo sapiens
tgtctctctgtgatggagaacaaaggacatagaattaaggaattaaccttagagaatgtttacattttaaagagtggagaagaatcaaagagtagtcaaatatgatagaaaatcctgggcgactatttctgagttttgttttgttttgtttttttgccctttaagtagctctctttagtaggaaagggaagaatattgacttgggttagttagttctgatttcaaatttcccctttatcacttacttggcagtatttaaccttttcagagtgtttcactgtcagaaaataggaattcagggttgtgaagattacataaaataaatacataaagcacagtgcttgtgacagagtttctttaacttcattagcaccttccctgtgacttcaagtatagacaggacttttatacattagaatggaatatttgtttaactttgtttatgtctcttgttttctccttccttttgcttccacttaaaaaaaaaaaaacaaa

SEQ ID NO: 11598 - DNA, 746 bp, Homo sapiens
ttgttgccacagggaggtagaagatcgacatgaaaaactggggatctgaaaacgagcccctatcctaggattacctgaaggtgaaacagattgagccagaaggaagacaatgctggtaggttggtttttaatttattaagaatgtttgtaattttatatttcattaaaattatttcatctacctttaccatatttttgtttaaagggtgacaatgattcctccttaaggaaggagaagtaatacgataatatttttcctccaagatagtttgctgaattatcccttgccatattcttaatatttgtttctttttatagataaagctctggggctatttcatgcctctacttccttggaagctactattgactgaacgtctttaagtcattttttttttttgtcatttctgttggttttgcttctaatctacatcttttcctaaatttttaataagtgtttttttcccccaattatttattttcttgaggttagcctagccctaagttttctaaaatggtaaaatgtgaatcttaagttcatttagcttttactctagaattgtttgaattgtaattgtactgtgatttagatcagacagtattattagataaaagattttaatactttaataactatcagccaggtatagtggctcaagcctgtaatcccagcactttgggaagccgaggtcaggagttcaagaccagcctggccaacttggcaaaaccccatctgtactaaaaaa

SEQ ID NO: 11599 - DNA, 303 bp, Homo sapiens
aaccccatctctactaaaaatacaaaaattagctgggtgtggtggtgcacgcctgtaatcccagctactcaggaggctgaggcaagagaattgcctgaaccgggaggtggaggttgcagtgagctgagatcatgccactgcactccagcctgggcaacagaaactccatctcaaaaacaaacaatcagataaacaaaaaagatgcacaaatgtgtagtcaagatcccatcacaaaagagatggcatgctaaaattaggataatttaaggaatgttttaataaagggctagttacaaacatgta

SEQ ID NO: 11600 - DNA, 1647 bp, Homo sapiens
cacaccaggaacatggatacatcacacaccagggtctgtcagtgggtggggggctaggggagagataggattaggagaaatacctaatgtagatgacaggtttatgggtgcagcaaaccaccatggcacatgtatacccatgtaacaaaccttcatgttctgcacatgtaccccagaacttcaagtataataataataaaaaaagagatgaattgattcattacacctttttatgaactaaaactcctggtgtactgccccatacatatttcgccactagactataaacaatttatcttgttcctgctgtacttaggcacccaaaagtgtatctagcaccttgtagttgttcaataaatatttgttgaatgaatgaatgaatacactgaaggcttaataaatgtttttaaactaacaactccacttaagggggacctgggtgatcataagcatcactgcaggagctttttaaaaatacaaattcctggactccaggcctatccagtcagaacctcaagaggtggcacccaagttattctgggacttacctacatttgggagccactaaaaagcatctcctaatgtgccatatcagttcttccaatgttgcctcctcccagaagtctctcatgccttccctcgccctagctatggaacgtggtttttcttgtctttgaacctttatgggtcaaatgttattatcagtattattacttctccagtggctctgttctcactctgcctccaatctcagcagtttctcttctgtctttacccatctaggtagatggtaaattccttgcaagtgggtaactctcttagaacaccttacaacatctcacacatagggtgacctgaagttcagacattctaaagtgtcattgaagactcaatgttgacttaataattggtttgtttcaagagaagaaaagcaccacctccagaatgaaagatggctgtatttcagagacactcttaaagtataatgcagcataacaagactatgaattatcagtccatctgttcacaataacttaccctgtgtgttgagattatcttctgaaaggtcaccttcaaattatatgaacagaaagaaagaaaaatactcctaacacaaccaacatgtctcagatggagactgacaatggaataattacttccaataagtagcaaacttagcatgtgataataatggccaataatactctaatagttcttgtcctagtattgtattccaggagcaattctaggcacattacctcagttctcccatcaaccttccaaaggtcattttacagatgaggaaactgaagctcatacagttactcatctttataagttccttttaaggccaggcacggtggctcatgcttgtaatcccagcactttgggaggccgaggcaggcggatcactggaggtcaggagttcaagaccagcctggacatcatagtgaaacctcatctctactaaaaatacaaaaaattagccaggcgtggtggcgggcacctgtaattccagctacttggaaagttgaaggaagacagtcacttgaacccaggaagtggaggttacagtgagctgagattgtgcaactgcactccagcctgggtgacagaatgagactccatcttaaaaaaaaaaaaaaa

SEQ ID NO: 11601 - DNA, 1647 bp, Homo sapiens; identical to SEQ ID NO: 11600

SEQ ID NO: 11602 - DNA, 1647 bp, Homo sapiens; identical to SEQ ID NO: 11600

SEQ ID NO: 11603 - DNA, 1647 bp, Homo sapiens; identical to SEQ ID NO: 11600

SEQ ID NO: 11604 - DNA, 361 bp, Homo sapiens
gctgtgtgttcatggtgtgcctgctgcttagaaccctgtgccctctttgttcaaggggtaaaactggattggaggtaaacctcagtctctttctgtacattgaaggaagagatcaatgatcttcaaaccaatcattacagatttccccagttgaatttgacttagcttttggatgttgagactgataaggtgattgaaaacctggccttaaccacagccaatgatattgagagttcaaggagaaacacacagccttttcaagggtttagaatccgattgggattgggaggaggtgtgtatccacgctacctcatggaagagtgtttctagtttaaaggagacagaaaagaaaaaaaagaaa

SEQ ID NO: 11605 - DNA, 496 bp, Homo sapiens
gggaagaccaatgtaaatccaagagcacaaatgaatggaaagtactctctgacagaggtcatcagggggtatcctcaatgagagcctgaaactctggatgtgacggagtcagagagattggggacagcttccctgagcaagtggtgctagaacctgggtctgcggtatgcataggagttaacaaagcaaggtgggtgggtattgaaagaacgttccagttgtaggattagtaccaaaaggcccctgccactattatttatgtcttctttgtgatgacttttcaggatctacatagactgttggcctttgctatcatgcaatgtatgttacctagtttcactatttctttttgagggaggataggttttttatctttttaaattaaagaacatatctatcttcagaaacaatgtattttaattaaatgattcatattttccgagaatatttttcgtatagatgttcggcacaatgtagatttgagagaccagtaaca

SEQ ID NO: 11606 - DNA, 316 bp, Homo sapiens; identical to SEQ ID NO: 5637

SEQ ID NO: 11607 - DNA, 235 bp, Homo sapiens
tggcgccatctctgcccactgtaagctccgcctcccgggttcacaccattctcctgcctcagcctcccaagtagctgggactacaggcgcctgccaccacgcccagctaattttttgtatttttagtagagacagggtttcatcatgttagccagggtggtctcgatctcctgacctcgtgatctgcctgccttggcctcccaaagtgctgggattacaggcgtgagccaccatg

SEQ ID NO: 11608 - DNA, 149 bp, Homo sapiens
gggactacaggcacccgccaccacacccggctaattgttgtatttttagtagagacggggtttcaccatgttagccaggatggtctcaatctcctgacctagtgatctgcccaccttggcctcccaaagtgctgggattacaggcgtga

SEQ ID NO: 11609 - DNA, 228 bp, Homo sapiens
ctgcaacctccacctcctggttcaagcgattctcctgcctcagcctcccacgtagctggattacaggcacgtgccaccacgcccagctaatttttgtatttttagtagagatggagtttcaccatgttggccaggatggtctcgatctcttgacctcgtgatctgcctgccttggcctcccaaagtgctgggattacaggcgtgagccactacgcccggcctgcctat

SEQ ID NO: 11610 - DNA, 259 bp, Homo sapiens; identical to SEQ ID NO: 10072

SEQ ID NO: 11611 - DNA, 319 bp, Homo sapiens
tagatttctattctttttctttttgagacggagtctcgctctgtcgcccaggctggagtgcagtggcgccatctcggctcactgcaagctccgcctcccgggttcacgccattctcctgcctcagcctcccaagtagctgggacggcaggtgcccgccaccatgcccggctaactttttgtatgtttagtacagacggggtttcaccatgttagccaggatggtctcgatctcctgaccttgtgatccgccggcctcggcctcccaaagtgctgggattacaggcgtgagccaccgcgcccggcctgatttctattctt

SEQ ID NO: 11612 - DNA, 300 bp, Homo sapiens
gtgtggtttttttttttttttttttgagacggagtctcgctctgtcacccaggctggagtgcagtggttccatctcggctcgctgcatgctccgcctcctgggctcatgccattctcctgcctcagcctctggagtagctgggactacaggcgcccgccaccatgcccggagaattttttgtatttttagtggagacggggtttcaccgtgttagccaggatggtctcgatctcctgacctcgtgatccacccgcctcggcctcccaaagtgctgggattacaggcgtgagccaccgcgc

SEQ ID NO: 11613 - DNA, 268 bp, Homo sapiens
tttatttattgagacggggtctcgctctgtcccccaggctggagtgcagtggccccatctcagctcactgcaagctccgcctcccagattcatgccattctcctgcctcagcctcctgggtagctgggactacaggcgcctgccaccgcgcccggctaattttttatatttttagtagagacgaggtttcaccatgttagccaggatggtctcgatctcctgacctcgtgatccccctgcctcggcctcccaaagtgctgggattaca

SEQ ID NO: 11614 - DNA, 296 bp, Homo sapiens; identical to SEQ ID NO: 7655

SEQ ID NO: 11615 - DNA, 2548 bp, Homo sapiens
gaattttttttttttttttttttttttttttttttttgagatggagtctcactctgtttcccaggctggagtgcagtggcgcaatctcggctgactgcaagctccgcctcccgggttcatgccattctcctgcctcagcctcccgagtagctgggactacaggcacctgccaccacgcccagctaattttttgtatttttagtagagacggcatttcactgtgttagccaggatggtctggaattcctgacctcatgatctgcccgtctcagcctcccaaagtgctgagattacaggcatcagccaccatgcccggccctaccttaatgaattttgaaatcaaatcttctatactctttgcttgttgaaaatttcccactaggcttgtagctttttctatttgtctttgtagttctatcagttcttacgtcttgtgctttgagactatgttattagagatttagcaatttaggattgttgtatcttctgggtttaagactttttggccgggcgcagtggctctcagctgtaatgccagccctttgggaggcagaggtgggcggattgcctgaggtcaggagtttgagactagcctggccaacatggggaaaccccatctctactaaaactacaaaaattagccaggcaatggtggtacacgcctgtaatcccaggtactcgggaggttgaggcaggggaattgcttgaacctgggaggcagaggttgcagtgagctgagatcatgacactgcactccagcctaggcaacagagtgagactgggtctcaaaaaaaaaaaaaaaaaaagaatttttgccttaaagtaaattttatctaggaattatatagtggtgatggctgcataatattttgaacatactgaaaaaaaattgaattatatactttaaaaggaaggaggaaaccaaccttttattttatatatatatatacacacactatatatatacatatatatacacgtatatatacacacatatatatataaaatacagctatatcagctttcttttagagtcttccaattttatatttctcagtccttttactgtatccttttttccatatccttatgccttacctgtatccttatgccttactgtatccttatgccttacctctgtctctggtaaatagcatgttgtttgttttttaaacctgtctactaattcttgtattttaactggagaatttcttttccatttatattcactgtaactattggtatatttcagtctgaatctataattttattaagttctttctttttttttttttgagacggagtcttgctctgttgcccaggctggagtgcagtggcatgaacttggctcactgcaacctctgcctcccaggttcaagctattctctggcctcagcctcccaaggtagctgggattacaggcgcatgccaccatgcccggctaatttttgtatttttagtagagacggagtttcaccatgttggctaggctggtcttgagctcctgacctcatgatccacctgcctcggccttccaaagtgctggattacaggcgtaagccaccgcgcccagccctaaatgctttgtatttgtctcctcagtcatcctcagtcatcatcagtggctttgacgtgagaagactttgtggaatggtagagaggaaagttatattggaatagggtgggagtgaacagattgagggagcagaaatagcattttgggggcaactgtttctagaagtttcgctatgaaggaaagcagagaaatgaggtggagtatgaaaagaaataataggccaaggaagaattttaagagtgagagataccagagcatgtttgtatgctgaaagagcactctttatgtgctctatattcccttttctctcctttcttgccttcttttgaattgataatatatttttaacttttctacattttttctctaccggcttggaaattatgcaccctttcactattcttttagtaatactacagggattactatatccacccttgacttatttaagtctaataggaatttatcttcttccaggatagtgcaagaaccttggaacacttttactccatttactgtcttggcttttacgtcattgttgttatacgttttaatttcatttccaacctcatgttattattattgctttatgcagccagcatcaattcaggtttataaacatatttaccatcttcattgtttttcattcttttctgcgtttgcaagctttttttttttttgagacggagtctctctctgtcgcccaggctggagtgcaggggcacagtctcggctcactgcaagctccgcctcccgggttcacgccattctcctgcctcagcctcccgagtagctgggactacaggcacccgccactatggccagctaattttttgtatttttagtagagacggggtttcaccgtgttagccaggatggtctcgatctcctgacctcgtgatccgcccgccttggcctcccaaagtgctgggattacaggggtgagccaccgcgcccggccatttgcaagct

SEQ ID NO: 11616 - DNA, 288 bp, Homo sapiens; identical to SEQ ID NO: 10079

SEQ ID NO: 11617 - DNA, 301 bp, Homo sapiens
tcttattctttttttttttttttgagacggagtttcgctctgtcgcccaggctggagtgcagtggcgcgatctcgactcactgcaagctccgcctcccgggttcacgccattctcctgcctcagcctcccgtgtagctggggctacaggtgcatgccaccatgcccggctaatttttgtatttttagtagagacggggtttcaccgtgttagccaggatggtctcgatctcctgacctcgtgatctgcccgtctcggcctcccaaagtgctgggattacaggcgtgagccaccgcgcccgg

SEQ ID NO: 11618 - DNA, 300 bp, Homo sapiens
ttttatttatttatttatttttgagacggagtcttgctctgtcgcccaggctgtagtgcagtggcgcgatctctgctcactgcaagctccgcctcccgggttcacgccattctcctgcctcagcctccggagtagctgggactacaggcgcccgccaccatgcctggctaatttttttttgtatttttagtaagacgggatttcaccgtgttagccaggatggtctcaatctcctgaccttgtgatccgcccgcctcggcctcccaaagtgctgggattacaggcgtgagccaccgcgcc

SEQ ID NO: 11619 - DNA, 120 bp, Homo sapiens
attttttgtattttcttttttagtagagacggggtttcaccgtgttagccaggatggtctcaatctcctgacctcgtgatccacccgccttggcctcccaaagtgctgggattacagggt

SEQ ID NO: 11620 - DNA, 611 bp, Homo sapiens
ttttttttttgagacggagtcttgttctgtcgcccaggctggagtgcagtggcgggatctcagctcactgcaagctccgcctcccgggttcacgtcattctcctgcctcggcctcccgagtagctgggactacaggtgcccgctactacacccggctaatttttttttttgtacttttagtaaagacagggtttcaccgtgttagccaggatggtctccatctcttgacctcgtgatcctcccgcctcagcctcccaaagtgctgggattacaggcgtgagctgccgcgcccagcccacaactgaaattttttttttttttttgagacggagtctcgctctgtcacccagactggagtgcagtggtgggatctcggctcactgcaagctctgcctcccgggttcatgccattctcctgcctcagcctccccagcagctgggactagaggcacccgccaccacgcccggctaatttttgtatttttagtagagacggggtttcactgtgttagccaggatggtctcgatctcctgaccttgtgatccgcccgcctcagcctcccaaagtgctgggattacaggcgtgagccacagcgcccggccaacaactg

SEQ ID NO: 11621 - DNA, 311 bp, Homo sapiens
acttttttttttttttttttttttgagatggagtcttgctctgttgcccaggctggaatgcagtggcgcaatctcggctcactgtaagctctgcctcccgggttcacgccattctcctgcctcagcctcccgagtagctgggactacaggcacccgccaccacgcccagctaattttttgtatttttagtagagacggggtttcaccatgttagccaggatggtctcaatctcctgacctcatgatctgcctgcctgggcctcccaaagtgctgggattacaggcgtgagccaccgcgcctggccttctat

SEQ ID NO: 11622 - DNA, 297 bp, Homo sapiens
tttctttttttttttttttgagacagagtctcgctctgttgcccaggctggagtgcagtggcacaatctcagctcactgcaagctccgcctcccgggttcactccattctcctgcctcagcctgccaagtagctgggacaacaggcacccaccaccacaccctgataatttttttgtatttttagtagagacggggtttcaccgtgttagccaggatggtctcgatctcctgaccttgtgatccgcccgcctcggcctcccaaagtgatgggattacaggcgtgctaccgcgcctag

SEQ ID NO: 11623 - DNA, 148 bp, Homo sapiens
tattttttttttttttttttttgtattttttagtagagacggggtttcaccgtgttagccaggatggtctcgatctcctgacctcgtgatctgcccgccttggcctcccaaagtgctgggattacaggcgtgagccaccgcgcctggc

SEQ ID NO: 11624 - DNA, 310 bp, Homo sapiens; identical to SEQ ID NO: 10096

SEQ ID NO: 11625 - DNA, 1059 bp, Homo sapiens
acggggtttcaccgtgttagccaggatgatctctatctcctgaccttgtgatctgcctgccttggcctcccaaagtgctgggattacaggcgtgagccaccgcgcccggccaagccgcatccttttaaattattcatctgttgaaggatgtttgaggtttttcactttttggcttttgtaagtaatatggtttggatctgtggcgccattcaaatctcacatcaaattgtaagcctgaatgttgtaggtggggcctggtgggaggtgactggattatatggttggattctcatgaatcatttaataccattgcctttggtactctctttgccataatgagtgatttctcctgagatgtcactttctttctttgtttttttgatatctcatccatcgcagtttaatctacaaatgaaatttctacagaaacaggaactattttaagaaagaaaaaaatccctcattcagacttctttggtagtggtaatggctgcaaatttgcagcatttagaaaactacactatcaacaagctttcctttatgaactgagatgtacaaaatgtagaaagcagatgaaagtgaattatttcttcaacattttagtaaaacttctgataatcagagttcaaagcacataacaactcaagcataaatgaagatggagagcctggggagtttgatttcttaaattttccaaaaaggtattattgcaaacatataggatttccccccattttaaccttaccagtttcaaaggaaagtaaaggtactggattacatgaagacagcatgtgtgcgagtgcacacgcatgcagggtggcaggtagagtgtcttaattcctttttcttactacccaagtctcacttcacagaaatcattaggtaaaggaaaaccaacgaggagttctgcagttttcttttaataactgaggctgaggcaggagaatcgcttcaaccctggaggtggaggttgcagtgagccaagattgtgccactgcattccagcctgagcgatagagtgagactccacctcaaaaaaaaaaaaaaagaaaagaaaaa

SEQ ID NO: 11626 - DNA, 310 bp, Homo sapiens
tttttttttttttttttttttttttgagacggagtctcgctctgtcgcccaggctggagtgcagtggcgcgatctcggctcattgcaagctccgcctcccgagttcacgccattctcctgcctcagcctcttgagtagctgggactacaggcgcccaccaccaagcccggctagttttgtttttgtatttttagtagagacggggtttcaccgtgttagccaggatggtctcgatctcctgaccttgtgatctgcccgccttggcctcccaaagtgctgggattgcaggcgtgagccaccgcgcccggct

SEQ ID NO: 11627 - DNA, 312 bp, Homo sapiens
tttttttttttttttttgagacggagtctcgctctgtcccccaggctggagtgcagtggcactatctcggctcactgcaggctccgcctcctgggttcacgccattttcctgcctcagcctcccgagtagctgtgactacaggtgcccgccacctcgcccggctaattttttgtatttttagtagagacggggtttcaccatgttagccaggatggtctcgatctcctgacctcgtgatccgcccgcctcagcctcccaaagtgctgggattacaggcgtgagccaccgcgcccggccaagggcttctgttt

SEQ ID NO: 11628 - DNA, 303 bp, Homo sapiens
ttctttttttttttttttttttttgaggtggagtctcgctctgtcacccaggctggagtgcagtggcacgatcttggctcactgcaagctctgcctcccgggttcccgccattctcctgcctcagcctcccgagtagctgggactacaggcgtgcgccaccacacccggctaattctttgtatttttagtagagaggggtttcaccgtgttagccaggatggtctcgatctcctgaccttgtgatccgcctgcctcagcctcccaaagtgctgggattacaggcgtgagccaccacgcccggc

SEQ ID NO: 11629 - DNA, 295 bp, Homo sapiens; identical to SEQ ID NO: 10114

SEQ ID NO: 11630 - DNA, 320 bp, Homo sapiens; identical to SEQ ID NO: 7671

SEQ ID NO: 11631 - DNA, 322 bp, Homo sapiens; identical to SEQ ID NO: 5644

SEQ ID NO: 11632 - DNA, 301 bp, Homo sapiens; identical to SEQ ID NO: 7680

SEQ ID NO: 11633 - DNA, 299 bp, Homo sapiens
tcttttcttttttttgagacggagtctcgtgctgtcacccaggctggagtgcggtggtgtgatctcggctcactgcaagctccacctcccgggttcatgccattctcctgcctcagcctcccaagtagctgggactacaggcgctcgccaccacagcgggctaattttttgtatttttagtagagacggggtttcaccgtgttagccaggatggtctcgatctcctgacctcgtgatccgcccgctttggcctcccaaagtgctgggattacaggcgtgagccaccgcgcctggcctat

SEQ ID NO: 11634 - DNA, 288 bp, Homo sapiens
tttttttttttttttttgagacggagtcttgctctgtcacccaggctggagtgcggtggcgcgatctcggctcactgcaagctccacctcctgggttcacaccattctcctgcctcagcctcccaagtagaggggactacaggcacccgccaccacacctggctaatttttttgtatttttagtagaaacagggtttcactgtgttaaccaggatggtctcgatctcctgaccttgtgatctgcctgccttggcctcccaaagtgctgggattacaggcgtgagccac

SEQ ID NO: 11635 - DNA, 1209 bp, Homo sapiens
tttttttttttttttttttttttttttgagagggtgtcttgctctgtcacccaagctggagtgtggtggcgcgatctcggatcactgcaacctctatgtcccgggttcaagctgttctcctgcctcagcctcccgagtagctgggactagaggcatgtgccaccacgcccagctaatttgtatttttagcagagacggggttttgccatgttggccagactggtctcgaattcctgacctcaggtaatctgcctgcctctgcctcccaaagtgctggggttacaggcatgagccactgtgcctggccaaggtgcatatgtcttgtatctggcattatagtatcatacagtatcatattcacagtgcacagtatcatattcacagtgcacagtatcatattcgttgtgctaaaaatctgccaattcatctctcccttcccataggccctgggcaatcctgacctttttttttttttttctttgatacagagtcttgctctgtcacccaggctgcagtgcaatggcacgatcttggctcactacaatcccgcttcctggttccagcgattctcctgcctcagcctccctagtagctgtgattacaggcacataccaccacgcctggctaatttttttgtatttttattagagatggggttttgccattttggtcaggctggtctcgaactcctgacctcagatgatctgcccaccttggcctcccaaagtgctgggattacaggcatgagccaccacgcctggcccacttttttttttttagacaaggtctcgctctgttgcccaggttggagcgcagagtggcacaatcataaactcactgcagcctccatctcctgggctcagatgatcctcccacctcagcctcccaagtagctgggactataggtgtgtgccaccacacccagctaatttttttttttttgagacggagtatcgctctgtctcccaggttggagtgcagtggtgccatctctgctcactgcaagctctgcctcctgggttcacgccattctcctgcctcagcctcccgagtagctgggactacaggcgcccaccactatgcccggctaattttttgtatttttagtagagatggggtttcaccgtgttagccaggatggtctcaatttcctgaccttgtgatctgcctgcctcggcctcccaaagtgctgggattacaggtgtgaat

SEQ ID NO: 11636 - DNA, 131 bp, Homo sapiens
ttttttttttgagatagagtttcactctgtcgcccaggctggagtgcagtggcgctatctcggctcactgcaagctccgcctcctgggttcacgccattctcctgcctcagcctcccaagtagctggaact

SEQ ID NO: 11637 - DNA, 823 bp, Homo sapiens
aagaatgctaaaaacagtcccccaatctcttctgacttgtaaagtttctgctgagaagtctgctgttagcatgatgagttatatgaccctttctctagctgtctttaagattctttcttttgtattgaccttggaaagtctgacggctatgtgctctggggatgatcatcttgtacagcaggaagagtcattctcaccctcgatcttagcaaccttagcatatgatttttattcccttgcttaaattaataacttttaccttttcgctttaagaaagcactttacagcttctctggcatatctgaattgctagcatcattacacttgtgctttggggccattagtaagataaaggttacttgaaaacaagcactgagatacagtgacagtccgtgacaactgagatggctactaagtgactaatgggtggggagaatttaagcatgaatatgccgcacaaagcaagaattcacatcatggatgctactcagaatagtgtgtaatttaaaacttatgaattgtttatttctggaattttccatttaatatttttagactacagctgaccatgcgtaattgaatgtggaaaggaaaattgcagatatggggggactactgtattaaaaaactaggacagaaaattctgtggcctgaaagacttgatccttcaggaaaatctgaacatctttgctttgtagttcaaatgtcagtaggttaagcatactgcccttgaatgtaattgtttctcaaatcttacaagagctcagagatgcaaagaaaggagccaagtgtcatgttaaacagtgttttgagtaagaaaaca

SEQ ID NO: 11638 - DNA, 185 bp, Homo sapiens
ctctactaaaaatacaaaaaaattagccgggcatggtggtggatgcctgtagtcccagctacttgggaggctgaggcaggagaatggcgtgaacccagggcgcggagcttgcagtaagccgagatggcaccactgcactccagcctgggcgacagagtgagactccgtctcaaaaaaaaaaaaaa

SEQ ID NO: 11639 - DNA, 1656 bp, Homo sapiens
catgatcatattatctacaaacagtaacattttttcttcttttgcaggcaggagagctttgttctcctttttcttgcctaattgttctgatacaaacttttggtaataatgttaagatagaagctgtggtcctggaggcatgcttgcagatcttggcttcagctgtggtccctgaagcagccctgtgtctgtatattttaaggatttaacaatgattacagtttgtataatctgttttttgacaggtaaacatctccttttgttgggtccccaggctgatgagattacctctggggttgcagagaagaagggttgtagctgagtctcaagggtgctgctgggtctgctgtgtggcctgcctttgagggttgtgttaccagagatttagacagtcacagattctttctgggccctggaaagattagatttccttgaggacattaatctatatggcaggcagtaggattgggttttgaaatttgtctgcatatgatggcccaaataccaggtgtataaatgggtttagcttttactgactacctgggaacagtttttttttttcttttttttgtgacggaatctggttctgtcgcccaggctggagtgtagtgccatgaacttggctcactgcaacctccgcctcccaggttcaagcgattctcctgcctcagcctcccaactagctgggagtacaggcgcttccatcacacccagctaatttttttttttttttgagtcggagtctcactctgtcacccaggctggagtgcagtggtgctatctcagctcactgcaagctccgcctgctgggttcatgccattctcctgcctcagccccccaagtagctgggactaaaggcgcccgtcaccgtgccaggctaattttttgtatttttaatagagacagggtttcaccgcggtctcgatctcctgacctcgtgatccgcccgcctcggcctcccaaagtgctgggattacaggtgtgagccaccgcacccggcacgctcagctaattttttgtatttttagtagagacggggtttcactgtgttagccaggctggtcttgatctcctgacctcctgatttgcccgcctcggcctcccaaagtgctgggcttacaggcgtgagccaccgcgcccagcccctgggaacagtttttataggtctctctgtgggcctctgagtgtgtacgagtggccacggactgtgactacaaatggcttgaactgagtcacagggctgcttcaaggagcacaactgaggccaggatctgcaggcctgcctccagggtcatggctgggtgtgtcttcctgcaggtctcttgatgggaaggaccatttctggactacagctgagattgagaactgcttcataatcctcagtaagaccaagctgcatgcaccattttcttgtctgtagccatgtctatgggctctggagttggccacctgggtgagggcctgctttttccaaataacccttccttggtctttgactccactgaggtttcacaaccctaactataggcaagcaccattctacttatgttttctaggaatttactacttaaaatatcttatgtaagtggaatcatacattgtcactttgttagtgtcttattaaataatggtgtctaaatagtgtcttattaaaa

SEQ ID NO: 11640 - DNA, 184 bp, Homo sapiens
ccgtctctactaaaaatacaaaaaaattagctgggcgtggtgcgggcgcctgtagtcccagctactcgggaagctgaggcaggagaatggcgtgaatccaggaggcggagcttgcagtgagccgagattgcgccactgcactccagtctgggcgacagagcgagactccacctcaaaaaaaaaa

SEQ ID NO: 11641 - DNA, 773 bp, Homo sapiens
tcaacatccagccttagaaatagctccctttaggtcaccaaattaacaggagtttctaaaggatagcagcttttttgcaactgctgcatctgttagattcatgttctctttgctcccttctccccaagcttctatttcatgatctttttgttgttttgctctacttttcctctttttaaaacctctgcattggccacccaggatttaagaggagcttttctggaaagctgtctgaaacaggaacaaattacacagaaacactgagagctgtgaacttgtgtgtatacctgacatagtgggagaggggggcttccttctaagtaatagagaagagtgaatattctaatcattgagtagtggtcaggcctgtaatcactgctttttcttttgctgagctcggtatcaacggacaagctcaaaaattgtagctatttaaaattactctccatgtaaagggttcctgttcctttgatcctatcacagactattcctttttttctattgaggaggttcataagatctcgtgggcaagggctgaggagatgactattgcgtagtgtagttgttttaaattaaaaatttacctctagttataggtgctactttttacttaccctcaatttggagattacatcatgcaggctgggcacagtggttcatgcctgtaaccccagtgctttaggaggccaaggcgggagaattgctaaaggccaggaattagagaccaccctgggcaacacagcaaggcgtcatctctaccaaaaaaaaaaaaa

SEQ ID NO: 11642 - DNA, 774 bp, Homo sapiens
tcaacatccagccttagaaatagctccctttaggtcaccaaattaacaggagtttctaaaggatagcagcttttttgcaactgctgcatctgttagattcatgttctctttgctcccttctccccaagcttctatttcatgatctttttgttgttttgctctacttttcctctttttaaaacctctgcattggccacccaggatttaagaggagcttttctggaaagctgtctgaaacaggaacaaattacacagaaacactgagagctgtgaacttgtgtgtatacctgacatagtgggagaggggggcttccttctaagtaatagagaagagtgaatattctaatcattgagtagtggtcaggcctgtaatcactgctttttcttttgctgagctcggtatcaacggacaagctcaaaaattgtagctatttaaaattactctccatgtaaagggttcctgttcctttgatcctatcacagactattcctttttttctattgaggaggttcataagatctcgtgggcaagggctgaggagatgactattgcgtagtgtagttgttttaaattaaaaatttacctctagttataggtgctactttttacttaccctcaatttggagattacatcacgcaggctgggcacagtggttcatgcctgtaaccccagtgctttaggaggccaaggcgggagaattgctaaaggccaggaattagagaccaccctgggcaacacagcaaggcgtcatctctaccaaaaaaaaaaaaaa

SEQ ID NO: 11643 - DNA, 771 bp, Homo sapiens
tcaacatccagccttagaaatagctccctttaggtcaccaaattaacaggagtttctaaaggatagcagcttttttgcaactgctgcatctgttagattcatgttctctttgctcccttctccccaagcttctatttcatgatctttttgttgttttgctctacttttcctctttttaaaacctctgcattggccacccaggatttaagaggagcttttctggaaagctgtctgaaacaggaacaaattacacagaaacactgagagctgtgaacttgtgtgtatacctgacatagtgggagaggggggcttccttctaagtaatagagaagagtgaatattctaatcattgagtagtggtcaggcctgtaatcactgctttttcttttgctgagctcggtatcaacggacaagctcaaaaattgtagctatttaaaattactctccatgtaaagggttcctgttcctttgatcctatcacagacttcctttttttctattgaggaggttcataagatctcgtgggcaagggctgaggagatgactattgcgtagtgtagttgttttaaattaaaaatttacctctagttataggtgctactttttacttaccctcaatttggagattacatcatgcaggctgggcacagtggttcatgcctgtaaccccagtgctttaggaggccaaggcgggagaattgctaaaggccaggaattagagaccaccctgggcaacacagcaaggcgtcatctctaccaaaaaaaaaaaaa

SEQ ID NO: 11644 - DNA, 560 bp, Homo sapiens
ccaaattaaaattaggcgtgtctggtcaacagtgatcacgttgcatgcttttagctttgcttgttgaagttgcttctcctccccgagtggctttcctccccacaattttttttttttgaaggaaatatcataagctctttcagaaatactcacaggaagtgagagtccgtatgctggttactcaccagcaactgagtgttggcaggtggagaatgctaccgcagcccgcccagacggatctgcagactggccccatcgcagaggattagacagagggtgcatggatcatagggtttttgaaaagaagggagttttaagaggaaattggtcactgcgtgtcatctcgaggggtggtgattcagggagcagggctgggggtcagaaggcacgtggctgccatctcagaggttgctgctcacttctcagagggcaggctggcttctaaaaatcaacgctccctccacccccaaacagcgattcttctgcagtgaatcacttccagaaatgaatagccacagttttttggaatgaacgttgtgaaatccctcctttataatggc

SEQ ID NO: 11645 - DNA, 6175 bp, Homo sapiens
tctagttcatcagaaacaagtttaattcgggaactgtagtttatccaggttccgtgaaggcaattagcactgggcaaagggctgtttgatcagcctagagagagaccgcctttacgcctaaagctccagtcatttgtctctactcccgccgactcgcagcggccacagaagacatcagaactggatgaaaatggccctgcccctgcgacagagcagggcgcttctggcttgcgccttgttatttgtccctccagtggttcctagctgttgtgacgtcaaggctgccattcagagcagagaaaaaggaaaccatggcctctcttcgcatcagtagcccggacaagctgttgtttctcaggcatccaaagcgctttctgtctggcagagctgtgcattccatgcctgggtgacctggttaaatggaggaaaccaaatgctatccgctgaatgctctccaaaacaagcattccgccctgcgcgtctcaagcacaggcttcactgcctccgaggactgtgaagggaacagcagcactgcctgcatttgctgctggcatattcagcttctggtcagggtcttaaaggagaaaataacatcctcaatggcctcgattaatgcacactcaccaacgtgtttgtgctgcctttggggtcagtgctacaaaatccttttttaaaaaaggattcggaatcacagtcagaagttcaaaactgctgaactgccacctcttccttcctgtctcacttcggctcacgccattccccaatttcaggtttctgaattccagaaaggctcttgtgtatgtgaacatattaatcttgcaccgtgccttactgaacgtgtgtatgttttgcacacacatgagaaagactcacaagtataatgcgtggatcacaactctaggattttctcaatgaagagtaacaccttatgcttttcagagaaaaggggctatttcacagtgtcacagaactctccttaggagcaagccaagatctctgtagcaaacatcaatcctgcaaggccaaaagctcactaataaagttctgatcacgtagagtgactgcctaagaattgaccaacttcagactaaattttctgaggacataccttcttgggtttctttctggcatgagagactattttattagattcttggattcaattatagtcaccagaaaaagcaaggttataacaaccacgctttgtgttccagagttgtcttagttaactcagtattcatttgaggttttatgttacaaatcccattaaatctttctcaaaatagcccttctctgaacatttgatggaagaatatttgcaggaaccaaaaccatttgatatatacaccggtatatgtcaggaaggatcgtgatacaggggtgccttttaaaagtgggttattatacgacagaattcttccaggtccctgactcttgtcttctgaaaaaaaaaaaagtggagatcttcagaggactggataaagacagaatggatggggtgaattatgtaaagttaggatttagactgagggtttacagggctgcagtctcgttttgcctcaacagtcagacttgcccagggtctggcctaataccatacaaatgtcatatccacagtggcattgatacagtggtgggaatggggcatgggggtgatgagcatagcttcttgctgagtgctctggtccgggtgagcctgagatcttgagagaaaaactaggacattatttccatcgtgggctgaagaattagttctgctacttgcatatcagttaatccttttctttttttttttttttttttttttgctattactaccatttcaggaggtacttgttatctgaagataactgatacaggaccactactgctgttttaagaggattgacttaaaactgaatcacacatttaaaaacaaacagtcactttttttttaaagatcttattgggactaagtcctgaaaaaaataaaactaaagttgaagtttagtttgttttatataatagaaatttgggatatgatgcaacagcatgttatttcttagaagaaagattgaatgttgacttctaaagcagaatcatataaagaagatgatttttgtacaagcattcgaatttccccaaaggcctctcttaatcttttgatatacaaaccattctcttgaagagtctacctctcatgtaatcacctctgttgactttctcttcaattgttaactgttgaaactgtctttcatcttgtcagtgaccctatgtgattcatgcagtttgctggtatcatttttatcaactgtgtgaaaatctgcaattccaccttacaagtgagctacattggattttcattttattctatgacattattcaaccaagaaagtgagcaagaatagatgctgatgttaatgaggactaataataagtgatcactgtgtttgtcaatatttttatatgatgatgacctttgcttccttatgcaacttggtaactacagggattcagataatgattactcgagtaatgaatccccaccccctgccaaatattatgttgtgtttaaagtactcagtatggtttagtgggctttataatcaaccacatgtagatttggaagccacccctgacacttcactgagttctataaccttgagtgtgctattcacagaacctaagattcttgatcttttatgtagagtaacaaaaccaaccttgcatcctctagacattgtaaagtcacagaaaagttttgaggaatgcagcgacatgaattttactacattttagaagaccacagctggggactctgtatgccccgcatcagctaataccatttgataggcatttttttcatggcataggtgagaacactaaggcccaaggatatgatgtactttcttggcatcacatggtttggttctggcacagccaagcctagaacccaaccttcctactgcctgctgtgtttcttcaccacccagttgctccttggcaagtgaaccaattacaaaggctgtcttacttgtccaaggacagagagaaaggtgcatcctgggtgactggaaatgggagtgggagggagaggatggaggcagcagacattgaaagtaagtattgactagacttggtgacagaatggctcagctcggctcagtgaagaagggagtccagaggccaaactttcaaccctggtgggatggctatacagttaagtaaagtaaaatcagtagaatggtgttggtttttttgcttcatgatgaatttaaagggactgccttatccagatagaaatatgttaaagatataggtaggagaggtagctaccattaaagatacagatttgagattaatgccacagaaggagagctgaaaccactgtactacatataaccgtgtgtgtgtgtgttgcacatgtgcgcacacgcacttgtgttaaactggatttgttggcgtatctccaattcaaacctgggtcaggtgattatgttgtaacttactgcccagttataatcacaaactgttacaccttcatcagaaggaagagcgagttccctagatcagtgtgtttgtgtgtttgttttgttggatggatcctgccgaggcactgagagacagactttgctgggccctgttttgtaaacaaatctgttcacgcacgctttcttctatcattggatgtgtacactggctctgattttcccacccgacacgccaaagcctaagcatttagaagcttgttttcttttagaagtaggcaggcaccaaagaaaaacctgcatatgcatttaaagtgtgcacatctaccctaagtaagtctttggatctttacagttttaactctgggccatgtacagtgtatttcagcccactacacacggcagacctgcgagacgtcctgacagcccccacaaaactatggactgagcttagtgcaaaagagaaagcccttcttacccttaaagttcactgcacgggccattgtgggattagtcaccccagatgataaaacataatactggttttcctaagtaggggtgattcagctttctcttagattggaatatgaacttaatgtatataatacatacagtcacttcctgaacttgtagttttttgcatgttttatttaatattctagccaggtttaagtttttatggcaggaagtatgtgaatggttatgacaggagtaaataacagttgattttatgattacagtacaggaagtaacttttcacaccaaataaatctttgggaaaaaagtgctggcttataaatttaacgtacataaattttccagaatcttgcatacagtcgcctgtgctctcttaaatggaactaaatacctggctggtcttttttcttttaacttttttttgtcaacgaatgtctttgttttagaaagaggcattttcaagtgttttgatgtgacccaacgtgacctaaaaccattaaaagattctaagcaaaaataataaggccaaactttagtgtaaatagcatgaaaggcttgaaaactaaataaaaaattattttttcctttaagagtaaatagctaggctaggcatggtagttcatacctgtgaacctgtgaaccattgctttggggggctgaggtgaaaggattgcttgagcccagaatttcaagacgagcctgggcaacatagcaagaccccttctctattaaaaaaaaaaaaatagccagatgtggcacacgcctgtagtcccaactactcaagaaactggggcaggaggatcacttgagcccaggagtttgaggctgcagtgagctatgatcacgccactgtacgccagcctaggcaacagagcggggggctctgtcttaaatgaccaaatcatttttcatcattaaagcccgggaagcctccaaactgccaccgagtcaagttccttccagtgactcctatagccatgatctgcaggcacttgggaggaacagcctgttaacatcagagaggctgttgcatgtgaacaagtttacagagaagaggaaagaattggatagaacttcagttacatttcattgtaagcagagctttaacagaggctttgtttttccttgaataaaaaaatgaatagcgggaatacaagatttagagaagatttctttcttcacccttttcatcttaaagcctaaagatgttgtaatgagaaaaatattgtgacattcctttctgaaggttactattacacacacgtgaattatgtgaacgaatgggtggatgcctggcagattaaaatgtagagttccagatgcattcataaccaccatgtggctatgacacagtggcacatcattgggctgggagtgaaaggatgaaggttcagacttcagccctgtgtctgggagcctcacccaaccaccctgacggaaaacaggatctctgaatcccttctacctctacaactcggtaccacacattgtgcaactaagtaacttgcaagttatgtgaaactgttttcacaggatcagcagagttaccactgcttcgttgtcctgaatcttcattacatttttacagacaatatatttgcatgtgacatgattaaaaatctaccttgtgtttttatggtctttgtaggttttaaggtagtttcttatatgctgttttccttgctgtgcagccaacctgggtgttactggcagacatgctgagggcaggctctggatgtggagtcaaggtcaggctccctggctctgaatcctggctcaaccacctactgattgtgtaaccctgggcatgtccttaagcacccagggcctcagtttccttatctgtaggatgaggattaaaaatagaacttacctccagggctgctgtgaagattaaacgaatggacggatgtgtagctcgtggtagcgcctgagctggccctgcatgtcagtgtgctgttctcgctgatgatgaaactggcttagcgaggttgggtgatatgcataagagcaaattagcaaaaaagatgagccagaactcaaacacggccttaggacttctcagtggctggtgcccttccgttgtgagaccactctctctcctgcctataaaagtgccacgaaagagtgcgctccatttcattgtttaaaagagaactgagtaaatgttaaacatgaaggtcatttgtcacggggttttactttgtttggagagggtggactctataact

SEQ ID NO: 11646 - DNA, 6171 bp, Homo sapiens
tctagttcatcagaaacaagtttaattcaggaactgtagtttatccaggttccgtgaaggcaattagcactgggcaaagggctgtttgatcagcctagagagagaccgcctttacgcctaaagctccagtcatttgtctctactcccgccgactcgcagcggccacagaagacatcagaactggatgaaaatggccctgcccctgcgacagagcagggcgcttctggcttgcgccttgttatttgtccctccagtggttcctagctgttgtgacgtcaaggctgccattcagagcagagaaaaaggaaaccatggcctctcttcgcatcagtagcccggacaagctgttgtttctcaggcatccaaagcgctttctgtctggcagagctgtgcattccatgcctgggtgacctggttaaatggaggaaaccaaatgctatccgctgaatgctctccaaaacaagcattccgccctgcgcgtctcaagcacaggcttcactgcctccgaggactgtgaagggaacagcagcactgcctgcatttgctgctggcatattcagcttctggtcagggtcttaaaggagaaaataacatcctcaatggcctcgattaatgcacactcaccaacgtgtttgtgctgcctttggggtcagtgctacaaaatccttttttaaaaaaggattcggaatcacagtcagaagttcaaaactgctgaactgccacctcttccttcctgtctcacttcggctcacgccattccccaatttcaggtttctgaattccagaaaggctcttgtgtatgtgaacatattaatcttgcaccgtgccttactgaacgtgtgtatgttttgcacacacatgagaaagactcacaagtataatgcgtggatcacaactctaggattttctcaatgaagagtaacaccttatgcttttcagagaaaaggggctatttcacagtgtcacagaactctccttaggagcaagccaagatctctgtagcaaacatcaatcctgcaaggccaaaagctcactaataaagttctgatcacgtagagtgactgcctaagaattgaccaacttcagactaaattttctgaggacataccttcttgggtttctttctggcatgagagactattttattagattcttggattcaattatagtcaccagaaaaagcaaggttataacaaccacgctttgtgttccagagttgtcttagttaactcagtattcatttgaggttttatgttacaaatcccattaaatctttctcaaaatagcccttctctgaacatttgatggaagaatatttgcaggaaccaaaaccatttgatatatacaccggtatatgtcaggaaggatcgtgatacaggggtgccttttaaaagtgggttattatacgacagaattcttccaggtccctgactcttgtcttctgaaaaaaaaaaaagtggagatcttcagaggactggataaagacagaatggatggggtgaattatgtaaagttaggatttagactgagggtttacagggctgcagtctcgttttgcctcaacagtcagacttgcccagggtctggcctaataccatacaaatgtcatatccacagtggcattgatacagtggtgggaatggggcatgggggtgatgagcatagcttcttgctgagtgctctggtccgggtgagcctgagatcttgagagaaaaactaggacattatttccatcgtgggctgaagaattagttctgctacttgcatatcagttaatccttttcttttttttttttttttttttgctattactaccatttcaggaggtacttgttacctgaagataactgatacaggaccactactgctgttttaagaggattgacttaaaactgaatcacacatttaaaaacaaacagtcactttttttttaaagatcttattgggactaagtcctgaaaaaaataaaactaaagttgaagtttagtttgttttatataatagaaatttgggatatgatgcaacagcatgttatttcttagaagaaagattgaatgttgacttctaaagcagaatcatataaagaagatgatttttgtacaagcattcgaatttccccaaaggcctctcttaatcttttgatatacaaaccattctcttgaagagtctacctctcatgtaatcacctctgttgactttctcttcaattgttaactgttgaaactgtctttcatcttgtcagtgaccctatgtgattcatgcagtttgctggtatcatttttatcaactgtgtgaaaatctgcaattccaccttacaagtgagctacattggattttcattttattctatgacattattcaaccaagaaagtgagcaagaatagatgctgatgttaatgaggactaataataagtgatcactgtgtttgtcaatatttttatatgatgatgacctttgcttccttatgcaacttggtaactacagggattcagataatgattactcgagtaatgaatccccaccccctgccaaatattatgttgtgtttaaagtactcagtatggtttagtgggctttataatcaaccacatgtagatttggaagccacccctgacacttcactgagttctataaccttgagtgtgctattcacagaacctaagattcttgatcttttatgtagagtaacaaaaccaaccttgcatcctctagacattgtaaagtcacagaaaagttttgaggaatgcagcgacatgaattttactacattttagaagaccacagctggggactctgtatgccccgcatcagctaataccatttgatagccatttttttcatggcataggtgagaacactaaggcccaaggatatgatgtactttcttggcatcacatggtttggttctggcacagccaagcctagaacccaaccttcctactgcctgctgtgtttcttcaccacccagttgctccttggcaagtgaaccaattacaaaggctgtcttacttgtccaaggacagagagaaaggtgcatcctgggtgactggaaatgggagtgggagggagaggatggaggcagcagacattgaaagtaagtattgactagacttggtgacagaatggctcagcttggctcagtgaagaagggagtccagaggccaaactttcaaccctggtgggatggctatacagttaagtaaagtaaaatcagtagaatggtgttggtttttttgcttcatgatgaatttaaagggactgccttatccagatagaaatatgttaaagatataggtaggagaggtagctaccattaaagatacagatttgagattaatgccacagaaggagagctgaaaccactgtactacatataaccgtgtgtgtgtgtgttgcacatgtgcgcacacgcacttgtgttaaactggatttgttggcgtatctccaattcaaacctgggtcaggtgattatgttgtaacttactgcccagttataatcacaaactgttacaccttcatcagaaggaagagcgagttccctagatcagtgtgtttgtgtgtttgttttgttggatggatcctgccgaggcactgagagacagactttgctgggccctgttttgtaaacaaatctgttcacgcacgctttcttctatcattggatgtgtacactggctctgattttcccacccgacacgccaaagcctaagcatttagaagcttgttttcttttagaagtaggcaggcaccaaagaaaaacctgcatatgcatttaaagtgtgcacatctaccctaagtaagtctttggatctttacagttttaactctgggccatgtacagtgtatttcagcccactacacacggcagacctgcgagacgtcctgacagcccccacaaaactatggactgagcttagtgcaaaagagaaagcccttcttacccttaaagttcactgcacgggccattgtgggattagtcaccccagatgataaaacataatactggttttcctaagtaggggtgattcagctttctcttagattggaatatgaacttaatgtatataatacatacagtcacttcctgaacttgtagttttttgcatgttttatttaatattctagccaggtttaagtttttatggcaggaagtatgtgaatggttatgacaggagtaaataacagttgattttatgattacagtacaggaagtaacttttcacaccaaataaatctttgggaaaaaagtgctggcttataaatttaacgtacataaattttccagaatcttgcatacagtcgcctgtgctctcttaaatggaactaaatacctggctggtcttttttcttttaacttttttttgtcaacgaatgtctttgttttagaaagaggcattttcaagtgttttgatgtgacccaacgtgacctaaaaccattaaaagattctaagcaaaaataataaggccaaactttagtgtaaatagcatgaaaggcttgaaaactaaataaaaaattattttttcctttaagagtaaatagctaggctaggcatggtagttcatacctgtgaacctgtgaaccattgctttggggggctgaggtgaaaggattgcttgagcccagaagttcaagacgagcctgggcaacatagcaagaccccttctctattaaaaaaaaaaaatagccagatgtggcacacgcctgtagtcccaactactcaagaaactggggcaggaggatcacttgagcccaggagtttgaggctgcagtgagctatgatcacgccactgtacgccagcctaggcaacagagcggggggctctgtcttaaatgaccaaatcatttttcatcattaaagcccgggaagcctccaaactgccaccgagtcaagttccttccagtgactcctatagccatgatctgcaggcacttgggaggaacagcctgttaacatcagagaggctgttgcatgtgaacaagtttacagagaagaggaaagaattggatagaacttcagttacatttcattgtaagcagagctttaacagaggctttgtttttccttgaataaaaaaatgaatagcgggaatacaagatttagagaagatttctttcttcacccttttcatcttaaagcctaaagatgttgtaatgagaaaaatattgtgacattcctttctgaaggttactattacacacacgtgaattatgtgaacgaatgggtggatgcctggcagattaaaatgtagagttccagatgcattcataaccaccatgtggctatgacacagtggcacatcattgggctgggagtgaaaggatgaaggttcagacttcagccctgtgtctgggagcctcacccaaccaccctgacggaaaacaggatctctgaatcccttctacctctacaactcggtaccacacattgtgcaactaagtaacttgcaagttatgtgaaactgttttcacaggatcagcagagttaccactgcttcgtcgtcctgaatcttcattacatttttacagacaatatatttgcatgtgacatgattaaaaatctaccttgtgtttttatggtctttgtaggttttaaggtagtttcttatatgctgttttccttgctgtgcagccaacctgggtgttactggcagacatgctgagggcaggctctggatgtggagtcaaggtcaggctccctggctctgaatcctggctcaaccacctactgattgtgtaaccctgggcatgtccttaagcacccagggcctcagtttccttatctgtaggatgaggattaaaaatagaacttacctccagggctgctgtgaagattaaacgaatggacggatgtgtagctcgtggtagcgcctgagctggccctgcatgtcagtgtgctgttctcgctgatgatgaaactggcttagcgaggttgggtgatatgcataagagcaaattagcaaaaaagatgagccagaactcaaacacggccttaggacttctcagtggctggtgcccttccgttgtgagaccactctctctcctgcctataaaagtgccacgaaagagtgcgctccatttcattgtttaaaagagaactgagtaaatgttaaacatgaaggacatttgtcacggggttttactttgtttggagagggtggactctataact

SEQ ID NO: 11647 - DNA, 560 bp, Homo sapiens
ccaaattaaaattaggcgtgtctggtcaacagtgatcacgttgcatgcttttagctttgcttgttgaagttgcttctcctccctgagtggctttcctccccacaattttttttttttgaaggaaatatcataagctctttcagaaatactcacaggaagtgagagtccgtatgctggttactcaccagcaactgagtgttggcaggtggagaatgctaccgcagcccgcccagacggatctgcagactggccccatcgcagaggattagacagagggtgcatggatcatagggtttttgaacagaagggagttttaagaggaaattggtcactgcgtgtcatctcgaggggtggtgattcagggagcagggctgggggtcagaaggcacgtggctgccatctcagaggttgctgctcacttctcagagggcaggctggcttctaaaaatcaacgctccctccacccccaaacagcgattcttctgcagtgaatcacttccagaaatgaatagccacagttttttggaatgaacgttgtgaaatccctcctttataatggc

SEQ ID NO: 11648 - DNA, 560 bp, Homo sapiens
ccaaattaaaattaggcgtgtctggtcaacagtgatcacgttgcatgcttttagctttgcttgttgaagttgcttctcctccccgagtggctttcctccccacaattttttttttttgaaggaaatatcataagctctttcagaaatactcacaggaagtgagagtccgtatgctggttactcaccagcaactgagtgttggcaggtggagaatgctaccgcagcccgcccagacggatctgcagactggccccatcgcagaggattagacagagggtgcatggatcatagggtttttgaacagaagggagttttaagaggaaattggtcactgcgtgtcatctcgaggggtggtgattcagggagcagggctgggggtcagaaggcacgtggctgccatctcagaggttgctgctcacttctcagagggcaggctggcttctaaaaatcaacgctccctccacccccaaacagcgattcttctgcagtgaatcacttccagaaatgaatagccacagttttttggaatgaacgttgtgaaatccctcctttataatggc

SEQ ID NO: 11649 - DNA, 6172 bp, Homo sapiens
tctagttcatcagaaacaagtttaattcgggaactgtagtttatccaggttccgtgaaggcaattagcactgggcaaagggctgtttgatcagcctagagagagaccgcctttacgcctaaagctccagtcatttgtctctactcccgccgactcgcagcggccacagaagacatcagaactggatgaaaatggccctgcccctgcgacagagcagggcgcttctggcttgcgccttgttatttgtccctccagtggttcctagctgttgtgacgtcaaggctgccattcagagcagagaaaaaggaaaccatggcctctcttcgcatcagtagcccggacaagctgttgtttctcaggcatccaaagcgctttctgtctggcagagctgtgcattccatgcctgggtgacctggttaaatggaggaaaccaaatgctatccgctgaatgctctccaaaacaagcactccgccctgcgcgtctcaagcacaggcttcactgcctccgaggactgtgaagggaacagcagcactgcctgcatttgctgctggcatattcagcttctggtcagggtcttaaaggagaaaataacatcctcaatggcctcgattaatgcacactcaccaacgtgtttgtgctgcctttggggtcagtgctacaaaatccttttttaaaaaaggattcggaatcacagtcagaagttcaaaactgctgaactgccacctcttccttcctgtctcacttcggctcacgccattccccaatttcaggtttctgaattccagaaaggctcttgtgtatgtgaacatattaatcttgcaccgtgccttactgaacgtgtgtatgttttgcacacacatgagaaagactcacaagtataatgcgtggatcacaactctaggattttctcaatgaagagtaacaccttatgcttttcagagaaaaggggctatttcacagtgtcacagaactctccttaggagcaagccaagatctctgtagcaaacatcaatcctgcaaggccaaaagctcactaataaagttctgatcacgtagagtgactgcctaagaattgaccaacttcagactaaattttctgaggacataccttcttgggtttctttctggcatgagagactattttattagattcttggattcaattatagtcaccagaaaaagcaaggttataacaaccacgctttgtgttccagagttgtcttagttaactcagtattcatttgaggttttatgttacaaatcccattaaatctttctcaaaatagcccttctctgaacatttgatggaagaatatttgcaggaaccaaaaccatttgatatatacaccggtatatgtcaggaaggatcgtgatacaggggtgccttttaaaagtgggttattatacgacagaattcttccaggtccctgactcttgtcttctgaaaaaaaaaaaagtggagatcttcagaggactggataaagacagaatggatggggtgaattatgtaaagttaggatttagactgagggtttacagggctgcagtctcgttttgcctcaacagtcagacttgcccagggtctggcctaataccatacaaatgtcatatccacagtggcattgatacagtggtgggaatggggcatgggggtgatgagcatagcttcttgctgagtgctctggtccgggtgagcctgagatcttgagagaaaaactaggacattatttccatcgtgggctgaagaattagttctgctacttgcatatcagttaatccttttctttttttttttttttttttttgctattactaccatttcaggaggtacttgttatctgaagataactgatacaggaccactactgctgttttaagaggattgacttaaaactgaatcacacatttaaaaacaaacagtcactttttttttaaagatcttattgggactaagtcctgaaaaaaataaaactaaagttgaagtttagtttgttttatataatagaaatttgggatatgatgcaacagcatgttatttcttagaagaaagattgaatgttgacttctaaagcagaatcatataaagaagatgatttttgtacaagcattcgaatttccccaaaggcctctcttaatcttttgatatacaaaccattctcttgaagagtctacctctcatgtaatcacctctgttgactttctcttcaattgttaactgttgaaactgtctttcatcttgtcagtgaccctatgtgattcatgcagtttgctggtatcatttttatcaactgtgtgaaaatctgcaattccaccttacaagtgagctacattggattttcattttattctatgacattattcaaccaagaaagtgagcaagaatagatgctgatgttaatgaggactaataataagtgatcactgtgtttgtcaatatttttatatgatgatgacctttgcttccttatgcaacttggtaactacagggattcagataatgattactcgagtaatgaatccccaccccctgccaaatattatgttgtgtttaaagtactcagtatggtttagtgggctttataatcaaccacatgtagatttggaagccacccctgacacttcactgagttctataaccttgagtgtgctattcacagaacctaagattcttgatcttttatgtagagtaacaaaaccaaccttgcatcctctagacattgtaaagtcacagaaaagttttgaggaatgcagcgacatgaattttactacattttagaagaccacagctggggactctgtatgccccgcatcagctaataccatttgatagccatttttttcatggcataggtgagaacactaaggcccaaggatatgatgtactttcttggcatcacatggtttggttctggcacagccaggcctagaacccaaccttcctactgcctgctgtgtttcttcaccacccagttgctccttggcaagtgaaccaattacaaaggctgtcttacttgtccaaggacagagagaaaggtgcatcctgggtgactggaaatgggagtgggagggagaggatggaggcagcagacattgaaagtaagtattgactagacttggtgacagaatggctcagctcggctcagtgaagaagggagtccagaggccaaactttcaaccctggtgggatggctatacagttaagtaaagtaaaatcagtagaatggtgttggtttttttgcttcatgatgaatttaaagggactgccttatccagatagaaatatgttaaagatataggtaggagaggtagctaccattaaagatacagatttgagattaatgccacagaaggagagctgaaaccactgtactacatataaccgtgtgtgtgtgtgttgcacatgtgcgcacacgcacttgtgttaaactggatttgttggcgtatctccaattcaaacctgggtcaggtgattatgttgtaacttactgcccagttataatcacaaactgttacaccttcatcagaaggaagagcgagttccctagatcagtgtgtttgtgtgtttgttttgttggatggatcctgccgaggcactgagagacagactttgctgggccctgttttgtaaacaaatctgttcacgcacgctttcttctatcattggatgtgtacactggctctgattttcccacccgacacgccaaagcctaagcatttagaagcttgttttcttttagaagtaggcaggcaccaaagaaaaacctgcatatgcatttaaagtgtgcacatctaccctaagtaagtctttggatctttacagttttaactctgggccatgtacagtgtatttcagcccactacacacggcagacctgcgagacgtcctgacagcccccacaaaactatggactgagcttagtgcaaaagagaaagcccttcttacccttaaagttcactgcacgggccattgtgggattagtcaccccagatgataaaacataatactggttttcctaagtaggggtgattcagctttctcttagattggaatatgaacttaatgtatataatacatacagtcacttcctgaacttgtagttttttgcatgttttatttaatattctagccaggtttaagtttttatggcaggaagtatgtgaatggttatgacaggagtaaataacagttgattttatgattacagtacaggaagtaacttttcacaccaaataaatctttgggaaaaaagtgctggcttataaatttaacgtacataaattttccagaatcttgcatacagtcgcctgtgctctcttaaatggaactaaatacctggctggtcttttttcttttaacttttttttgtcaacgaatgtctttgttttagaaagaggcattttcaagtgttttgatgtgacccaacgtgacctaaaaccattaaaagattctaagcaaaaataataaggccaaactttagtgtaaatagcatgaaaggcttgaaaactaaataaaaaattattttttcctttaagagtaaatagctaggctaggcatggtagttcatacctctgaacctgtgaaccattgctttggggggctgaggtgaaaggattgcttgagcccagaagttcaagacgagcctgggcaacatagcaagaccccttctctattaaaaaaaaaaaatagccagatgtggcacacgcctgtagtcccaactactcaagaaactggggcaggaggatcacttgagcccaggagtttgaggctgcagtgagctatgatcacgccactgtacgccagcctaggcaacagagcggggggctctgtcttaaatgaccaaatcatttttcatcattaaagcccgggaagcctccaaactgccaccgagtcaagttccttccagtgactcctatagccatgatctgcaggcacttgggaggaacagcctgttaacatcagagaggctgttgcatgtgaacaagtttacagagaagaggaaagaattggatagaacttcagttacatttcattgtaagcagagctttaacagaggctttgtttttccttgaataaaaaaatgaatagcgggaatacaagatttagagaagatttctttcttcacccttttcatcttaaagcctaaagatgttgtaatgagaaaaatattgtgacattcctttctgaaggttactattacacacacgtgaattatgtgaacgaatgggtggatgcctggcagattaaaatgtggagttccagatgcattcataaccaccatgtggctatgacacagtggcacatcattgggctgggagtgaaaggatgaaggttcagacttcagccctgtgtctgggagcctcacccaaccaccctgacggaaaacaggatctctgaatcccttctacctctacaactcggtaccacacattgtgcaactaagtaacttgcaagttatgtgaaactgttttcacaggatcagcagagttaccactgcttcgttgtcctgaatcttcattacatttttacagacaatatatttgcatgtgacatgattaaaaatctaccttgtgtttttatggtctttgtaggttttaaggtagtttcttatatgctgttttccttgctgtgcagccaacctgggtgttactggcagacatgctgagggcaggctctggatgtggagtcaaggtcaggctccctggctctgaatcctggctcaaccacctactgattgtgtaaccctgggcatgtccttaagcacccagggcctcagtttccttatctgtaggatgaggattaaaaatagaacttacctccagggctgctgtgaagattaaacgaatggacggatgtgtagcttgtggtagcgcctgagctggccctgcatgtcagtgtgctgttctcgctgatgatgaaactggcttagcgaggttgggtgatatgcataagagcaaattagcaaaaaagatgagccagaactcaaacacggccttaggacttctcagtggctggtgcccttccgttgtgagaccactctctctcctgcctataaaagtgccacgaaagagtgcgctccatttcattgtttaaaagagaactgagtaaatgttaaacatgaaggtcatttgtcacggggttttactttgtttggagagggtggactctataact

SEQ ID NO: 11650 - DNA, 3706 bp, Homo sapiens
gtttgttttgttttgtttttttgagacggtgtctcgctgcatcacccaggctggagtgcagtggcgcaatctcgccttcctgcagtctccgcctcctgagttcaagcgattctcctgcctcagcctcccaagtagctgggactgcaggcgcgcacaccacgcccagctaatttttgtatttttagtagagacggggtttcatcatgttgaccaggctggtctcaaactcctgacttcaggtgatccacccgccttcagcctcccaacgtgctgggattacagccgtgagccgccgcgcctggcctagacttgtgtgttctaaacaggttaagtagcaggttgggtttttatgatagtgcaaggaatgactcatgcctctgagcttctaaactgaagctgctgtaactaaaggaatctgaaaagaacaaccctgaagcagaggcctttattgtcttggttgccagtagtaccttgttttgccatgtagcagacaacacacaaaataatgcagttgtggtgtgccatgctatgtgcacagccccttggattactttgttttaaaaagcatcagagttgggggtactttagggaaacctttgcttaccttgttttgccagtgataagagcagtgggttggagggcacttggccagttttctgttcagcttttcagtgaatgtacccctttaaggttcagacttaaacttccttaaaaagtggcgttgttcatagaatcgttggactcattaatgaatcgttcaactccactcactgaagcccagacctccgtgcccaggcccaatctcgtcaggctgccagagaaagttggtgctgctcatactggtctcacagtctaagtaagtgtctgtgatgctcccaagcaaaggaaatgcaagctctggaaattcgttaatgtatttgatgtcttagtgttttagtgactagggagaccattaactagtttatcattaaccacttatcagtgtattgatgttaaagcatttccctgttagctaaaagaggcctgttcatacaagccaactggtatatacgtgtggttcatccatcatctgctgcacatagcagactagaattctgggaaccctgtgcaattcagtctgctctcccttgtggaccctggtaaagaaaagcctcagctcatagtgaacacagcagacctagaaatgtagcagcagcctactgagtagctttcatttactgatcatctgctgtgactgtggccctgtctggaggttcctaggttttgagatttagagcaatgcattctggagacagaaccagcagaacagccatttttcaatttttctttaaatcagtattccatcaggcagataactgctgtattcatgaatcttgagagtgttcctgagacagaattaatggtcatttgggaaaactatcgccatggcttcccatctgtggttttcctctaaaagccttggagattagcccttccttgccagtgagaacggtgaccgcctcctgctctgcacggtctgcggcagttgccgcttctggttaggtgtgtcaggttggcttattttgggttcaggcctggcgtagcacccacaagtggcagacatatcacaagagtccccagactctgcctagaaacagtgtttgccctttggccagtgacgtggttcatcccggcccatgttgagccatgagtggagtttccaacagagggaggaatgtgtgccttgttcaaggagggcacgacccttaggcctttttcaaccagatttagctgaagggcttgacacctttgaattacagcagttgactcagagtgcaagaagtctggccattttggaaagcaaggtttcctttcagccctgtctactgaccaataccccgactcaccttgtgtggcgcacttcagaatcagatatacctagagtatacctgtggtttggttttataattaatcagctcgttacttcagcccatgaaaatggcatccagggctgccaggagattcagagctcaaaacaaggcgagcttgagttctgcactccagatatgtgccaaaactagtaaaacttaacggacttacaaccttgtcagtttttttaatgaggcagggatactctgtttttcacactaaacatatgaatgcagcactgctgcctcagctcagcttcgtgcctgggttccccactggtctgggaagactgttgtgctccatagagcagtgcacatctgacccagagggtgggtgttcataactgctacttgctctgctctaccatgtttaaagaaatatttggatgttaaattaactcactatggtttttcacctgggaaggaaacaaattacgtactagagggcattgactggttaaaaacttgtgtatcccgggaaggacctgcggtacaggagtcagccatgtctgtgctgtgtggaaccacctgatgacatggttaacgaggaagacgatgtgttgaccggctgccgtttgaggactttggtcacccagactagacaccttctgtgctcatgtttggaaagctgaaagggaaggacagctgtgccctcctgggagctcatgtgtccctggcgctgtgctagctttcctttacagctgtttacagacaaggcaggcctgaggcagatggccactgctcttgtgatgtttgctcagaggaatatgaacattttatttttgaaaagggatgatgtggttttttgccaggtgtttataattaatcctttaatattatggttattaacctcttaaacatgaatgaattcttgattgttttaacacagtacctaagactaatgctttctgtggacaccactgagctctgcctcaactccaccctctgcgaccggaggactatgcccctagtaactgctgtcggtgtggacgctgtgctggttctgttttctaaaggagcagaaggacaggtctctgagacaggatcgttgtccctacaggaggaacagtggccttgcttcttagacggtcttcactgtgtgttttaaaacaacaacaacaacaacaacaacaacataaaactcttttgacctgtaacttaaagatcataaacttcaggcaataatattttctgtgtaagcttttaaaattatttttggggatcatagcttgttttattttgtgctataaaattaacagtattaaatgacttatattcttagaatacatcgagtgtcttttcttaacagattagtgcctttttatttttgtattccgttttacgttactggtcccagcatcaaaacccttgtttccatggcctgtttgtatattgtctcaataaaacttgcatcagccggtggtggcggcagcttcggtgtttcagtgtctcctcagtccgcccccactagcctcctggcagttcatcagtggtgaaatctctgatgcttctcagagacccttagtgctgctgctgaccaagagctagaatgaagtcttggcatccgcccattccaacactcgggcacccagaggagagcacctggggtctccctccaaaagagaaatctgcctcccagagtgtctgtcttgtaggtattgtatgggagcctagtgcttggccttctgagcatgaggcaatagttcccacaggttgcaccaccacagagaacttggatctttttccttctaggcacccatatctgaggcttctagtaaatatttcttcagcatgagcta

SEQ ID NO: 11651 - DNA, 334 bp, Homo sapiens
catctcggcaaaaaatataaaaatgagccaggcatggtgatgcaggcctgtagtcccaactactgtgcagggagggccaaggtgggaagatcttttgagcttgggaggcagaggttgcagtgagctgacataccactgcactccagcctgggtgacagaggaagatccttctcaccgccctccccgcccccacccccactaagacagtcttgctctgttgcccagagctggaatgcagtggtgtgacgtcacctcattgcaacctccacctcccgggttcaagcaattcttctgcctcagcctcccctgagtagctgggattacaggtgtgtgc

SEQ ID NO: 11652 - DNA, 2457 bp, Homo sapiens
ggatattattgctggattcctatataccattttaatcttagctgtcttctatccatttgtggacctgattgacaacttcaaccaaactcacaaatatgctccattcatcatcatcgggcttcatttagctttggggatcttttctttcactcttgacacctggagcacatcccgaggagacacagccgagatactaggaagtggtgctggaattgcatgtggatctcatgttacttataacatgggtctagtattagatccttctctagatacattacctttagctgggccccccattactgtgactctgtttggaaaagccatattgcggatcctcatagggatggtatttgtactaataatcagagatgtaatgaaaaagatcaccattcctttagcctgcaaaatcttcaatataccgtgtgatgatattcgaaaagcaagacagcacatggaagttgaacttccttatcggtatattacctatggaatggttggtttctccatcacattttttgttccttacatatttttctttattggtatctcttgatggagaagtattgtttatgataagaaaggagggtatcagttactgatacccaaaaatatattccaggtaaagccaggtcagaattaggcttttgcaggaatttaacttaaataattatttaagtaaattcataagagtcagtgcattttatcattgcacatccagatactgttttaggtgagctgagctatttcgttactgagaaaatgataagtatccatttagaatgttcatgtaatgtttggagagttttgtattatggattcaacttatatataatatatataaggtacataatatgcaattatatatctgatatatattatatataaaataatatacctaagtgtttttttaaactatgggagtgtattataaaatcaataataatatgcaaacagttgtgcctgtgtatttgaactacatacaggtatgttgttattaacagatatatttaacatttatttactatgggagccatttcctaattgaattgcgtaattactagaccagaatgcatatgctactatacattgatttactgcctgtttttacactgccattacctttcatgttatccatgatgttgaacatgggaggcatttttaatggaccaaatttttagaaaaattagtttttggatttttttttaagttctgtatactgttttgaatgaactttatttgcagctattctggatgtcagtttaataattcaggtactgaattttattgcttgctaattgtgcctttccgttgctaaattaagaaatgctatgtgtactgtgatgtaaaaataagacattaactttatcttaagttacatataatcaagcaaatattttaaaaaatgtatgtcagggtgacaggcataaaagtaaattacccttaactctttagcctttatttagaaagaaatgtggaatgggctaaactttctcaccaatttattagaaagctaaatggataaatacttccctttttgtagatatttttctgtgcattgtaagttataggagcaggacatattttttgtacattgtcttgattgtttatactgcaggtaggtatttccagtgaatggaaacgttgaaatttatagatgggacaatgcacatacttcatatgtaaacaaagcatttttctaaataatttggaaaggattggatttagcaccgttaacttttaatacccatttattggctatttaaggtaaattataaaacctaaaattagtatcagtattttagatcctattattttttcaactttctattattttcacagtggaaaatttgcgtatagtattaaactattcttttttctgtctacctttatattttgaagtgtggttgtacttacgttaatagtaagtgtatttgtagaaagtttttcataaagaagagattaactttccatataaataaataccaggtatgaaattactgattttagtgcaatatctgtatgattatccagaactatcacttcagatgtttctattttgggcaccataactatttgagctcatatttttataattctgattgagaatttaggggcatggtaatttttaccaaaactgaagctggtaattttaagtaaagcaactaaatttaccctttacttattagttaaaaggaaaccaaggcatgtaggaaaatattggtacgttggaaaatgtgaaaagagctttactttcaaaatgtatgtttaatgaattgaattttagggaccgttccaaataatttgggcctatgatatcatgtgtatttttatgtctagcttaaaaggtatttgaaaatgttccatttgtgttttattattttctgtcctatgacagttctatgctaaatgtattttaaaataaaagccaaattgaagattaaagaaggttttgctttg

SEQ ID NO: 11653 - DNA, 669 bp, Homo sapiens
atttttattttattttgtagctttctttacaagtagtgtttattaaatatatatttcagggacaacataaaaatgaattcagtggaatgaatagaatttaaaagcaaaatttccctcaccctccctgtcattcattcccttaaaggcaaattttaacagagcattcaataaagataagtaaatactaaagtggttttttaaaatatataatcacaaaaatttttaaaggctactcaagtgaagcagtgggagtggagaaagatatgatcacacaattttatatgacaaagatttcttattggtaaacaattttgttctcgttaacaaggaatgtttattctagatttaaaacctaacgtggccaagtgtggtggttcatgcctgtaatcccagccggccagtaaaatgtttaatctggacatcagtaaggatcagtttttaacattttactttatagctgcattagattttctgaagagggtttttgttgtttgataaggttttttaagaaagggaagaggtagcagtttgagaaaaagtaattagtagatattactgtgctgggtattttctcgttatttgatcaagttcttccattccttttgaaatatatatgtaagttaaaaagaaaaaacttggccagtcgcggtggctcacgcctgtaatcca

SEQ ID NO: 11654 - DNA, 5062 bp, Homo sapiens; identical to SEQ ID NO: 6361

SEQ ID NO: 11655 - DNA, 5061 bp, Homo sapiens; identical to SEQ ID NO: 6362

SEQ ID NO: 11656 - DNA, 5063 bp, Homo sapiens; identical to SEQ ID NO: 6363

SEQ ID NO: 11657 - DNA, 133 bp, Homo sapiens; identical to SEQ ID NO: 6364

SEQ ID NO: 11658 - DNA, 282 bp, Homo sapiens; identical to SEQ ID NO: 6365

SEQ ID NO: 11659 - DNA, 133 bp, Homo sapiens; identical to SEQ ID NO: 6364

SEQ ID NO: 11660 - DNA, 246 bp, Homo sapiens; identical to SEQ ID NO: 6367

SEQ ID NO: 11661 - DNA, 115 bp, Homo sapiens; identical to SEQ ID NO: 6368

SEQ ID NO: 11662 - DNA, 1585 bp, Homo sapiens
cccgcttcaggagaaactgtatgtgccatcccttttctcagagcattatgcacagataattgtgtaactgcatgaaacatatattaaaattaggtcagaagtaaagtatggttggaatttgggtatgcgtctgccacttgtctgtgtctcaagcacttaaaaacatatcctattcctggcacagttcagtgcatttcgggaagtgaccaatagtcagggaaataatcaaggtttctggaacaaaatgcaagagttggcctgagatcactgctctacctagagaggagtagggcaaggccagtctgggccatgattcagagtaaggatgactgacccagccacaggggaggacagtgcccaggacctgtgtactcctatgttcccaatgcctaagagtgcccagcccatggaaagtgttcagtgaatttaatgaataaatgattctacagaaatgggcacggggaaggagaaagggcctgcagtcttttatttttattttattattttttttttgagatggagtctcgcactgtcgcccgggctggagtgcagtggccacaatcttggctcactgcaacctccaccttccaggttaaagcgattctcctgcctcagcctcccaagtagctgggattacaggcgcccgccaaccacgcccggctaattttttgtatttttagtagagatggggtttcactatgttggccaggctggtctcgaatgcctgacctcatgatccgcctgtcttggcctcccaaagtgctgggattacaggcgtgagccactcgcccggccggtcttttattcttcatacaagtgtccttcctgcacatcccagagctatctaagacccattctgatcatcactaatgccagttccctcttctgtaaggggcagtaacacccctggtgctgcctacctcacaggattgtcctgagagaccagcgagattctgcatgtgaaggggctttctctgaatagtgaagttctacaatgtgactcatctttgcggaccctgtcctccacgtgagggtgggagacctctgctcattgccatttcttttcagattctgcagtgttaagttggaaggtttccacggaagccacattattattacataggaagtgacatcactttccagcttgttttggggggccaaaatcttgctatgttcttggccagcacctcagtttccatcctccttccaacccattgtctttctttgtaactctgcctaacaggtctgggaggtccaactttgactgaggatgttaccttcccctccccagtgctgacctcctccctcctagttacttggcataccgggaaccacatcatcaactcctgtgggtaaaaggtgacacatgagccataacactgcttgctttcccagagatgcctgggtttccaggagctgccacatcactcttcctcttttgcatcttaatgttggcagtgggaaagagttagaggtggattcctggacccagtctggcctgcattatttcagcatgtggaatagaggtcactaaccggtgtgccacaggctagtctcagcttgcaaatgtattttgtccacataa

SEQ ID NO: 11663 - DNA, 1585 bp, Homo sapiens; identical to SEQ ID NO: 9888

SEQ ID NO: 11664 - DNA, 102 bp, Homo sapiens
tacctgtaatcccagctacttgggaggctgaggcaggagaatcgcttgaacccaggaggcaaaggttgcagtgagcccagattgcaccactgcactccagcc

SEQ ID NO: 11665 - DNA, 391 bp, Homo sapiens; identical to SEQ ID NO: 9887

SEQ ID NO: 11666 - DNA, 419 bp, Homo sapiens
tgtaaagctggtgggactgccctagatatatctaatacatattcctgcccctcagacacatactctaaaacatggaggcatcacaggaaaataagtagatgaaggaaggctgggcacggtggctcatgcctgtaatcccagcactttggaggcttaggcggccgatcacttgaggtcaggggttcgagacccgcctggccaacatggtgaaaccccgtctttacaaaaatgcaaagtattagccgggcacggtggcatgcacctgtaatcctggctactcaggagcctgaggtaggaagatcccttgaacctaggaggcagaggttgcagtgagccgagatcatgccactgcactccagcctgggcgacagagcaaggctctatctcagaaaaaaaaaaagtagatgaaggaaaagtaa

SEQ ID NO: 11667 - DNA, 1598 bp, Homo sapiens
gaactcctggattcaagcaatcctctctccttggcttcccaaagtgctaggattacaggcgtgagcctctgcacccggcctcagtgtgtgctcttaattgctacactgtgccgccacttggcaatgtcacggccgcttactcttacctatgcaatcctagcatgcctttccttcttctgcttcatgctattgagcactctttgtcatcccacagaattcagttcagccatttgagaaaagcctttcctgactctaacagacaagttatgcacctctttcctgtgcttacatagtagcctgtaccaacattacatttctcattgcattatgattgcaacatctgggcacatctctctaggacgctcagctctgtggaggcaaactctttctcattcagtttgtatgcccagtttaacacctaagcgttagcacacagcagatacttggtaaatgtttgttagctgagtaagggaaaaatagatcttctagccatgaagttttaatagtgttgatgtaaaccagaaggaacatttcaaataaattatgtaattttcaataaaaaaagatatacccttgatctgtaactcacaaaaataatgtattcttctgaaacagtatacaacgaatgtttaattaaccatttgattaaatggctgagtaccctgggccaataaagcaaagtttcattaactcctctaatattcttaacggaaaacctgaagagctgacatatagtagtaaatgaaatgtgggttggtatctcagaccatcacaaatcacctcttaatacaacttcttatcatcacttaacttgaaatactttcaaagatgaagacaaagggtaataaagaagtagcaggatggagttgtactcttggtataagagaaatatacagcaagtcattataatacattagttagtaacagtgacttttctaaggtttcagttgatggttattcatccactacttaattctttcctcttaacaacctaaatgaaaagtcactgcttttaaaataacattttgtcataactctataaaacttttttttttgagacggagtcttgttctgtcacccaggctggagtgcagtggtgtgatctcagctcactgcaacctccgcctcctgggttcaagcaactctcctgcctcagcctcctgagtagctgggactacaggtgcacgctgccatgcccagctaatattctgtattttagtagagatggggtttcacccgttgtccaggctggtcacaaactcctgagctcaggcaatccgcccacctcggcctcccaaagtgctgggattacaggcgtgagccaccatgcctgaccacattaaagcttttaacatgctaatctgagtggttattgatgatggtaagatcaagttcggttgttttgtagtcattagatttaatggaaataaccattagcagagcaatgccttgtgttggattattcactatcccgttagtatcctttgttttcactttgataatacgattgccttttattgagtagaaaggaccagtatgctcaaggagttattgattcatagttgagatcaaaaaaagagaaaaaagaaatgaaaaac

SEQ ID NO: 11668 - DNA, 408 bp, Homo sapiens
aaaaatagaggaagaagccctttctaactctggtcccaaggaacacctgttgcagatgccacttagtctcaagcttagctgtcatgtcctactcataaactcagccatcttccccttctttctcatgccaaccagtatcatatgtcaggctgaatatatccgtgctgatgtcagagaatcacataacaccagaggaaaacaaggccagccagaatgttgctacattttcagagaagaaaaccaaagcaaaaaggccaaaatatagcttccaaattttgcatattgtcattgaaattcaaggtttcagataaagtttgaaactcttgaggccaagtggcgagactgcaattacgttactttttagcagctgcagtttttttctgaatcaagtcatctcactttgtaaaa

SEQ ID NO: 11669 - DNA, 912 bp, Homo sapiens
cctatctccttacagcccgcagacacaaggtaggcaataaaaaatggtttcaactttttcagtatttttacaccaaaagatgctgtcttacaagacctctatcttttgtttgttcctgtttttccctcccttcctcaccaggggagagaaaaaaacggaaggaaagaaaggaggaaatgaatcttaatgagcatctgctgtgtgctaggcacttttaaaaatacctaaggtcatcagataatttacacagaacttgggtggtagtgtgtgaaagactatgcataactgagatgattccatggcagaaaattccaagccatggaaaaaccacatcgtatttatgatggtgcacaaaccgtgatgaagaagagcaagagggaggaaggaaggacagatcccctatcgaatggcaatacttgaggattggggggtaaaaccctaaatgaacttgtagattaattcaaagccagacttactgcttctatagagagactagcacattgtttatatatcagaaagtcctgaattaatttcatgcttaatgccaaaggggttgccataacctttgcctctaagcaaggctgtctctaaataatcatcatatttttaaagttactcagattgcaggatttcctttgacagcctatttctgcttatatcacttttactatagggtgttttgtctttatttctgattttctacccccttcaaccaaagtgtgtttctgcaagcctgttctttgtggaactaatggctttttttttttttttttactgaattataaataccatgaggactttgtatctcccacagttctcatagtaagctttgcacagggtttatggcctgtaaatatttgttgaatgaacagtggaataaataaataaataatggtgatataccaatatatt

SEQ ID NO: 11670 - DNA, 3174 bp, Homo sapiens
acagtccttctacctatgctttagatcccaacccctcctccttttccccaaatcttatactatccaatggcaccaaggatagggcagtgagagcagtctacctggttgcagtcagtaaggcacacagtatctgtagagaacttaaaaagcaatgatgggccgagcgtggaggctcacgctgtaattccagtactttgggaggccgaggcgggtggatcacatgaagtcaggagttcaagaccagcctggccaacatggcgaaaccccatctctactaaaaatacaagaattagccgggcgtggtgctgcacacctgtaatgccagctactcgggatgctgagacaggaaaattgcttgaacccaggaggcaaaggttgcagtgaagcaagatcatgccactgtactccagcctaggccacagagcaagactccgtctcaaaaataaataaataaataaataaaaatataaaaagcaatgatgaaaacgacaaaaaattggtctgctttttactaaaaagtatcactgtgtgcagcaattctaaatgctgtaataaagacctctcctgctgaggcagacagctgcattgcccccttggtatgccgttgctgtcaggtcctcatctctatcgtacagtcattctctctgtctcgtacagtcactctctcagccatattcgtccctcagcagttcatcatgcttattactgtctatttaaaaaagaatcctccatttacttgtcagccacttccattttcaccctctttgtttcctgtttctaatcaaactgctcagaactgtctatacttaaacactattttctcaaatgctcacttctcagcccgttttagttccttctggagctattgccatctaatctcagtagtattcagcaccctgtctctcaaaactcttattttgaatctctcttcttatcttcttttctttcattcttgtttttgttttgagcagggtctggctctgtcgcccaggctggagtgcagtggtgtgatctgggttaattgcaacctctgcctcccaggcgcaagtgatcctcccgcctcaccctcccaagtagctgggactacaggcatgagctcccacacccagctaatttttgtatttttttttgtagagacagggttttgccatgttgtccaagctggtattgaactactgagcttaagcaatccacccgtctcggcctcccaaagtgctgggattacaggcgtcagccaccatgtcctacctactcttcttattttcttacccttcacttcctgctgctcctggtctttcttacaggctcatttttgtctgttaaatgttagatttctcaagttaaggaccaagacttcttgccttctcactccatatcagtggttctcaaattgtagcaagccctcagaatcactggagggcttgttaatacacagactgcagggccccattttcaggttcagagtttctgattcatctggtccagggtgaggcctgagaataagcatttttgttaatttcccaggtaatgttgagcttggtggtccagggaccacactttgagaaccaatgctgtatctctctagattatttcagccacacctgtgactttaattatcatttgaatttaggtaactcctaaatatgtatcttcaacccgatctcttccgagcccccgatccatagatccaactgcatacttaacatctccacttatataccttaaaggcatcaccatttcaacatatccaaaatttaaatttatgacttctgcaccctgcctctaccaccattactaacccctccctgcatgcattctccagaaaaccaactacaacatccaacctgctcctgtgcttctagttttctcttttgagtgaatacaacccacattcataagcccagcaagttacaggcttaaaagtcatcctcaacgtccctgtcttccttcccttcttttgttaccaacccctatcagttttctgtttcttcttgagccagttttggtaaatttaatttttttttttttttttttaatgagacagtccttgctctgtcgccaggctggagtgcagtggcgcgatctcggctcactgcaacctccacctcccaggttcaagcgattctcctgcctcagcctcccaagtagctgagactacaggcatgtgccaccacgcccagctaatttttgtatttttagtagagacagggtttcaccatgttggccaggatagtctccatcacttgaccttgtgatccacctgcctcggcctcccaaagtgctgggattacaggtgtgagccactgcacccggccaaactcaatttttctaagaaattgttttgtttagttttcaaagttatttataatattctctttgtttgtaaaccttctgctttatgttgcttgtctccccttccctcttgtctttcttctcttctctctctctctctgacagatctgtggatttgtcagttttccatgtaattctgtcaagttttgctttatatgttttaaagctatgttattaggtacattcaaattaagaattataatcttccttgtaaattgtttcttctttcatgagtaactgtgtttgtccctatggtgtttttttatcctaaggctttaaaaaacaaatctaaacatagttattagacatcttaattctcttaaaggacacaaggactttagaatgctttgatgttgatcaccacgaattctttcttttctttttttttttttttttttttttttgagacagagtttcactcttgttgcccaggctggagtgcaatggcgtgatctcggctcactgcaacctccgcctccccagttcaagcgattatcctgcctcagcctcctgcgtagctgggattacaggcatgtgccaccatgcccggctaattttgtagttttagtagagacaggatttctccatgttcatcaggctggtctcgaactcctgacctcaggtgatccacccacctcggcctcccaaagtgctgggattacaggtgtgagccaccgtgcctggccatccaccacttcttatcttacattttagtatcacctttattttagtatgccttcaactatcagttactgttttatgtagttaacaatagttactatccatttctttactattccttcttctgcctcactctttctc

SEQ ID NO: 11671 - DNA, 1205 bp, Homo sapiens
attatctgcttctaggttgctaaatatcaatataaagcatattattccagtaagtgccaatgcagttgttagatgctggcgctgaagttagtgctcactgcattctctcttgttggctgtctacttgagtcaccgattggcacagccagagctataaccagtctgtgaggattgatttgccctgacttgtatcttcatgtgtggtctataaggtctgccagattggcttatagtcacaaccagcatgtcctaagcaaaatgaaactatatgaacaaaaatcagctctcatttcactgctagactttggtgttttctttaagaagtagccttgttaatgcttagttttgccttggggaccttaatgtgtcattaactgcctggaaatacctttcatttaaaaaagtatactttagtacctaatgttcaatttagtatcgatctggatattttagcaaattttgacttttcaaagacaaagtttctgtcttgtaatgtttcttgggccggctatactgcctttcatctaaaactcactacagttcactgggccgtttggtaacagggtaacctgggcataattaggtgcttgattgacaagagagttaccagtaccagaagtcaggttctattttaaccccatcatttccaattgattgtttttctctccaccattattcactgtctctcaagtgttagcactctgagttgttgaacggaggtttgtatgctgcgcagagccctgtcgcaatgccccagcaagcttcttgttggcatgtggccactctaaattgtgctccaggatctgctatgggtccatgcttgcaggagaaacagctgtgtagaatttcctattgcatttcatttgtgggtttagaactcggttgcttatttcatattgtctcccttttcagtccttcaaggtacatttttccaacttctctaatgaattattacatttctgagtagctgatatgtttttatcttatctaagcagtatatttataattccttctttgcattggctaatctgattagtagttcagaacccaattttcagattgtctatagcaaactgtgaagaactgtgctgtcaaatagaaatagaatataagccccatatgtaatttaaacttttctaataccccattaaaaactataaaaggggaggaaatggaaaattagtaaaaaaaaaaaaaaaaaaaaa

SEQ ID NO: 11672 - DNA, 1205 bp, Homo sapiens
attatctgcttctaggttgctaaatatcaatataaagcatattattccagtaagtgccaatgcagttgttagatgctggcgctgaagttagtgctcactgcattctctcttgttggctgtctacttgagtcaccgattggcacagccagagctataaccagtctgtgaggattgatttgccctgacttgtatcttcatgtgtggtctataaggtctgccagattggcttatagtcacaaccagcatgtcctaagcaaaatgaaactatatgaacaaaaatcagctctcatttcactgctagactttggtgttttctttaagaagtagccttgttaatgcttagttttgccttgggggccttaatgtgtcattaactgcctggaaatacctttcatttaaaaaagtatactttagtacctaatgttcaatttagtatcgatctggatattttagcaaattttgacttttcaaagacaaagtttctgtcttgtaatgtttcttgggccggctatactgcctttcatctaaaactcactacagttcactgggccgtttggtaacagggtaacctgggcataattaggtgcttgattgacaagagagttaccagtaccagaagtcaggttctattttaaccccatcatttccaattgattgtttttctctccaccattattcactgtctctcaagtgttagcactctgagttgttgaacggaggtttgtatgctgcgcagagccctgtcgcaatgccccagcaagcttcttgttggcatgtggccactctaaattgtgctccaggatctgctatgggtccatgcttgcaggagaaacagctgtgtagaatttcctattgcatttcatttgtgggtttagaactcggttgcttatttcatattgtctcccttttcagtccttcaaggtacatttttccaacttctctaatgaattattacatttctgagtagctgatatgtttttatcttatctaagcagtatatttataattccttctttgcattggctaatctgattagtagttcagaacccaattttcagattgtctatagcaaactgtgaagaactgtgctgtcaagtagaaatagaatataagccacatatgtaatttaaacttttctaataccacattaaaaactataaaaggggaggaaatggaaaattagtaaaaaaaaaaaaaaaaaaaaa

SEQ ID NO: 11673 - DNA, 511 bp, Homo sapiens
ggaacaattgcatcaccccagaaaattccctttacagacagatctgtccctccaaacttagcctctggcatcctctgatctggttcctgtgactctaggcttttctgatgtttgtttgttggccttttctagggtttcctgtaaatggaatctcatgtcttctgcgtctgggtactttgacttagcatagtacttttgaaattcctccatgtattgcctgtgtcccttcttattgccgagcagtaatccactgtattcctactgtggattatgttccaccgttgtttatccgtccaccagatgatgaccgttgggttgtttccagtttttggctgccatgagtcaagttgctataaacgtgagagtgcaagtctgtgtgtgaatacacattttcatttctcttgggtgcatgtaacagtggggttgttaggtccaatggtaactgtatgcttaataagaaactacctgattcgctgagagagagctttaaaggaaaaaaaaaaaacaaaaa

SEQ ID NO: 11674 - DNA, 1067 bp, Homo sapiens
ggtgtcatcagatacatgatttgtaaaaattttcccttgttctatgaattctatgaattatcttttcattttcttggtgtctttggaagcataaaagtttccaattttgattttgtccagtttttctatttttcttttgttgctcttgcttttagtgtcatatctaagaaaccaatgcctaatccaaggtcataaagactatgtctatgttttcttctaagagtttggtaatttagttcttacattgagatctttgatccatttcaagttaattctgtgtatgatgtgaggtaggagtcccttagcttctgcatatgcacttttcccagcaccatttattgaaaatactcttctttccccatttaattaccttagcacccttatcaaaaatcggttagctatagatatatggtcatatttctggactcacaattttagtccattgatatatatgtctatccctatgcctatactacattgttttgttatggtagctttagagtaagtataactgctttatgttaaaatattaacctatataatcttctgccagtggtaggttttcccttattttctcatttttgagactaattttccaacttaatttggcttatagaaacctacaaaaagtattgttaaatatttttcattttcttaatactgcaaatcaaactcaaaggaaagttgggagggggtgtgctgtttaactcaggcaactagtgttctcagaatatacctgggctccaaatatgaatcagtaaaaaagatctatgcttggcgcagtggctcgcgcctgtaatcccagcactttgggaggctgaggcaggtggatctcgaggtcaagagatcgagaccatcatggccaacatggtgaaaccccgtctctactaaaaatacaaaaattagctgggcatggaggcgcgtgcctctagtcccagctattcgggaggctgaggcaggagaatcgctttttcccgggaggcagagattgcagtgagccgagatcgcaccactgaacttcagcctggtggcagagcgagaccccgtctcaaagaaaaaaaaaaaaa

SEQ ID NO: 11675 - DNA, 142 bp, Homo sapiens
ctgtaatctcagctacttgggaggctgaggcaggagaatggcttgaacccaggaggcggaggttgcagtgagccaagatcacaccactgcactccagcctgggtgacagagcaagactccgtctcaaaaaaaaaaaaaaaaa

SEQ ID NO: 11676 - DNA, 858 bp, Homo sapiens
ggaaaggctggggaaactcaccatccattaagcagaatgttttttggtccccctgtttttagcatggtccttcatctccacctccagctgtgtctggtgtccgtctgcaagtccaaatccttggttcaaccattccaggcaacctggccaaaactaaccaaacacccatgatctcccgagaggagaaaaggcagctgcctggccacagggctggggaagggaatcaggtcatcctgctcctttgccagacttttgatcgctccacctggatttagccctgtggcacagttgtgccttcgaagatgtgtagtgccttcatgtgctgagcttttctggggggcctgtagctttattctgttttcttcttcttagcttctcattctgtacacatttagatctcatttttctcttgtctgctttatatcttctttaattttgctgatgtctgtcagctgcatcatttcttctcccaatctctttgtgtttataggtttacacctttcattatttcttgcctgttattttagtattgtttcaagagtgaacagagggctaggcatggtggctcacgcctgtaatcccagcactttgggaagacgatgtggatggatcatttgaggtcaggagtttgagaccagcctggccaacatggtgacaccccacctctactaaaaatgcaaaaattagcgaggcatggtgatgcgcacctgtagtccccagctactcaggaagctgaggcaggagaatcgcttgaacccgagaggtggaggttgcagtgagccgagattgcgccactgcactctaggctgggcgacacaacaagactctgcctcaaaaaaacaaaaaaaaaaaaaaaaa

SEQ ID NO: 11677 - DNA, 27976 bp, Homo sapiens
tttctagaacaacaacataggcattttatttcttttcattaagcttcttagtttcttagtatcacaatggaatgatgagaaaacaacaaaaacgtgagtctttgcaaatctctgacaaagagcagagatctcaaggcaattggggcgggggaggcttgacagaagtgccagagcagttccaacgtcacatctctccttggctggaatggtgagaaggtggcactgtcgtgagctgtccttggcaattctgccccatgagccacgtgcgcctggtctgcatgggccaccccgcgggatttcctggtgcctcctagtacctggccacacacccctccgcctgctccaacgccctgggagcaccgtccagtgctcaggtggacccagaagccagctctgctgggcagcggcaagatgtggaggagcggcagaggcaggcagcgttgcttgcggtgggagaagccaaggagtgtgaccaaggcccatctgggagacatctgtggtggaaggtagggctggcgcaggtggcagcagcagaagtccgtgtccccaggcagtagcaggcctagagcttcacagtgccagggggcaggctgtcgttgcagagtctgtagtagcgcaggtcgttgaccagcctgtgcacattctgggtgaatgagggcaggtcctggaaggcaggggcatagctgcagccaacaacacaccaggtcacccacccaccagaccccaacagctacttccatcccagagtgtgcactgaagataggggagcactttctaaaactcaaaacttctattcactgttgcactgcgtgtcacagagactctgtgccaggcgctgtgggagaaaaagaacaagaggaatacgtccctagggcctctcgggtgccagacactgctgcaatcaacatacagacatcaactcactgagtcctcaccacaaggctgccaccaagccctaccagaaccactagtctaaggacagaaagaccaaagcgctgcaccatgaagaagctggccccagctcacactgaagagaccagcacacttgctcctgagtccggcccctcaaacgcagacatggctgtggtgacagccctcttcttcaccatggccccttgaggtgacgcgcacaccgagcaatgtctgcagaacctttacccacggggctccaggccgcccctgcccctcgagagccacccgagcagcagcaaacacagtcccaaggcctgtcccactgggcgcagcgtgggccatggaaggccctgggccagaagtgaggccctgacctccgccatcatgcacacggtgagaccctgctttttttttcagtgtaggtcccggtgaggactcaaacaggcccagcaagccccagcagagccatgagcaggaccaagttcattttcctgcccaaccactattcctcttccagaactccattcaaagcctgcctcttcccaaagtctgcacagatgcctcctatttcctggccccagcagccagctcagcgcctctgtcctgagcaatctgcttctggggagtgtgtgcaggctctggggccagaacacccaggtctgcctcctgcttcgcagctctaccacttccaagttctgtgaactgctcaccttctgagcccccaccatctgtgaaatgggggagtaacaggacccacacttcagaggcttgttagaaggcttactcgagccaagacatgtcacatgcttggcactatgtggtccacagagggtgctgtattggcctgtctaccatgaaagacttggtgaaggctgggactggtgccccagttcctggcccggggcttgagaagcagctggcttcaaacacacagtgcgtgactgaatggaaggtggtgattcttttattttaccctcaaaaaaccaactaagggatgtcttttaaatcagtggctcccaaatgccaaaccagaatttcctgggtagaacacagaagtctgtttctccatttttaataagtaccccaggtgcttctgatataactagatttttttttttgagacaaagtcccactctgccgcccaggctggagtgcagtggcacaacctccgctcactgcaacctctgcctcccgggttcaagagattcttgtgcctcagcctcccaagcagctgggattacaggcgtgtgccaccacacctgactaattttttttatttttagtagagacagggtttcgccatgttggccaggctggtctcaaaccccctaacctcaagtgatccgcccgccttggcctcccaaagtgctgagattacaggtgtgagacaccgcgcctggcctataactagattttgaaaccacagctttaaatcaaaaagttgactgatattgatgtcgttagaagctgatcattaagtattaggatctggcctctagaaaaaggaaaaaacatatccaggggctgaagtgaactggaagaggcttaggagagaacaagtcccaagaaaaggaagaccccaagacaaaggagaacaggatgagtctaagcaaaagcttccctgccacacgtggcaaatgaggaaagcaggcggccaggtttgcaccagtgagagcagtgtgtgcatctgagcactacggtggagccgtggacaagctgcttcacagaggactcaggtcaagaaccccaagaggaccagggagaaagcgatttcttttcctaatttcatcaagtataaaacggtacaaggaaaagttcccagaagttcctatcaggcaagagagaggcctggtcacctgacacaggaagaagagaacaggtgagccccatggggaaggaggtcccaggcactgtcaggctccaacaagatggcctcatggacaccaagagccagcagcacccagctcccaccgaggtgctgcacgggtggggacagcccacctgacagtccctgcacaggtggcagcagtgggacaagagggtgagtactaggagggctcctcccaggacctggcagcaactcagcccaagctgagctggggctggtctggaaagagcccaagacagccggggaacctgggtcccacctctaaccctggggacccagaagtgcagctcccaagcaccaaccatctcagcctgaatgcaagcctgggcacactccaatgctggccccaccggggctcatcacccaggagggagaacggcagggtcctgggtatgaacaaagatgccaagacaaatggaggggctgcagagccaggaactcgggacctccatggctgagactaagaacatacgtgctacagacaccaagactggggaaaaggctgtgcccctcaatcaggctacagcaccaggtcagcaggcatctcgtgagctgccgccaagctgcagggtgggcacagaccacgcccagaggcctcaatgtgccccctccttgctgcacaggtgccaggcttgcgtgcccactctgccctcctcttagcccggcctctttctctcctcacccgatccatcttgaaattccgccccagcacacttttctggttggcatccacaccatcacagctggtcaggaactctgggaggaaggcggcaaagaagccatcaaagtcgactgaggccatgttgtagatggcgatgccaatctcctcctgcagaagatcatgggacttgtggaccaggacctggagcagcacgttcacaaactggaacagcatggcagtccggaagatcttctgcaggcagagagaccaggtgagcagcagccagcccccaggggcctgtcccgggtcccatccactttctgtcacactctccagtgagtaacctgagggtgggacacaggccacaatgcccctgatggaagaatatttccaagagctggggcacttaccttgtggtacagcttctgcttggtgttgagagtctccaagtagaagagattttgtttaaaaaggtggatgtcgggctggagaaaggactgtccgaaagcctaggaaatgagaccaccattttataaactgcaagaccaagcacttctggagcatctaccccatgtcagaagaacaagtgccagggccagggtacccattgtcttgatgcttctggcccaccagctcagacctctacgacgctcctcctaagtctcagagttcatgttttccccaccgggccttgcttcttattatggtctcatatataccttttttaacaaacctctagaaacccatcacaggacctggctttgaagcaagaagctcacacctctagtcaaatccctcagcaatcctggcagacagacaccaaagcctgcctgcctgctcctgctcaagccaagcaatcccctcccttgccctccttcttgcatcccccgtctcaaaagccacaagccctacaggctccttcatggagcctccacctggaggttaagcctctgcctgggggctaagcaaagtatttttaaactgctttggaattcctgggtgtaaaagttactagttcagtccaggcacagaagctcagtcctgtaatcccagcactttgggaagccgaggtgggcggatcactgaagggtgggagttcaagaccagcctggccaacacggtaaaaccccatctctactaaaaatacaaaaattagccaggcgtggtggcggacgcctgtaatcacagctactcgggaggctgaggcaggagaatcacttcaatccaggaggcagagattgcagtaagctgagatcctaccactcactgcactccagcctaggcaacagagcaagacttatctcaaaaaaagaaaaaagaaaaaaattactagttcaggggcaaaaagaaacaccccgcacaccaacacaaagtgccctgctccaacagaaagaatagaaagtgaccatgggggcagtgggggaggccggtggtctgcaggacccccctacaaaacaagtggtgactgctttgtcattctgtccctgggcccctaagctaccagaggaggatcttgtaatccctgcagcagggatgagatctccatgatgaccaatagtttccacttatttactgtttaaagttaggttcatggaagtataacagagtaaacttttgaggtttatctttctatgaattctgacctacctgtggatttgtaccaccaccatcacaaccaagacaggacacttccatcacctggaacgtcccctcacaccctcacccctaaggcaaccactgctcattatctgtccctgtggttctaccttttccagaatgtcatagaatggcatgggatcctaccatgcgtagcctttggcatctagcttctttcacctgacagaatgcatgtgaaactcatctatgctgctgattgtaccaagaatccatgcttgcttattgccgagtgccagtcccttagaggcatgcacgagcctgttcatccattcagctgctggatactcaaagtgtttccagctttggcaattatgaaacagcttctataaacatcagtgtacaggttgtgtgaacatatgctttcatttatcttgggtaaaatacttagaagtgagactgctaggtcatacagtaactacacacttaactttaaaagaaactgccaaactgtgaaactattctccaaagtgcctttcaccagccctcagtggggaccaggcaccagcgtgccaaagaagtcttccaggcaaggacagggttcaagagaaaggcaggggaggtgcaaacacttgagtactgcagacctgaggcctcggtgggtgccagggatgggaaggccagggcaagggcacgtgcctgaaaagaactgccacacaagagtcagtatgtgtgtgtgtgcgcgcgcatgcgcacgtgcatgcctgtgtgcatgctgtgtgctagtagggagctggagggagggtggaaatccctcttgcttccccatgaggaaaagcatgcactgaaaataccaaaagagactcccctagctagactcagatgagaacgtcagacacttgagtgcagaccctgggagcgtgcctgacacagccacagagcaggctggctgtctgggcgaggtgatgccgtcccagtcttccacagcaaggggtatttagcccccagacagtgcactctctccaatggacagctgcatctgccctgaaagcgaatgctccctcccagggcagtgtttctcccagtatggtcagagtcagaatcacagtgcaggtctggggccctcctgcggagactcatattcaggcagctccccgctaagaaggccctcggtgactctggcataggcaggctctttacacttggggaaacagcactatgaggtcagcggaactgacgtttatcaagcatctctaagtgtcatgcactttgtgtatgtcatctcatttaacctcacaacaaacctgtgacccaggcaacattagctccactttgcagatgaagaaactgaggctccaagaaattaattaacttcatcaatactaacaggcagaactgagcttcagacccgagactgtggggcttcgaagacaggactcgctgcagtggtcaggttagaggaagtcacctggcagcaaccccgcccccacgttacctgcatgatggcactgaactggggctcattctccatctgctcctcagcgatccccctctggacactggccagcacggtggacttgaagaagtacctccagttgtgatggagcgtccggaaaaggagctcaaacagctcggccttcacatcaggggagggacgctgcaaagacacacagacgctcagacctgcagcttgcggagctgctccggcctgggcccagggcagcaaagatgcctaggagacgcctcgtgacagcaagccgagtgtcaacactccatccacatgcctgtcactacctgcgcaaaagacatccagcccctggagtcctgtcactgcctgtgcaaaagacatctagcccctggagttggcggttcacaccgcgagttcttcaggagagacatggcccacatttgagagagaatgcacgggtcagtgccaagggcccctttttctgatgagcactcagcttttacactagaaaaaagataccaagtggatgaacaattaggagtatggatttcctgttctattcgacctgtcagatcttcttgcttgttccttttcccaggataaaaaatgctgtcccactaacctgttggtcttacacaaccacggaggctaaagacagacccaacgccttaaagcgattctgctccccagaaggggagggtttaaagaacacttgggagccaggctctctgggccagtctcctctttcccagtagccaggattctgagaggagttagaggagaagggtcaggctcagcagtgttttctcattgactccaactcccccaatcccttattccaaatgtctctgcagaattcaaaattagaaggcccacatatattcagttcagccttgattaaaattaaatagacaccaggggccacaagcatccacagaagaagcctcataggcccagtgcatttcgtaatgcacagcaaccagacctgtcccagtctcagttcagacagttaaagattaactcttatttatacgactattaccaaaaaaactgaaattaaatctatacttattccgggtcttattatgctgagtgcctgcctattttctaagaaggacaaagggctttcctgtaacactgaaaggtttgtttgaatggtttcaagaacttgccttgtatcctcgagaccatgaatgtttctaataggaaagtacatatgttagaatgtttgctatagaaaaccagagtctcttaaaggtataaaatttgccacaggagactgatcttagcaactgaccctgtggaataactgccatgcttacactagactagctccaatgaactcaatcaatataaaaacactgtaccacaccactaaaggccttcttccttgggagaaactactttacaagcatattaaactaacaaatgaactttaaaacacaatacattttctgtgaaatctcattcccttcccaatctggagatggggggtgctgcacaggggaccgtctgagcccctacctcggcaatgatgggatacacttgctccatgcacagggcgatgatgctggggaggaagggcttgaacacctggcctggctcctggaccaccacctgcaggatcttcagaaacttctccaccacccggcagcctgtgctgccctcgtggaggatgctctcggctaactgctctctacagaggagaaagccacacagtgagcaaccacatgtttctctgggggccagcatgaaaacccatgctgtggcaagtgcagaacaggagcaaaaagccacactttgtcgccagacccaccacttctcccttgaatctgaaaactatagatggtgggtctgtgcttacctggtaaacatgttgaggaaagtctgtatgatttgctcagtgaaaggcacacccatctgtactctaaggcctcgaaacagagtgaggaagaagctcagcatctcatcagtcacatctgaggaaaggggcagagatatcgtcagaggcttgcacacagtgagaaccagaaccctgggcttcatcaacctactcctgaaatctgcactatcagctttctctacagcttcctgctggaaacatttccccaacaccatcagggccaatgatggaaagtggaaaacgattagggacatgctgagaaaatagttctggtatagggaacctccacctggtggctcactacaggaaatgaaggtcatctcgaaccctccctcattgcccgacatccagtgatggtcagagtttcactggagagggatcactttgtgcccacactgatgaatgccaactgggtcaacacctgagtgcttaagccatttccccctatgactaataatccctgcagctgggtcaggggttaagtggttgaaagtggataatgaaggtgtatttaggttgcatggccctggtccattaaatggattaattgcagaaaatactggttacatatagggcagtttcacttccagatctcaacaatcatcttgtgtagtgtgtttcagccctaactgcacgcaatctgcttgcaagaggcaatgaatatttgctgactgagaagtgcctgatatttctcttgtaaaactgacaagactactataatgctgtcatgagagctaggcaagtacatccacagagctagagaggccctctatcactgacagtgacagacaagggtgaggggaacgatctcggcaaatgcaccttgccacaaaataaggagaactaagccaaaaaagctctcttgccttctcttgtaggtgccaaggcccatatggagagctctgctcacttttccaaagggccttggccctagactccacaaataaacatcactgccctttcccctcagtaccgggtttcgttgcacggaacaagtcaaggcctgtactgcaccgactcagtgtgttctacagatctaagtgggtattctggcccttgttagcaccacccaccagtggggcctctgggccagctcctacctgactgatggataaaagctggaaagagggccagggagacctgaacagattcctgcagcgactggtagcaaatctgtcgagacttggtggactcccccgagatattctccacaatatcttctaagacgctgagtgtctggtggataatcagtttggctgcaaatcaagatgagttgcaggttataagctgtctggggagaaagcatggtaagaggagacacaagggagagggaggaaacttgcaaaggtaccaagaagatgatcacacgagtctcactaaaggaacagtctcttgattacaatataaattctcctctctttatgttttagtttttgtttttactattattactgccaggactccagaagcctggaatgtgtgttggggagaagatgcctgcctgcctgcttgctcaggtttttgcctctgttttgcctctggccattggcaacaagtccacagaagaaaaaagataaataaatgtacccccaggttgggtgccttggatttaatcaaatctaaaagatggtgaatagactggtgagaaaatgagtgtcataaggtcacaggccaggacggacacatgcagctcaaaccttgtcactcagtgggatgctactccagcccagtaatcccacaaacacctgccatgcacatgtaatggtgctggctgcaagaacaacctgcctgatccatctttggcctattagccctgtagcttgataaggcatataattactgttattatgttattgacaatacataatgctaaccctgagatgacttttgactccatatggcacacagggaaaacagatgtagtgggccgcaaacaggcagaggtcagagagccctggctatgaaccacaggtgaccatctgaaggctatgtgccatgggcaggaccctcatccatctgggagagccgacaaccccactctggcagtgctgcagtggggattagagacaaggtcccgaacgatgctagcagtgtgccagccatctaagaaggtccaggacggagatgctgccattgttcccagcgcgagtggagtcaccctcttaagatgcagagtttcccaccagcctccccaaagtgacgcccatggctcagcctgagcctagcagactcaaccctggtgaccaccagaggctgagccagagctgggctgagagctgcctcccacttggcagcagtctctgggtcccccgaaccccagtgctcagcagcctctgtgggactgccgcagctttgaggaaggggtacggcagaaagaagacatgctcaggaggcagatggaggcaggcctggccctgctgcccctcatctgaaaacgtggatagagagcatcgccccactcacagggctgaggatgaaggaagacgcttctcgccacaggcctggtcctggtcccccagtcacagtgacactggagagtaaaggaaaggctcacccacactgctgagcagggagccgtccacaactacaagcacatggacttctactcagctaggaaactgcactcagggcagccacttcctcaagaacgcacaggcaacaggggaagcagtttagagcaaaaaaccaacagtcaagagaccaaaatctgacctctggcatttaaggaaattcaaacgaggacaaaagatgtatttaaaaaaaatacaagtcaaaaattgaaagcactataagtatataataataggagaatggggtgggtaactgttatacttccatgagacaggacattataaaaccattaaaaccttttttcttttcttttttttttttttgttttcaagaagaaagaagcaatgcagcaaagtggtgcagaacacaggagctggagccattcagacccaagtccaactcttgacctcgcccactttctctacagtcctgagcaattacacctgccaagcaccttcccaatggacagactggcaggccctactcccaacaggcatccagactgagcatcaccaaggatgggacaaacagaagcaatgcaagaggaaatgcgaacacgaacatgcaccactacaccacaacctatggaaacaatcaggcaaaacaagactaggagacatatgacaagaaaacaggcctggacgcttcaaaaatgccaatgtcacgaaagacaaaaactgggcatgctcttctggatcaaaggagactaaagagatataacaaccaaacacaataaaactatcctagattacatcctggattttttaaaagcaaaaaagaacaatttggtaacaactggggaaagtgttaatgtggctacattttaaataacattattgtaccaatgtttaatatcttgttctatatagatacaaaggttaagtagtcagagatgaagtgtcaattatctgcaacttaaacagctggcttttaagaaaaagtgtgttgcagaaaaaagcataaatgtggcaaaacattcacaattagtgaatctgggtgagagagatgcagttgttcattttcttattcctttggctagtctgtaggtttggaatttttttttttcaaagtataaagttgagataagaaaaatgaaactttccaaccttaatttcaacactgtggaatgaggataagacatacctcacagggttacagggttacacaggaagttacatgaaataacgtatacaaagtgctcaacccagtgcctgcacacagtcagcatactgaagacgtcattcacatactacactgcaaaccctttcagcacacagtggcatcacacctccctgccctctgagttaagccaaggccatgtagctggctctggccaaggaaatagaggtggaagtagtgttagtttcaggcaagacctttaagaaccactacgcaattcaccacaatcccttccagagtgaacacactgaaatggagccttccacagcctgggtccctatgtgacctccccactctgctgacccatgctggacatatagtacaaacaacatatcctttttcttcttgtattaagccactacacttttggagttgtttgttaccactgagcatatcctcgcccatgcagaccaacataactcccatgtaagataaagtgcggaaaggagaccattacacgtgataaagcatgactccacaacagctggatgcaagccctgggcaagttccttaatcttctagacctcagcttcctcatgctaatcatcaatcaagatcctaacagtaccgaactcataaggctaatgtaagaactgaatgaattactgatttttgaaaaatacttagaaccaggaagagaccaacaccagactttgaaagttgatactggcatagccagagacttgacgatggatatagaatcaccaaggcaagagcctagtacacagtataccctcaatatgtcagctactctcatccagctatgtaaccatgaagcatattttaaaatagaaaagggaaggtaagaaggaagcatggttaaaatggttactttctaaaatattaaaactggtcagatttaggagttactttttccttctttgtattattctattttaatgtatttgtacaatgcacatatgttaatcttcctagttataaaagtagtgttttttaaagagtatagtatttattactatttctgacatttcacaaagcatttttgctgacattccataaatggcaccatctaataatgttctattattttctttttgtgaaaggagctcgtatttttaaaatatttcggtactatttgttatttcaaagagatatttccttattcatttttttccctctttctttaatataaacaagcaaacttcaagtgccattttttaagaaactaagctctttcaaaacctctggaagatctgtatttggaaaaaggttgaaaccaatctggaaaaatagttcttgagcgcattttcccagcgtgtagaggtgaactgctttgtttgcctacacaagcatctgaaatagatcaataaccaccttaagatgtattttatagacagaaggcaccatcaccagtgtcttccattttttcttagggctccagcattttttacattttaaataagagaagggacagtttgattctggaaataggtctggctgctgtcttaactgaattccaaaggtagcaggatcccacccccaagtatgacttcctgctcagcctctgtgggactatgaacaaaaaaaatttacctcaggagcctccggggcaaatctcatctgccacaaagaacaatgcctgcctacctccttccccagctgtcctagcctaggggtcacttactgtcatccagtggcatctttctctgtggggcaacagcactgggcttcaggttgcgatagtcccgggagagtgcagagatgaggctggcgtggttgatggagcgcacgggccactgctgctcattctctggaaggtttggccacggaagcagcaagatgttagagagggctcggcacaccaacacctgggcctacaagagaccccaaaggcatccatcagaggtcagagccaaagaccgtggtgcggcatgcccaacacagccttcagcacccgctggctgcacacctggaaccctagcccccaggctcgtttcttgcaacctgggcaaggcctttggtccaactggaaggcagcttagggaggaagatgaaatgaagtaatagcaccatgtctaggtctagcataacccagagctaacctctcgtttcctctgtaatctgatacttgaagtattagagagggaaaaatcacactgcagacactgaatctcaggcattgttcagctggtggcttctgagtcctctgagaagctacttagagcaggacttgcaggagaatccgtgacaatccatgcccctagcaccaggtcacatcctgcaatcgcatcctggtgccctctggtaccctcttcaaaccttcctgccctccctcctgttaggtggtttttaaacttctagcttgagcctcctttgaggattctaagaaaatgcacttgcctggcacttctcaaccccaaagaacacacacagaacagtgacaacaaaaaccagactgctttgaatcagaaagaatgcaaagagaattctcacaacactggccgaaattaccaggctgcaaagcagcaaaacctttctgcacactgggaggtgcttttccacgcctcaatcagcacactgactgcctgccttagaatgggcacgatgagaatcactgagtctgtgtcagtgccacacaataagaaatctgtctatgctggtacagcctgtaagctctgagtacaaaatcaaaggccagactcttcttcctcagcttccttgggtctcagtcacacagccctggggaccccgggggagctctggggcctcaccttatcgacaagtcgcagggcagaggcatcagtgattctgttgaatactttctgcactgcagggatgctgatcagaaagacgggccgcacggtggtggccagtgagaccagtaagtggcacgcagatagcagcagcttgtcttggacctgcagagggaagagggcacgtcagctcaccacatccctgtaagactgggattcgaactttgctgaggcagccacaagctatgtgtcattcttggtttccaaattacaccacctaggccctatctagctcaagaatttttcctatgatgactacaagagaagcccatcttctctgtcatgtccacagctcctgccgcagccattatcacctcctcccgttcctccttcacagtcaccagcagccttgaactcaggcacttctcagcttagagtctgcagtggctccctatcagctattaaatcacactccctggcatgtcatccaggtcctagaattcttcacctcactaattgttccagcagagccaagatctccccgagcccccgactcttctgtgccttaacactcaggccagtctctcctactgctttcccttcagcatgcctatcaaatacttggttcaattaccactgttgctttcaaattagcaaaggagaaaaacgtgttacagatgggacctaatgctggtaagactaagataaaaacagcacaccaaaaagtcaaggcaggcagaattacttcgggaaaaaaattactatgatttcccaaagtcacaaaatattcctaacctttaacccttactctaagattacctataacctataatacttactctaagaagattacctaaaagggtaaagctacattcatgaatgtgtgcatttcagaattctttataataattttttattttttaagggaggcagcctagaagtccagcaatggctaggaaaataatgaaacatattcctgatgggataggactattttcaaagttataattataaatacaacataaatttatggaaagcaacacattgttattaaaacaatacactgtttaaaaatgtataaaatgttatgtatgactaaaactacaaaaaaattcaaagaataaacacatatatgctctagtaatatagcagacttggaggataacataatagaatctgtccagttttaacatggatataacctttgactcagtaattccacttccaggaatctatccttcaggcccactagcatatgtaagatggacataaaaggaactcatttctagcaataggaaaattattatacatcctcacaaaaaaaaaaaaaaaaaaccactggacattttgacaatctgaagttgctgtacatatgtaaaggaaaatgaaggcatactgttaggcaaaagcagctatatctccagctatctacaaacttagttattacttattacataaaaagagaaaaaagtctggaaggatatacaggcatacctcagagatactgcaggttcagctccagaccaccacaataaagcaaattatgcaataacgcaaggcacactaatttttttgtttcccaatgcatatgttttgtttacactatagtctataaagtgtgcaataagcattatgtctaagaaaacaatgtacatatcttagttaaaaagtagtttattgctaaaaatgctaacaatcatctgagccttcagagcggtaatctttttgctggtgaagggtcttccttgaaagtgactgctgctgactgaacagggtggtggttgctcaaagttggggtggctgtggcaattacttaaaataagacaacaatgaagtttgctgcatcgattgacttcctttcatgaaatatttctctggagcatgcggtgccgtttcatagcattttgcccacagtagaacttctttcaaagttggagtcagtcctctcaaaccctgctgctgcttcatcaactgagtttatgtgttattctaatcctctgttatttcaacaatgttcacagcatcttcaccagttgattccatctcaaaaacccactttctttggtcatttacaagaagcaagtccccatctgttcaagcttgatcctgagattgcagcaattccatcccatcttcagactccgcctctagttctcctgttatttccacatctgcagttactttctttactgaagtcctgaaccccttaaagtcatctatgaggctgggaaccaacttcttccaaactcccattaatgctgatattttgatctgcttccatgaatcatgaatgtctttaatggcatctagaatggtgaatccttcccagaaggttttcagtttatttgcccagatccactggaggaaccaccatctatggcagctatagtcttatgaaacgtatttctgaaacaataagacttgaaagccaaaattaccccttgacccatgggctacagaactacagaatggatgttgtgtgagcagccatggaaactatggaaactaatatctttgaacatctccatctgagtccttaggtaaccaggtgcattgccaatcagcagattttgaaaggaatctttttttctgagcaggtctccataatgagcttaaaatattcagtaaaccatgatgtaaacagatgtgctgtcattcaggctttgttgttccatttatagagacaggcaaagtagattcagcataattcctaagggccctaggattttcagaatgatacatgagcactggcttcaacctgaagtctccagttgcagttgccccctgacaagagagttggcctgtcctctgaagccaggcactgactcctcctctctggctatccaagtcccagatggcaccttcttccagtataaagctgtctcatctacacagaaaatctgttgtttagtatggccaccttcagcagtgatctagaacttctggagaacttgctgcagcttctccatcagcacttgctgcttcatcctggagatggcttctttccttaaacctcatgaaccaacctgtgttagcttccaactcttcttctgtagcttcctcacctctctcagccttcacagaattgaagggcctgatctggatttggctttggcttaagggaatgttgtggctagcttggtctatccaaaccactgaaaccttcctcatatcaacaacaaggctgttgtactttctcatcactcatgtgttcactgaagcagaaattttaatctcctccaagaacttttcctttgcattcacaacttggctgtttggctcaagagcctttggccaggccgggcgcggtggctcacgcccgtaatcccagcactttgggaggccaaggcgggcagatcatgaggtcaggagatcaagaccatcctggctaacatggtgaaaccccgtctctacaaaaaatacaaaaaaattagccaggcaaggcggcaggcgccagtagtcccagctactcaagaggctgaggcaggagaatggcgtgaacccgggagacggagcttgcagtgagccaagatcacgccactgcactccagcccgggcgacagagcgagactccatctcaacaacaacaaaaacgacaaaaaaaaaaaaaaaagagcctttggcctatcctggcttttgacacgccttcctcactaagcttaatcatttctagatttttatttaaagtaagagacatgtgactcttcctttcactcgaacacgtaaaggtcattgtagggttattaaatggctcagggaatagggaggcctaaagacaggaagatggggaagcctccaatcagtggagcagtcagaacacacacatttatcaatcaagtttgcagtctttggtttgtggcactccaaaataattacaatagtaacattaaagatcactgatcacaaatcgctgtaagatatagtaacaaaaaagtctgaaatattctaacaattaccaaaatgtaacacatggaagcaccaaatactgtcaaaaaaatggtgctgacagatttgcttgatgcagggttgccataagccttcaacttgtaaaaaacacagtctctgtgaagcgcaataaagggaagtgcaataaaatgaggtgtgcctgcacaaccactgcccaactgtgcttaccgcgcgaaggaaaatgtttcagaggtatcacaactttttagtctggaaatctgaatgatattttactttttcacagtgagcatgtattcatgtggaactcagataactaaaaaagtaaagttgtatctgaatgcatgtaggctacaactaaaaaggaacatgaaataaaacagatgtataacagcagaaagatttatgggtctaactctgtgtcatatttagattttctagtaaatgggtataggaacagaaggagagacagagagttagataaaaggtgtaggctttgctgtttcgagaccttggtgctgattagaggtgtgattgcatccatggtagtagagatgagtgtcacgaactgctgcgtgttctgccggtgaacttcactgcaatactgtgctaaccagtgagagtaagcctgcagcgcagccagggactgagcatgcctgcagaaagaaaagaagatgtgattttaaaggttaaggtgaaaatatattagcgttcaactcattttcataggaggtaagaattgcatccactgcatttgctgttctaagacatgggcaacagcatagaaatcatttaccggttcacgtagaacctaaaaactaagatattcatcatctaaacattgccaccgctgactagagcacagaaggcagttagtcaatgtctactgaatcttattcaatctttctgtgacacatgctcacctaagagaaaggtaaattataaaagcaaaatcaaagaacttaagtgatcatgtgttgacttcagaactagtacaaatttaacattcctagctgcagactaaagcgtagacaactaccaggtgtgacagctttataaacagagctttgatgtcagattttggagtttaagcttccactgcaccacacattccacctggctagggaataactgaggcggcaaagactatgtttggtttcagcaaaggctgtactgactgcatcgtacatgcaacaaaatatacatcaaaaaagtatgcaattcatcaaatataataaacaatcaatcttaaacaaggagagacagttgtctcggagcttcaaaacaccaagccttccaacatacctaaatgtaattacctttcggtaataattagtaagttgtaaggtggtactactatgaggtgacacaaagacagtgttcctcatggtttgggcatttattaacgactcctgcctaaatcagtattacattggtggttgtgaattggtaatttttctatctttccttttctcctcattagttggcagtcttctctaaaaagaggctttccctcctctcatccttattttgttaatcactttgggtttttgtttatctgtttgtttacttgagacagggtcatattctgttgctcaggctggcatgcaggggcacgatcatggctcactgcagcctcaaccttctgggctcaagtgattctcctgcttcagcctcccaagtagctgggattacaggtccatgccaccatgccaggctaattgtcgtattttttgtagaaatggggtctatgttggccaggctggtctcaaactcctgacttcaagcgatccttctgccttggcctcccaaagggctgggattgcaggtgtgaggcactgcaccggcctagcctgttaatcactttgaatgagtagattattttcattcaaactggtataattcattattgtccttattctttcttgatgactgaactgtcaagtttgaccaggaagaaccctttcaagctgggtcctgcatcctcttcacatgttcccaacagtcactgagcacttccttacttgctgacttggcaagattgtccaacatcacccccccagacttgagcttttttctccaaggtgctctggagaatggatttgagaaaccaagacctggggaaaagggataggattgctactggattgtcactgtttctaggagctttcagcagacagaattaggatataggcaggtatcactttatttacttatttatgttgctgaaacagggtctcgctctgttgcccaggcaggagtgcagtggcacaatcatagctcactgcagcctccaactcctgggctcaagcaattctcctggcttgcaattctaagtggctggggccacaggcatgcaccactatgtccggctatttttttttttttttttggtagggacagagtctcactatgttgcccaggctcctctcaaactcctgggctcaagcgatcttcccacctcaacctcccaaagtgctgggattacaaacatgagccagtgtgtccagcctagacaccattttaaaagcaaactcagcatcaacaattacagggaaatttgatattaagagccttctgacatgatgcaagaggaaaggcacatcattgcctatgtagtaaccttgctaaaaatgtttaaactgaatctaatacaatggaaataattagacaaatccagattgtaggacatgcttttaaaaaaattaagatctggatctgcaaaaggtcctcagtcactctcacacacacacgcacatgcagacatacaaacacaattgggtgaactgttctagactataggaaatacatttaatgtgtggctcatgattagttagaacttggatccaagaaaaaaaaaagatacaaaaacattcctgggacaactgaagaaattttaatatggactatatatgagatgacattattgtatgtattaaattatgtgagggttgataatgatatcatagttaaagagctgaatgaacttatttctaggatacacacactgaaggatttacgggtgaagtgacatgttgtctgtaatttcttttctttcttttcttttttgagacagggtctcactctgtcacccaggctggagagcagtggtgtgatctcagcctcccgggttcaagcgactctcccagctcagcctcccgagtagttgggactacaggtgcaagtgccaccatgcccggctaatttttatattttttggtagagacagggtttcaccacgttggtcaggctggacttgaactcctgacctcaagtgatccgcctgcctcggcctcccaaaatgctgggattacaggtatgaatcatcacgttcagccatgcagtttattttcaaatggctcagcaaaataataataataatcatcatcatcatcatcatgtattgtgtgcagagagggcacaagaaacaaaagccaatttgtaattggttactctaggctaagggtccatgggtgcttattcgcctgtttttcccattttctataggtttgaactttttcaaaattagcagttgggtaagaaaatgtgctagtactttaaagtaagaaaatatagttactgaaagtttgaaattcatagtgaccacacagttattttgtattttacatttaaaattttattttatatttagaatcacattaccctttaagttctaaataccaaaataaagagaaaggacatcaaagtcagccttaggagtaagaatttcagtcaatctagcacatctgtagagctcctcaaggctgaaaggaggggctctgaaactcccaaaatgtgtacaagttgttgtatttataaggaaactggcatctttcttgggagatgctttacaactttctctaaattctcaaaagggaaagcaatatattttttaaaagtttaaaaccaccatagtaagtaagattctctttccatcgtttatctaatctgcagctcaagaatgctctacagcaggagtcggcagaccttttctgtaaaaacccgagtgtatatattttcagatttgcagggcatacatacacactgtcacagctactctactctgctgctatagtgcaaaaccactcccagaccgtatgtaaatcaatgtagctgtgtttcaataaaactttatttacaaaagcagtcagtaagccagatttggcaaaggccatagtttgccaaccccctgctctcatctaaagcaagtcttctgggcagtgaaatctctgggatactgcccatctcctgtccctgtccttccatatgtcactttcctaacagcatcccatgttatctgtagagtttctgtaggtagagagtgtggtctctagatgtcctgcttcaaaataacctggggttcttgtttaatacgcaaatacccaagccttatggccttatgccattctgctaaaatcagaatctctgagaaacgtgttccccaagcattcttctgcatcctacagtatcctacagttttagtcaatgatctacaggaaagactgatggcatctgaggtgtttcccattagtcccaacacacctatccagtctcttcttgcactacatggagtagccacctcctgcctgtgtgactgtctcagcctgtactgttctttcctcctgaaatgcctactccatagaatctccatcccagctctcacttacctaattccactttctccaaccgcctctgccccagacatatagtcaaaaaaatctctctctctttctaggtttgcagtttaagagtttttccctgattcatggcagccactactgttcctttttctcaatcaaattatttggagattgggggcaaggtctttcctaaaaatgcacaaacatcaaactctagacttacacatcaatgaggtcaggtttcaatactgatggcacagcagtttcaatgttgtacaattttatctgagatccgtacagagtgactttgaccaacctgttggcaaagaggcaggtaaacaagaacattcagcttatgaactaagacagacaaaacagacaaggctggtaccagcaaagagcgtaagggcagactttttcatatacaaaaaagaatcaagaccagactttcaattttatgccaaggaaataatctgagatatgcataaagatttatatacaagcatattaactaaagccttattgaaggtgtcaaaaactttgaaaacaatataaatatccaacccagaggaggtaatacaatgcaatatatacaataaaaaccatgcttagaggcatatttaatgataaatattcaggatgttttaaacatgacatggttgtactaaatatacatacagaatacatcgtgaatgttcatctattaacagaagacaggcgggaagaagtgtcaccaaaatatgcttattggtaccacttgttttagggggaggatagagtgggtagattatggatgatttttttccctctatttttctgcatttccaaattatctacaattaatatataatgttttataaatgaggagaataaaaaatagttcttaaaaagcaggcagaatgtggttgctcatgcctgtaatcccagcactttgggaggccaaggtgggaggatcacttgagtccaggagttcaagaccagcctggacaacaaagtaggaccctgtcttttaaaattttatccagatgtggtggcacatgcctgtagtctcagctacttgggagaggctaagtagggaggactgcttgagcccaggaggttgaggatggactaagccaggatcatgccattgcactccagcctgggtaacagaacaagaccaaaatcctgtttgtttgttttgttttgttttgttttaaaaaaaaaactgctcttttggcagtttatcgaaataggatgacgtgggcttttctataaaatttgataatgataaaaccatcttagcttttatttaaaatcatttttaaaaggaaatgtttcagatgggttgatacataataaaaaaaatacagcaaactgtccaccatagaatctatgtggtgggtatatgtgtattccctgtacaattctttcaacttttcttcaaatttgaaaatgtttgataaaactttggaggaggcagatgaaaggagcaaatgtttctagaataggtggaggtgttttatgttcaagtacaattctttcagaagcaagctgttgagcccactggttgctcaagggctcactggatactaacgagcattaaacacaataactaatagctctatctagtaggaaatgggaaatgcctctttcattacagacaggacaacattcctttctctcctcttttttttgagaaagcgtcttgctctgtcaaccaggccagaggattgtagtgatcttggctcactgcagcctagacttctggggctcaagtgatcctcccgcctcagcgccccctcccatagcggggactacaggcgcatgccaccacacccagctaaatttttttgtctttttagtagagacaggtttcgtcatgttgtccaggttggtcttgaactcctggactcaagcgatctgctcacctcagcctcccaaagtgctgggattacaggtgagccaccacgcctggagttgaaagacattcctttctgagtgaaggggaaaaaacccaagacctggctagtttctctctgcctactctgcgtggaaacctggaaatggatgccagggaaggcagtgtttgtctttgtcccagcataacaatcaactaaggaacttgttacaaatacaaacttgtatttgtatttctgattgctggggagcaatgagaaagcaatcaaaaaggagcacttccggtcagtcaagaaagtgagggcaaaagaactaaggttcccaaagtcccacgaagtcctcgtgatcagaacagttattatcagaaaacaatataccaatatgcacctggtgtttaaatcctgttctacactaaaaatgcatttccaaacatcttttaatgtgtctgtgtttagcagttctaatattagctttgttttatgtaaccaataaatgaaaacactgctaatcatactggctattaaggtcatgtagtcataacaagagccttctctcacattttattctaaatgaagacaaaatattaataacaagtatgtttaagcactgggcttggaaatctaagcagtgcagaaagatagggacctatcaaatgattcaggatctttgagacatcatctcactacaaagttgagatgactgacagatataccttttttttttttttttgagacggagtttcactcttgttgcccaggctggagtgcactggcgcgatctcagctcactgcaacctccgcctcccaggttcaagcgattctcctgtctcagcctcctgagtatctgggattacaggcgcatgtccccacgcccggctaatttttgtatttttagtagagatggggtttcatcatattggttaggctggtcttgaactcctgacctcaggtgatctgcccgcctcagcctcccaaagtgttgggattacgggcgtgagccactgcgccccgccaactgaacagataagatatatctatattgcttaacagagtaagttcaaataatggacttatctttggatttcagacagaaaaacatgtcttatccctgctaaacctcagtgcaaatgggcccagtacaagaagaggaggaggaacggactggcaatacaaacgctacggtttggaaagcgcacaacatgtggacccaggaaactgttaaaatccactctccctctcaaagactgtgtgaaccgaggcaaggcactcacatcactgagccacaatgtacttactcaacaataaaacggcaatgcctgtctctcaaagtacagaacaaaatgaaagaccatgtgcaaaaacacagaaaatgtcctactactgtgtgctgtttttattattaatatgaatctggcttttaagggatttaagccccttggctatctttgcttttcagctaagatgtggcagtgaagtctggcatgcatgcacccaggctcctgaggctcacttcccctctgcacgtcaccagtgatgcggctgctgggccagtcgaagcatcaggtgtcttggctttgggctggatccacatctactcagttttgatctaaccaattcaacagctgccttgaaatgatctaaatgtcctgtcacttacatcttgggtttttcgaggggagaaagggaggagggactgctgactgagtagaatcaagtgttcctcaacaagtgcatctgtaaacctggtgtgagacccaagaggaaggagaagaaaaggagcccagtggtgaaaggctgggaaccacctttcgggccaggcgtggaggctacccagctttcactcccgaggccctaatgggactggaaaaaacacaaaaagcaccctgtgcatctagctgcctacttggacaatggagttgactccttatcagtagggctttcttaatatctctttatcctatgaggaaagacatgaagactgacctctcctggtttctcctgggtctacaactgtgtttacatttatacacaagatcttcaaagaaacaataccttaaataacttatcaggcgttttgttatgtgctaggcacagtgctaagtgctttatctcatttaattctcacactaaacctacaggaaacaacatctacttcatattgtaaatgagggacctgaagttcagagaggttaagtaatttgttccctatcagcttgtatgtggcagagcctagatttacccggggccagagcagaagctatttggcaatatgctgcccctcacacaagaaggtaaagctgaactctgaagaaggaacagctccataaggtaactgccagcctacctttccacgactgtgagggcatcattgaaccgtgcagcaaacacatccccgataaagtactcggccaggcggcccacggcctgcagcagggagctcaagtctctcagggagcagtgcagccgccggcagtcgttctccgccgtgatgttcaacctgtgtcctggaacacaacacgccagacagtttttcacaggaagaccacgctttagatactacagataacagctggtccagcaagccacacacagcaaaaccagcag

SEQ ID NO: 11678 - DNA, 9702 bp, Homo sapiens
tttctagaacaacaacataggcattttatttcttttcattaagcttcttagtttcttagtatcacaatggaatgatgagaaaacaacaaaaacgtgagtctttgcaaatctctgacaaagagcagagatctcaaggcaattggggcgggggaggcttgacagaagtgccagagcagttccaacgtcacatctctccttggctggaatggtgagaaggtggcactgtcgtgagctgtccttggcaattctgccccatgagccacgtgcgcctggtctgcatgggccaccccgcgggatttcctggtgcctcctagtacctggccacacacccctccgcctgctccaacgccctgggagcaccgtccagtgctcaggtggacccagaagccagctctgctgggcagcggcaagatgtggaggagcggcagaggcaggcagcgttgcttgcggtgggagaagccaaggagtgtgaccaaggcccatctgggagacatctgtggtggaaggtagggctggcgcaggtggcagcagcagaagtccgtgtccccaggcagtagcaggcctagagcttcacagtgccagggggcaggctgtcgttgcagagtctgtagtagcgcaggtcgttgaccagcctgtgcacattctgggtgaatgagggcaggtcctggaaggcaggggcatagctgcagccaacaacacaccaggtcacccacccaccagaccccaacagctacttccatcccagagtgtgcactgaagataggggagcactttctaaaactcaaaacttctattcactgttgcactgcgtgtcacagagactctgtgccaggcgctgtgggagaaaaagaacaagaggaatacgtccctagggcctctcgggtgccagacactgctgcaatcaacatacagacatcaactcactgagtcctcaccacaaggctgccaccaagccctaccagaaccactagtctaaggacagaaagaccaaagcgctgcaccatgaagaagctggccccagctcacactgaagagaccagcacacttgctcctgagtccggcccctcaaacgcagacatggctgtggtgacagccctcttcttcaccatggccccttgaggtgacgcgcacaccgagcaatgtctgcagaacctttacccacggggctccaggccgcccctgcccctcgagagccacccgagcagcagcaaacacagtcccaaggcctgtcccactgggcgcagcgtgggccatggaaggccctgggccagaagtgaggccctgacctccgccatcatgcacacggtgagaccctgctttttttttcagtgtaggtcccggtgaggactcaaacaggcccagcaagccccagcagagccatgagcaggaccaagttcattttcctgcccaaccactattcctcttccagaactccattcaaagcctgcctcttcccaaagtctgcacagatgcctcctatttcctggccccagcagccagctcagcgcctctgtcctgagcaatctgcttctggggagtgtgtgcaggctctggggccagaacacccaggtctgcctcctgcttcgcagctctaccacttccaagttctgtgaactgctcaccttctgagcccccaccatctgtgaaatgggggagtaacaggacccacacttcagaggcttgttagaaggcttactcgagccaagacatgtcacatgcttggcactatgtggtccacagagggtgctgtattggcctgtctaccatgaaagacttggtgaaggctgggactggtgccccagttcctggcccggggcttgagaagcagctggcttcaaacacacagtgcgtgactgaatggaaggtggtgattcttttattttaccctcaaaaaaccaactaagggatgtcttttaaatcagtggctcccaaatgccaaaccagaatttcctgggtagaacacagaagtctgtttctccatttttaataagtaccccaggtgcttctgatataactagatttttttttttgagacaaagtcccactctgccgcccaggctggagtgcagtggcacaacctccgctcactgcaacctctgcctcccgggttcaagagattcttgtgcctcagcctcccaagcagctgggattacaggcgtgtgccaccacacctgactaattttttttatttttagtagagacagggtttcgccatgttggccaggctggtctcaaaccccctaacctcaagtgatccgcccgccttggcctcccaaagtgctgagattacaggtgtgagacaccgcgcctggcctataactagattttgaaaccacagctttaaatcaaaaagttgactgatattgatgtcgttagaagctgatcattaagtattaggatctggcctctagaaaaaggaaaaaacatatccaggggctgaagtgaactggaagaggcttaggagagaacaagtcccaagaaaaggaagaccccaagacaaaggagaacaggatgagtctaagcaaaagcttccctgccacacgtggcaaatgaggaaagcaggcggccaggtttgcaccagtgagagcagtgtgtgcatctgagcactacggtggagccgtggacaagctgcttcacagaggactcaggtcaagaaccccaagaggaccagggagaaagcgatttcttttcctaatttcatcaagtataaaacggtacaaggaaaagttcccagaagttcctatcaggcaagagagaggcctggtcacctgacacaggaagaagagaacaggtgagccccatggggaaggaggtcccaggcactgtcaggctccaacaagatggcctcatggacaccaagagccagcagcacccagctcccaccgaggtgctgcacgggtggggacagcccacctgacagtccctgcacaggtggcagcagtgggacaagagggtgagtactaggagggctcctcccaggacctggcagcaactcagcccaagctgagctggggctggtctggaaagagcccaagacagccggggaacctgggtcccacctctaaccctggggacccagaagtgcagctcccaagcaccaaccatctcagcctgaatgcaagcctgggcacactccaatgctggccccaccggggctcatcacccaggagggagaacggcagggtcctgggtatgaacaaagatgccaagacaaatggaggggctgcagagccaggaactcgggacctccatggctgagactaagaacatacgtgctacagacaccaagactggggaaaaggctgtgcccctcaatcaggctacagcaccaggtcagcaggcatctcgtgagctgccgccaagctgcagggtgggcacagaccacgcccagaggcctcaatgtgccccctccttgctgcacaggtgccaggcttgcgtgcccactctgccctcctcttagcccggcctctttctctcctcacccgatccatcttgaaattccgccccagcacacttttctggttggcatccacaccatcacagctggtcaggaactctgggaggaaggcggcaaagaagccatcaaagtcgactgaggccatgttgtagatggcgatgccaatctcctcctgcagaagatcatgggacttgtggaccaggacctggagcagcacgttcacaaactggaacagcatggcagtccggaagatcttctgcaggcagagagaccaggtgagcagcagccagcccccaggggcctgtcccgggtcccatccactttctgtcacactctccagtgagtaacctgagggtgggacacaggccacaatgcccctgatggaagaatatttccaagagctggggcacttaccttgtggtacagcttctgcttggtgttgagagtctccaagtagaagagattttgtttaaaaaggtggatgtcgggctggagaaaggactgtccgaaagcctaggaaatgagaccaccattttataaactgcaagaccaagcacttctggagcatctaccccatgtcagaagaacaagtgccagggccagggtacccattgtcttgatgcttctggcccaccagctcagacctctacgacgctcctcctaagtctcagagttcatgttttccccaccgggccttgcttcttattatggtctcatatataccttttttaacaaacctctagaaacccatcacaggacctggctttgaagcaagaagctcacacctctagtcaaatccctcagcaatcctggcagacagacaccaaagcctgcctgcctgctcctgctcaagccaagcaatcccctcccttgccctccttcttgcatcccccgtctcaaaagccacaagccctacaggctccttcatggagcctccacctggaggttaagcctctgcctgggggctaagcaaagtatttttaaactgctttggaattcctgggtgtaaaagttactagttcagtccaggcacagaagctcagtcctgtaatcccagcactttgggaagccgaggtgggcggatcactgaagggtgggagttcaagaccagcctggccaacacggtaaaaccccatctctactaaaaatacaaaaattagccaggcgtggtggcggacgcctgtaatcacagctactcgggaggctgaggcaggagaatcacttcaatccaggaggcagagattgcagtaagctgagatcctaccactcactgcactccagcctaggcaacagagcaagacttatctcaaaaaaagaaaaaagaaaaaaattactagttcaggggcaaaaagaaacaccccgcacaccaacacaaagtgccctgctccaacagaaagaatagaaagtgaccatgggggcagtgggggaggccggtggtctgcaggacccccctacaaaacaagtggtgactgctttgtcattctgtccctgggcccctaagctaccagaggaggatcttgtaatccctgcagcagggatgagatctccatgatgaccaatagtttccacttatttactgtttaaagttaggttcatggaagtataacagagtaaacttttgaggtttatctttctatgaattctgacctacctgtggatttgtaccaccaccatcacaaccaagacaggacacttccatcacctggaacgtcccctcacaccctcacccctaaggcaaccactgctcattatctgtccctgtggttctaccttttccagaatgtcatagaatggcatgggatcctaccatgcgtagcctttggcatctagcttctttcacctgacagaatgcatgtgaaactcatctatgctgctgattgtaccaagaatccatgcttgcttattgccgagtgccagtcccttagaggcatgcacgagcctgttcatccattcagctgctggatactcaaagtgtttccagctttggcaattatgaaacagcttctataaacatcagtgtacaggttgtgtgaacatatgctttcatttatcttgggtaaaatacttagaagtgagactgctaggtcatacagtaactacacacttaactttaaaagaaactgccaaactgtgaaactattctccaaagtgcctttcaccagccctcagtggggaccaggcaccagcgtgccaaagaagtcttccaggcaaggacagggttcaagagaaaggcaggggaggcgcaaacacttgagtactgcagacctgaggcctcggtgggtgccagggatgggaaggccagggcaagggcacgtgcctgaaaagaactgccacacaagagtcagtatgtgtgtgtgtgcgcgcgcatgcgcacgtgcatgcctgtgtgcatgctgtgtgctagtagggagctggagggagggtggaaatccctcttgcttccccatgaggaaaagcatgcactgaaaataccaaaagagactcccctagctagactcagatgagaacgtcagacacttgagtgcagaccctgggagcgtgcctgacacagccacagagcaggctggctgtctgggcgaggtgatgccgtcccagtcttccacagcaaggggtatttagcccccagacagtgcactctctccaatggacagctgcatctgccctgaaagcgaatgctccctcccagggcagtgtttctcccagtatggtcagagtcagaatcacagtgcaggtctggggccctcctgcggagactcatattcaggcagctccccgctaagaaggccctcggtgactctggcataggcaggctctttacacttggggaaacagcactatgaggtcagcggaactgacgtttatcaagcatctccaagtgtcatgcactttgtgtatgtcatctcatttaacctcacaacaaacctgtgacccaggcaacattagctccactttgcagatgaagaaactgaggctccaagaaattaattaacttcatcaatactaacaggcagaactgagcttcagacccgagactgtggggcttcgaagacaggactcgctgcagtggtcaggttagaggaagtcacctggcagcaaccccgcccccacgttacctgcatgatggcactgaactggggctcattctccatctgctcctcagcgatccccctctggacactggccagcacggtggacttgaagaagtacctccagttgtgatggagcgtccggaaaaggagctcaaacagctcggccttcacatcaggggagggacgctgcaaagacacacagacgctcagacctgcagcttgcggagctgctccggcctgggcccagggcagcaaagatgcctaggagacgcctcgtgacagcaagccgagtgtcaacactccatccacatgcctgtcactacctgcgcaaaagacatccagcccctggagtcctgtcactgcctgtgcaaaagacatctagcccctggagttggcggttcacaccgcgagttcttcaggagagacatggcccacatttgagagagaatgcacgggtcagtgccaagggcccctttttctgatgagcactcagcttttacactagaaaaaagctaccaagtggatgaacaattaggagtatggatttcctgttctattcgacctgtcagatcttcttgcttgttccttttcccaggataaaaaatgctgtcccactaacctgttggtcttacacaaccacggaggctaaagacagacccaacgccttaaagcgattctgctccccagaaggggagggtttaaagaacacttgggagccaggctctctgggccagtctcctctttcccagtagccaggattctgagaggagttagaggagaagggtcaggctcagcagtgttttctcattgactccaactcccccaatcccttattccaaatgtctctgcagaattcaaaattagaaggcccacatatattcagttcagccttgattaaaattaaatagacaccaggggccacaagcatccacagaagaagcctcataggcccagtgcatttcgtaatgcacagcaaccagacctgtcccagtctcagttcagacagttaaagattaactcttatttatacgactattaccaaaaaaactgaaattaaatctatacttattccgggtcttattatgctgagtgcctgcctattttctaaggaggacaaagggctttcctgtaacactgaaaggtttgtttgaatggtttcaagaacttgccttgtatcctcgagaccatgaatgtttctaataggaaagtacatatgttagaatgtttgctatagaaaaccagagtctcttaaaggtataaaatttgccgcaggagactgatcttagcaactgaccctgtggaataactgccatgcttacactagactagctccaatgaactcaatcaatataaaaacactgtaccacaccactaaaggccttcttccttgggagaaactactttacaagcatattaaactaacaaatgaactttaaaacacaatacattttctgtgaaatctcattcccttcccaatctggagatggggggtgctgcacaggggaccgtctgagcccctacctcggcaatgatgggatacacttgctccatgcacagggcgatgatgctggggaggaagggcttgaacacctggcctggctcctggaccaccacctgcaggatcttcagaaacttctccaccacccggcagcctgtgctgccctcgtggaggatgctctcggctaactgctctctacagaggagaaagccacacagtgagcaaccacatgtttctctgggggccagcatgaaaacccatgctgtggcaagtgcagaacaggagcaaaaagccacactttgtcgccagacccaccacttctcccttgaatctgaaaactatagatggtgggtctgtgcttacctggtaaacatgttgaggaaagtctgtatgatttgctcagtgaaaggcacacccatctgtactctaaggcctcgaaacagagtgaggaagaagctcagcatctcatcagtcacatctgaggaaaggggcagagatatcgtcagaggcttgcacacagtgagaaccagaaccctgggcttcatcaacctactcctgaaatctgcactatcagctttctctacagcttcctgctggaaacatttccccaacaccatcagggccaatgatggaaagtggaaaacgattagggacatgctgagaaaatagttctggtatagggaacctccacctggtggctcactacaggaaatgaaggtcatctcgaaccctccctcattgcccgacatccagtgatggtcagagtttcactggagagggatcactttgtgcccacactgatgaatgccaactgggtcaacacctgagtgcttaagccatttccccctatgactaataatccctgcagctgggtcaggggttaagtggttgaaagtggataatgaaggtgtatttaggttgcatggccctggtccattaaatggattaattgcagaaaatactggttacatatagggcagtttcacttccagatctcaacaatcatcttgtgtagtgtgtttcagccctaactgcacgcaatctgcttgcaagaggcaatgaatatttgctgactgagaagtgcctgatatttctcttgtaaaactgacaagactactataatgctgtcatgagagctaggcaagtacatccacagagctagagaggccctctatcactgacagtgacagacaagggtgaggggaacgatctcggcaaatgcaccttgccacaaaataaggagaactaagccaaaaaagctctcttgccttctcttgtaggtgccaaggcccatatggagagctctgctcacttttccaaagggccttggccctagactccacaaataaacatcactgccctttcccctcagtaccgggtttcgttgcacggaacaagtcaaggcctgtactgcaccgactcagtgtgttctacagatctaagtgggtattctggcccttgttagcaccacccaccagtggggcctctgggccagctcctacctgactgatggataaaagctggaaagagggccagggagacctgaacagattcctgcagcgactggtagcaaatctgtcgagacttggtggactcccccgagatattctccacaatatcttctaagacgctgagtgtctggtggataatcagtttgg

SEQ ID NO: 11679 - DNA, 524 bp, Homo sapiens
ttttcttttttttttttttgttttcaagaagaaagaggcaatgcagcaaagtggtgcagaacacaggagctggagccattcagacccaagtccaactcttgacctcgcccactttctctacagtcctgagcaattacacctgccaagcaccttcccaatggacagactggcaggccctactcccaacaggcatccagactgagcatcaccaaggatgggacaaacagaagcaatgcaagaggaaatgcgaacacgaacatgcaccactacaccacaacctatggaaacaatcaggcaaaacaagactaggagacatatgacaagaaaacaggcctggacgcttcaaaaatgccaatgtcacgaaagacaaaaactgggcatgctcttctggatcaaaggagactaaagagatataacaaccaaacacaataaaactatcctagattacatcctggattttttaaaagcaaaaaagaacaatttggtaacaactggggaaagtgttaatgtggctacattttaaa

SEQ ID NO: 11680 - DNA, 700 bp, Homo sapiens
aacagccctctggggcaagagcatacctgtgatcataacaggaaggaaaaaagctgggaagaaaagaaagaaggcagccaatgaaggagatattcagaatgattgttgtcctcgccactccatggaaattgctcttttcaaagcatcagtgacttctgtcttgccaaatccaaatgtcgtatcttttacgacttttagcaacattcaaaccaggtgattactatgcctttattgcaactttttttattctattatttccttccttcctaccttccttcccttcctcctgagacacacaccttcctgttttttcccctaaccataccaggcattttttccagaaccactttcctggaggttcttctgctcctgattctaaaattcgcagtgccttggctcttctccttctaaacacactctttagcaggtcctgtctatttgtttccaaggctgtaaattcctcctgtccattcatgacttccaagtttataaccccagccctgacttctctgtgctcaagactatgcgtgcacacacgcgcacgcacgtgtgtgtgtgtgtgtgtgtgtgtatgttactgcatagttgagctttctagtgcaatgtcaaacaggcagctcaaactttatatgtgtaaactagaatcattgttttttgaatcaagactgcttcctctccaactgttcctaccccaaccatc

SEQ ID NO: 11681 - DNA, 99 bp, Homo sapiens
ggcaagatctcggctcactgcaacctccacctcccaggttcaagtgattctcctgcctcagcctcccgagtagctaggattacaggcgcctgccaccac

SEQ ID NO: 11682 - DNA, 1414 bp, Homo sapiens
gcaaaatcttacatgtttaaaaacatataattttttgtatctgaatttagaataaatcattttaatgcatcttaaatcacgtcacctaatcataatagttgtggtaactaatcattagtgcagagcatgcagataaaaaatatttgaatttttttttcttggaagtacatgtagttatgagtaggttaagagaatatctaattttcctactctttttttcatctttagcatttaatgttgaaacaccattcacgtcacattaaggacccactgaaaatgtattgttttaatgcataattgacttacctaattaaacatacacacaaatttaattatttttttctctttaacctgatcacgacacagctcttaatcattgtcactttcagtatatcatagtagttagtagtagattgccttgatggcagtaattctgtagtaatttctattcaatcaaacctaagagagctttgatcttactgtaaaggtacaaacaaatctcttatataattcctagcttttttttttgtttatgattctgatcaactataagacacaatgtaaagaattgtggcttataatttatctgaaatttattagcttagtttagtttgggcaggagttacaaacttaataggaattgtcattttacttacagtttatttcctgattagttgttaatttttttcccctcagttatctttattcagtcttattggtcaaaacaaagaaacaaatagtccatcaactaaaataagctgtaatgaatttagaagatgaatgcatatattagatttccatttaaatcacttctgttataaatcatataaagaactttaaacttgttttatctaatactgagcactgtttttttgtcaagtatttttttaagaccacataattctttttgtctgctcaaggaaaggatagataaataattggcacacatttgtttctcactgaattttacagtagtaaattaatgttataatgtaccacatggagatgagttggtaagaaatcatctagttccagagcccagagattataaacagtaggtgaaatagatttatgacttacgaaatatgttgtgacaatatatttaaatgcatttttatattacttgcatattctcacattgatttgtgcaatagttcagttttaaaaaaaatcttcctatgcatcatgtattttatttttatttattttcacaagtatttgacagtatggtagaataaaagatgattgtaagattaaaaatgtaaaaattgcttatgtattattctgaattgtgttaggttgaaaaagatgattgtggtgactattatttcttgtccactatttgttttttgttttttcaccagataatgtcttcatatttgaacctattcaataaagacatgaagcataaaaa

SEQ ID NO: 11683 - DNA, 2440 bp, Homo sapiens
aggccagatggggactgtgcatcttcccttaatggtggaaatattaaaggcattgaaggacattcacctggaaacttaccaaaattctgccatgagtgtgggactaaataccctgtagaatgggccaaattttgctgtgaatgtggcattcgaagaatgattctatgaatagaatctcaaaaaaaaaaaaaagccaagttcagagtttatgattattgctgcttggacagctagagcacatcctctagttagtttgtgctaaaaatactcgaaataccatttccagttaattttgaagtgtaatcttttggctatataatgtgtgtatgtttatatgtgtacatatactgtatataataaatatctgataccccagactgtgtcattcaaggaaatattcacttatctgtcagaaaataatttcaaatggaacaattaatttaggtgttacttttctgttgttgttaaagcacgttaagtacatttccacaaactctcatactctagtgcttagcccttcaagctttaggataagtataactttgagcaaaaaatttggataaacatttgtattattggtgcctatcttcagatagtatcatagtaggatagatgctgggaattttgtaattaaagagaacagttttagttaccattaggtatgttaaggtcactcctgtagagcatgtcaacaaattatttcataaatccgaaaaactaagagaaaaaaaaacccctctattagttacgtaatttaaacatcttacttgttttgtaaaagtgtaattatgcaatttccttttcaaatacacaagactaaaaatacaaatctatcttgttctatttataactgattttttttagttctgtatgtattcgttgaacatatttttttacttccaattgtttttccagatttcacttttcctctttttccataacccgtgaagatagttttaatttgctagttcattttttgctgtatttgaaaatgtaattatttaatatagaaggcacagaattccctgcaaaatcttacatgtttaaaaacatataattttttgtatctgaatttagaataaatcattttaatgcatcttaaatcacgtcacctaatcataatagttgtggtaactaatcattagtgcagagcatgcagataaaaaatatttgaatttttttttcttggaagtacatgtagttatgagtaggttaagagaatatctaattttcctactctttttttcatctttagcatttaatgttgaaacaccattcacgtcacattaaggacccactgaaaatgtattgttttaatgcataattgacttacctaattaaacatacacacaaatttaattatttttttctctttaacctgatcacgacacagctcttaatcattgtcactttcagtatatcatagtagttagtagtagattgccttgatggcagtaattctgtagtaatttctattcaatcaaacctaagagagctttgatcttactgtaaaggtacaaacaaatctcttatataattcctagcttttttttttgtttatgattctgatcaactataagacacaatgtaaagaattgtggcttataatttatctgaaatttattagcttagtttagtttgggcaggagttacaaacttaataggaattgtcattttacttacagtttatttcctgattagttgttaatttttttcccctcagttatctttattcagtcttattggtcaaaacaaagaaacaaatagtccatcaactaaaataagctgtaatgaatttagaagatgaatgcatatattagatttccatttaaatcacttctgttataaatcatataaagaactttaaacttgttttatctaatactgagcactgtttttttgtcaagtatttttttaagaccacataattctttttgtctgctcaaggaaaggatagataaataattggcacacatttgtttctcactgaattttacagtagtaaattaatgttataatgtaccacatggagatgagttggtaagaaatcatctagttccagagcccagagattataaacagtaggtgaaatagatttatgacttacgaaatatgttgtgacaatatatttaaatgcatttttatattacttgcatattctcacattgatttgtgcaatagttcagttttaaaaaaaatcttcctatgcatcatgtattttatttttatttattttcacaagtatttgacagtatggtagaataaaagatgattgtaagattaaaaatgtaaaaattgcttatgtattattctgaattgtgttaggttgaaaaagatgattgtggtgactattatttcttgtccactatttgttttttgttttttcaccaataatgtcttcatatttgaacctattcaataaagacatgaagcataaaaa

SEQ ID NO: 11684 - DNA, 297 bp, Homo sapiens
tttttgtttttttggtttgttttttaagacggagtctcgctctgtcgctcaggctggagtgcagtggcgcaatctcggctcactgcaagctgtgcctcccaggttcacgccattctcctgcctcagcctcccgagtagctgggactacaggcgcccgccaccacgcctggctaatttttttgtatttttattagagacggggtttcaccatgttagccacgatggtcttgatctcctgacctcatgatccacccaccttggcctcccaaagtgctgggattacaggtgtgagccacc

SEQ ID NO: 11685 - DNA, 9747 bp, Homo sapiens
gcccacgccggccggttggggcgaagggtgtccccggcctgtgccagccttgagtagatcttttcgctagaagattcctgtgccctcaggtgggcgccctttcctctcaccactccctctcctccggagcgggccgaggtgagcgggtgccggccttggggctgcctgagtgctaggcagggtgtggtcctgggcatccttgggcctaccagcgagccctgctcagggtgtcgggcgccggcgggcagtactggcgggggcggccgcagtcccggccttgggcccgttaagggggccggcgtccctccatatgccccccggggcttctcggacttgatgggccctggtcggttcacgccgcttgtcccattgatcctcacgacaagcctgggacgtaagaacggcggattcgtaggcatttttcatccatctcggttttgtggatgaaaagactgaaaatggaagacttgccaaataaggaaaatatgtggcgtggcctgctggtcccctgacagctaattgagaggccttaactctccagaggattcgggccttctgtgttacatagagaatgctcatctctcccaggctactcctaatatgctagggattgtgtggaatgctttacaaacattacccaatttcatcctcttggtaattctacttggttggtattatcgctgttttaaaaaatgaaataagaacgcgtgactaaatgctagggggattctaatgcgcattcggttgcctcttccagagcacgtgtttgttttttgtttgtttgttttttgagactgcacgtgtttgttttttgtttgtttgtttgtttgttttttgagactgagtctcactctgttgctcatgctggagtgcagtggcgcgatctccactcgctgcaacctctgcctcctgggttcaagcgattcttctgtctcagcctcccgagtagctgggattacaggttcccaccactacgcctggctaatgtttgtatcttttttagttagagacggggtttcaccatgttggccaggcttatctcgaactcctgacctcaggtgatccgcccgccttggcctcccgaagttttgggattacaggcgtgaaccaccgtgcccggccagagcacgagctttttaacctctgttgaggaaacggggaccggtcacgtagctcaggcctgtaatcctagcacttcgggaggctgaggcgggaggatcgcttcagcccagaagtttgagaccatcctgagtaacatagtgagagccccccgtttacacacacacacacacacacacacacacacacacactttttttaaattgaggaaacggtgagttgaacatgagcaattattccttatatatagtatttccttagtttttcttctcaacattcatttgcccagtgaaaagaaaaagcaagtagctgggaccacaagcgcacaccaccatgcctggttgatttttctattttttgtagagatgggtttctccgtgttgcccaggctggtcttgaactcctgggctcaagcaatctgtccgctttggcctcccaaagtgctgggattttaaaggcgtaagccactgcacccggtaactttgggttcttgaattcccttcctcctcttcttcctcctcccctacactccattagagaaagggtcttgctttgttgcccaagctggagtgcggtggttgttcacaggcatgatgatcactgcagcctgggctccagtggtccgcatacctcagcctgccagtagcaatttgtttggcacatcacttacacatacttgatatgagatagcatgatacttttttgagacggagccgcactctgtcacccaggctggagtgcagtggcccagtctcggctcactgcaacctctccctcctgggttcaagcagttctgcctgccccagtctcccgagtacctgggattacagacgcccgccaccatacctggctaagtttttctatttttatttttagtagagacagggttttgccacattggccaggctggtctcagatgatgcgcctgccatggcctcccaaagtcctgggattacaggcgtgagccaccctgccaggccacatatgatatattttatcaatgccttatctacatgttacataggaataatctagcgtcctacctgtgtaaaaaccaactctggaatactgaaactgagctacttaatattctgaaaatcaggacgggtgtggtggcttttttttgcctgtaatccgagcactttgagaagctgaggcaagaagatcgcttgaggccagttcagaacagccccatctgcacgagaaattaaaaaattagctaggcgtgcatgcctgtcccgctactcagaaggctgaggcgagaggaacacttgaactcaggagttcgaggccaacctgggcaacatggcaaaaccccatctctaccaaaaaaaaaaaaatttaattagcgggacatggtggcatgtgcctgtggtcccagctacacagaaggctgaggtgggaggattgcttgagctggggaggtagaggctgcagtgagccgtgattgccccaccgcgttccagcctgggcaacagagtgagactgtctcaagaaaaagagatgaaggaagtgagaaggtgctgattgatacttacctcacactgagccttttttccccccacagacttatcactgaaccatttcactgggaaagtaaaaggaccacatatttcttggccgggcatggtggctcacgcctgtaatcccagcactttaggaggctaaggtgggcggatcatgaggtcaggagatcgagaccatcctggctaacacggtgaaaccccatctctactaaaaatacaaaaaattagccgggcgtggcggcagccacctgtagtcccaactactcaggaggccgaggcaggagaatggcgtgaacccgggaggcagagcttgcagtgagctgagatggtgccactgcactccagcctgggcgacagagtgagcctccgtctcaaaaaaaaaaaaaaaaaaaaaagaaggactacatatttctcaatgaaaatacagtgtacaatgttttccatgcaggtgtaaatactaactcatgttctgtttcagggtgggagatggaataacctgtagaaagaatctttagatttgtttaaattatacacaaatgataagagatctttctgaaagtattgactttttggcgggggagggaaggggcctgatagaacaaccaacaattgtacactttaagtttacatttagagttcacattaaaagttcatttacaaggcatctgtttgaaattcgtgaggatgagctgggctgggtggctcatggctgtaatcccagcccttgggtggctgaggtggacaggtcacctgaggtcaggagttcaagaccagtctggccaacatggtgaaaccccgtctctactaaaaatacaaaaattagctgggtgtggtggtgggcgcctgtaatcccagctactgggaaggctgaggcaggagaattgcttgaacccaggaggcagagggtgcagtgagctgagatctcaccattgcactccagcctgggcaacagagcgagactccgtctcaaaaaaaaaaaagaataaatcacaagaaatggttccttcactgttatactttaacatgatacagctttttaatgttttattttttgagagagagtctcactgtgttgcccaggctggagtgcagtggtgtgatcataaattcttgggctcaagtgatgctcccgcttcagcatcctaagtagctgggactacaggcttgtgccacctcacctggctaattttttttatttttggtagaaatagaatctgtttgcccaggctggtcttgaacactgggcctcaggcagtctttgtgcctcagcctcccaaagtgctggattaatggtgtgagccacagcacctggccaatagctttattgagattataattcaactatcatgatttattcatttaaagtgtacagttcagtattttttagtatattcacagagttgtgcagctgtcaccaccatataaccttagaacatttcatcatcaccaaaagaaaccctatactcattagcagtccctcatatcccctgcttctacctaggtaaccactaatctactttgtggcctatagatttgcttattctggacatttcatatacatgaaatcataaaatacctgatcttttatgattggcttttacttagcataatataaatttttttttttttttaatttgtagagacagggtcctgttatgttgcccaggctgatcttgaattcctgggctcaagtgatcctcctgccttggcctctcagagtgctggcattataggtgtgagccactgcacccagccattagcataatattttagctgggcacagtggcatgctcctgtagtcccagctactagggtgactgaggcaggaggatcacttgagtccaggagtttgaggctgtagtgagctatgatggcatcactgtacttcagcctgagtgacagaggtagaccctgtctctaaatattttaaggttcattaaaataatatattttcaataaaataatatttcaataaaataatattttaaggttcattcatgttatagcatatgtcagtgtatgattcctttttctggctgaataatattcctttgtatggatataccaggtgtttaacattttgaggaactgctgtacagttttccaaagcagctgcaccattttatattcccactagcaaagtatgagggttctaatttctccacatccttgtttttacctacctttttttattatagtcatcctagtgagtgtgaggtggtatctatggtttcagtttgcactttcctaatgactaacggtgttgagcctctttcatgtgtttcttgactgtttccgtatcttttggagaaaagtgggttcagatcctttgcccattttttaattggattattagttgtaagagttcttcatatattctggatataggtcccttatgagatacatgatttgcaaacataaccccgcttctgtggattgtctttttactttcttgacagtatcatgtgcaacagaaagtttttgatgctgtccgatttctctgttttcttttgtcacttgtacttgttatagtatctaagaaaccacaaaggccatgaagatttatttctatgttttcttatcagagttttataattttcttataaatttgggtctgtgatctgttttgagttcatttttgtgtatggtgtaaggtaggggtctgaatccattcttttgcctgttgataacaagtcggtctagcaccatttgttgaaaggactgttctttccctgattatattggtagcctgtagtattggtttttatatactattacaattttgggaaaattcagtacagaattacttggagcatgttgatttgtctgagaaaactgtgaataccagtttcatgattttagggtaactacaaaatgtatattatattctatcctttgtcagatgtgttaatttaatcgttttatataaggtaagaatgctgtacctctgtctaaacacagaaataacatgtattttaatataaagaatgtggaacttctaaactttgaggctaatttttcctgcataaattctcaaattattgtgacatgatatttcataactttactagtagaatccttccctgtgttattaaatatccactaaagtctctagtaaagggaatatgatttacagaacaaatttaatgtgttagtttaattggtgttaatttaattataattggtgaactattacatacttttcttagttcctgtttttttgttttttctttacagcaaagtatccagagataaagtccttgatgaaacctgatcccaatttgatatggattataattatgatggttctcacccagttgggtgcattttacatagtaaaagacttggactggaaatgggtcatatttggggcctatgcgtttggcagttgcattaaccactcaatgactctggctattcatgagattgcccacaatgctgcctttggcaactgcaaagcaatgtggaatcgctggtttggaatgtttgctaatcttcctattgggattccatattcaatttcctttaagaggtatcacatggatcatcatcggtaccttggagctgatggcgtcgatgtagatattcctaccgattttgagggctggttcttctgtaccgctttcagaaagtttatatgggttattcttcagcctctcttttatgcctttcgacctctgttcatcaaccccaaaccaattacgtatctggaagttatcaataccgtggcacaggtcacttttgacattttaatttattactttttgggaattaaatccttagtctacatgttggcagcatctttacttggcctgggtttgcacccaatttctggacattttatagctgagcattacatgttcttaaagggtcatgaaacttactcatattatgggcctctgaatttacttaccttcaatgtgggttatcataatgaacatcatgatttccccaacattcctggaaaaagtcttccactggtaagtaaaggatttgatacatattctaattttgttttttcatttgtttgttttttgagacggtgtctcactcagtcgcccaggctggcgggcagtggcacgatctcggctcactgtaacctccacctcccgggttcaaacgattctcatgcctcagtctcccaagtagttgggattacaggcgcatgctaccacgcccagctaatttttgtatttttagtagagatggggttttgccatgttggccaggctagtattttgtcagtccaagcagttcattaaaaaaaaaaaaaacaaaaagagcaagaatataaatactgcatcttccagcctacttttacaaagggttcactcttgggtccttaagcttagtggttacacttaggatttatttttaattttattttttaactttatgtttttttagagacagggtcttgccctgtcacctagtctagagtgcagtggtacgatagctcactgcagcctcaactcctgggtcaagcgatcctcccacctcagcctcctgagtaggcaggattataggcacgtgccaccatgcctggctaattttttattttttgtagaggcagggtcttgctgtgttgctcaggctggtctcaaactcctggattcaagtgatcctcctgcctcagcctcccaagtagctaggactacagccacatgctatgacaggctgattttttaaataatttcttttaatcctccaaatggtttgttaaaatttttaacatttttaacatttttatagagctggagtttcctggatgggtgcagtggctcacacctgtaatcccagcactttgggaggcctaggtgagtggatcatctgaggtcaggagttcgagaccagcctggccaacatagtgaaagcctgtctctactaaaaatacaaaaaacttagctgggcatggtggcgggtacctatagtcccagctactcgggaggctgaggcgggagaatcgtttgaactcgggcagtggaggttgcagtgagccgagatttgccactgcactccagcctgggtgacagagcgaaactccgtctcaaaaaaaaaaaaagagagagatgggtttccctgtgttgcccaggctggtctcaaattcctgggctcaagtgattctcttgccttccagaatgatgctgggattatacatacgaaccactgtgcccatccagatagttttttaacttgagatgaaaagacatttttaacttgagatggcagaattgcacatttgataagtgcttttttttttttttttttttttttgagatgagtctctctctcacccaggctggagtgagtggcacaatctcggctcactgcaacctccgcctcccgagttcaagcaattctcctatctcagcctcctgagttgctgggactacaggcgcacgccaccatgtctggctaatttttttgtatttttagtagagatggggtttcaccatattggttaggctggtctcgaactcctgacctcaggtgatccacccgcctcggcttcccaaagtcctgggattacaggtatgagccaccgcacccagccaagtgcttaatttctatctaattagcatgccacaatttattagtatttgtaagttcctggatggcagggatcagatgttgcctttatattctatggcgtcatccatgcagtacattctttaataatatcaagttaatctaattgtatgtatttgttgttaattttacaaataagccagatatttagtcccttggaatgtgatgggagagagacctagagggtcgagtgtattcaactgctgctgaaatgtagactgctttttgtttagaattcccacagctgctgctgctgctgcttttttttttttttaagagagaggagggaggcaggtctcatggtttcccttctcagtgtttgtgtcaaccattcatcagtcatctttgaaagaacctagtaacactcatttttcatcttgctgtattttttcccttctaggtgaggaaaatagcagctgaatactatgacaacctccctcactacaattcctggataaaagtactgtatgattttgtgatggatgatacaataagtccctactcaagaatgaagaggcaccaaaaaggagagatggtgctggagtaaatatcattagtgccaaagggattcttctccaaaactttagatgataaaatggaatttttgcattattaaacttgagaccagtgatgctcagaagctcccctggcacaatttcagagtaagagctcggtgataccaagaagtgaatctggcttttaaacagtcagcctgactctgtactgctcagtttcactcacaggaaacttgtgacttgtgtattatcgtcattgaggatgtttcactcatgtctgtcattttataagcatatcatttaaaaagcttctaaaaagctatttcgccaggcacggtggctcatgcctataatcccagcactttgggaggccaaggtgggtggatcacctgaggtcaggagttcgagaccagcctggccaacacggtgaaaccccatctctactaaaaatgcaaaaattagccgggcgtggcggcacatgcctgtaatcccagctacatgggaggctgaggtgggagaattgcttgaacccaggaggcggaggcagaggctgcagtgacccaagattgtgccactgcactccaccctgggcaacagagcaagaccccatctcaaaaataaataaatatatataaaaaataaaaagctatttctagtttatttcactataaagttttgctttattaaaaagctaataaacagctattaatcacagtgtattagtatttgttacatttttgtatttcactatctttatactatataatatggtaacttgggtaccgggggaactttaaaatttcatctcaaaaataatttttaaaaagcctgaggtatgatatagcataaaagattgagatgaaaatatatttccctgtaagctgaattactcatttaaaaattttaacttctatatgggacccgaattagacactgctgaatcctgtacagccttactcataaataaagtacttactgaatttccaccattcaaattc

SEQ ID NO: 11686 - DNA, 554 bp, Homo sapiens
agtactttgggaggctgaggcaggtggatcacgaggttaggagttcaagactagcctgaccaatatggtgaaaccctgtctctactaaaaaaaatacaaaattatctgggcatggtggcatgtgcctgtagtcctggctactcgggaagctgaggcaggagaatcgcttgaacccaggaggcaaaggttgcgtgagccgagatcacgccctgcactccagtctgggcgacagagcaagacaacgtctccaaaaaaaaaaaaaaggccaggcgcggtgcctcacgcctgtaatcccagcactttgggaggccgaggtgggcggatcacgaggtcaggagatcaagaccatcctggccaatacggtgaaaccccatctctagtaaaaaatacaaaaaattagccaggcgtagtggccggcgcctgtagtcccagctacttgggaggctgaggcaggagaatggcgggaacccaggaggcggagcttgcagtcagccgagatcgagccactgcactccagccggggcgacaaagtgagactacgtctcaaaaaaaaa

SEQ ID NO: 11687 - DNA, 94 bp, Homo sapiens
ctccgtctcctccgcgctccgccacagccggccgacaccacaccagccggggagccgccgccgccgccgccacctctgagcagccggctgggag

SEQ ID NO: 11688 - DNA, 5365 bp, Homo sapiens
attagagcatctcgagcaactaaagcagcacgtcgaacccttggtgattagatatatcagatctcctcattagacaccttagaagtcaggaagcatgaaacttgtgaactgttgagttctgtctttcccagatatctgctgaacaaaaatatcctactatgctgccaattacatttgtatctgataaaatgtgtctgtaagataaatttagatatgtgtaaaatcccatttatagaaagtaagcaaaagttaacatctctcatcaaatcattcattacaatttcagaactgtaaacagtttggtagtggaataagtgaatattattggacattcttaaagtgaatatggcaaatctgtctacctcagtggatacaccggtctcagaagacacctgactggttaaaaatgtctgacccatccccgcaagcccttttttttttttttaaatgtttcccgatcttgtggtagtcttatggtaaatctaagctcctaaaggattttaaaggagcttagcaattagaactgcttacagttaaatggattttttaatgggcacactaactagagtgtaatgtgtatattatttgtgatcatagcattagttctttttctgctataccctgcatatcttcaaagtcacagtgtgtgtcctgccatctcattagtgaattgtacctagattatgtgtgtgccccttttgtatgatgtttctggaacgctataagcagcttttagagtcaaatgcattcattttaactggctttatgtcctagtggtttcatgactacaaatttgaattatcttactgcataacataaaaaatgtctggctttagcaattaatgcccgaaattattttgccctgcaattgtcatacctgtatgaaacctgtcccagtttgcttaagtgcacaactgattatgtattcctgtgtgtatgctaatatttcacaagtgtttcatgcatccttttttaaaaaactactaaccagaatattatcgtagctactcattcattctgctttctgcttcacctataataatcttttaggactgccttctgatttttcacctatcttttaatgtaagcattaacaactaagactttcataaaagcactgtatcttaactttcctggcctaaatcaaaaaaaggaaaacattgataagtgtcctagaaacttggattcttttatagatttgttcttggggctctgatgtttgggattgacgttctgtgctgaccattttatatgcattttatcttaatagtatgtgctttcatgaagattctgatacaagtgggcaatccttaaattatctttgaaaaattggttaattttggttaaaaaagggaaagtggctgggtgcagtggctcacgcctgtaatccccagcactttgggaggccgggacgggtggatcacaaggtcaggagttgaagcccattctggccaacatggtgaaaccctgtctctactgaaaataattggggcatggtggcacatgcctgtaatcccagctacttgggaagctgaggcaggagaattgcttgaaccggggacccaggaggcggaggttgcagtgagctgagatcgcgccactgcactccagcctgggctacagagcgagactctgtctcaaaaaataaataaataaataaatgaaaaagagaaaatattgagaggatttggtcatcattttactgctctcttcatgtgatggaaatcaattttccttctcaaatgggatcagtatcatttcctagtcatacatccatccagtttttgttacttttttgttggcatacattaatcaaaatagctctgcttcattgaggcatgcagtcctcagactctcggtggaaaggctgtcatactattagtgaccatagtaactttttataccaaaggatggttgctggataattttaatatctttaccaataaagtactttttggaaatacaaaatcaggctgcttgctttgctctattcctgtcaacaaaaaggatttagctatagatttagcttctccttttattttcccttttatttcataggagtcttctgtttattcctttcaggcgcctccttggcattataacaaaaaaagatatcctccggcatatggcccagacggcaaaccaagaccccgcttcaataatgttcaactgaatctcacagatgaggagagagaagaaacggaagaggaagtttatttgttgaatagcacaactctttaacctgagggagtcatctacttttttttcctcctttacaaaaaaagaaaggaaatataaaagccgggtttttgcaacatggtttgcaaataatgctggtggaatggaggagttgtttggggagggaaaggagagagaaggaaaggagtgaggtatttcccgtctaacagaaagcagcgtatcaactcctattgttctgcactggatgcattcagctgaggatgtgcctgatagtgcaggcttgcgcctcaacagagatgacagcagagtcctcgagcacctggcctgttgctccaacattgcaaagacacattatcagtccctatttctagagggattactttgaattgagccatctataaaactgcaaggtcttgcccttttttttaatcaaaactgttctgtttaattcatgaattgtatagttaagcattacctttctacattccagaagagcctttatttctctctctctctctctctctctctctctctctactgagctgtaacaaagcctctttaaatcggtgtatccttttgaagcagtcctttctcatattgagatgtactgtgattttactgaggtttcatcacaagaagggagtgtttcttgtgccattaaccatgtagtttgtaccatcactaaatgcttggaacagtacacatgcaccacaacaaaggctcatcaaacaggtaaagtctcgaaggaagcgagaacgaaatctctcattgtgtgccgtgtggctcaaaaccgaaaacaatgaagcttggttttcccgcataaagttttcttttttgttttcctctcagactttatggataatgtgaccgggtcttatgcaaattttctatttctaaaactactactatgatatacaagtgctgttgagcataattaaataaaatgctgctgctttgacagtaaagagaaggaagtattctgattagctgtatctggtattaattgcatgttaaaacactggaatttttaaaattgaaattagatcagtcattcttttcttttctcaagatatctcatggctgacactgaagaagaaatgtaattcataacttgcactaaatgtatattttttttcttaaaaatttaccattcttatttatatttttatggattaaaatttataaaatacagatcagttaatattgcacttaagtaattttacctttttaatgtgatttttatagaataattcagacttacaaatacagagatatgaacaaagtttacagtgggaacaaaggtttaaaaaaaggttgtggttctctctctgtgatccagtgtgcacataaacctttctctgatctttcactgccatcctctggattatgtcttctgacctgtccattttgacccattaactggaaagttgaaaaactacattaactggaaagttgaaaaactacattactttggagaataaaaccgaaagttcgtgtataccttcttaaaaaaaaaatcaaaccaaaaatgtgaaaacaatagaattgcaaagatagcagttaaaattttaatctgaaaataacctttgaatctcgggctaggttacgtccatatttgaagtggtcagtgatggtttgaacattttttgcaggatgagtgaaaatgcactggattatatttgggatttttgtttttggaattgtctgttttaatcacagccttaattcacaattggcaaaggcagtttactcaaaggactgggctaaatattctgtaattatgcatttttgataggaaaatgaaatttttgcaaacagacattttctttttttttggctggagtgcagtggggcatggtcttggctcactgcagcgttgaccacctgggctcaagtgatactcccgcctcagccacccaagtagctggcactacgggcacacgccaccatgcccagctaatttttttgtatttttagtagagatggggttttgccatgctgcccaggctggtctcaactcctcagctcaagcaatctgcctgcgtgagcctcccaaagtggtggaattacaggcgtgggccactgcgcctggcccagacagacattttctgaaacacaactggcaatgagctgtttttacattttgaaagtgattcttcacttcctagttcttaattatagtatacctattaagatctgtaagatcctgaagacataagatcatgaagccatataagaatgaggattgaaagttgagcaaaattttcgggattttgggaaacattcttagctgtgctatctgcctaaaattattccttattacttctctcctttgacagacttcaagttttcttcatagccctttcaaagttttttgagccatccagagtaaaatcatttctaaatgatagttctgtatatctccaactcgtcttaagtgtatttgcctgtgtgcaacgtattgctagactatgaactcctcagcatggctgctggataacttaattgtcctgagttaatagccttcaaaggacaaatcggtttctttgcagatagcttcgtaaaacttcacatggagtttattttatcatatttcccttttttatttctgctcctcctttaattgcccatcttgcttcagagactgacatttcagggtggatattaattaaagcattaattttgttttttggtatatttctatccctagtatttctatcttactgctaaaatacaggaaaagtgccgtatttttaatgcatttagtggttttctttggtgttatctgttccatttttctttttcatacattgaagtgtgtctccttttcaaccaaaataatgaaatagtggagaccatgaaattgttgtgcctggctaattggcaaattaatttaccaatataataagtgtagcgccttgtttgaataccctttttgagaaggtatgatgagaatgggcaagggtgtcagcatctcttcttcttaataattaattgttttcagttttggttcacgaagaatgcttagttaatctgtaatgttgcctagagctgtatttatctgtttttatttatactagtgtagtaaagctgcatatcattacagtaaaaacgactactgtgatgagttaatcagaaaatctattaaaatctatatgacaatgtg

SEQ ID NO: 11689 - DNA, 586 bp, Homo sapiens
gcatgaaaagaggtaaaacgatttatttacatgtctttaaaaaatcaccttggacatttgctaatagaactgccaaaagagggtggtaagtaacaacctttgattaagatgtggtcttttactattaagcttttagtaaaaaggaacacactaaaagttcagagtagatcatttatattcactgagtatttactgagcaattactgggcgccaggcgctattctatgttcttgaagttttcattccagcaggaagagaaatctagagtatgtcagatggtgataaatatggattagttcagcaattttaaaaaaggatttttatgtactgcacactgttacgaatatacaaaatcagtcaagaatcctgttatagtttttgtaatgtacaaaaagtgaaggtgtgtgcacccaccccatttttatagagggtgatcagggaaagcctcagggataaggaagcatttgagcagaaacctacagaaagttagagaaggacatttatccgtgagaaaaaatgttgtaagaagagaaaatgctatatacaaaggattctcctgccaggttcaaggaacactgagtagatc

SEQ ID NO: 11690 - DNA, 1164 bp, Homo sapiens
gttttcaactcaatgtctccgagataagagcaggacccggacggtaggaatccacaggctgtgtccctaccatgtaaccagcgaccctgtctccacaagtctgccttttactatgccttgtatgcactgcctcctctctagttgcattctctctgcctgcttcagcccttgcatatctattccctgggctcctccagtggttcctgtgtagtctgtgcctccaacccagtggtttctaaccagagaactattttgctccccaggggaaattcagcagtatctggagacatttttggttgtcaagaccagtggggtccttctggcatctactggatagaagccatggaagctactaaacatcctacaatgcacaggaatcccacaaaaagaactgtctagctcaagaggtcagtggctctgaggttgaaaaactctgctccagccatatctgcctctaatccattctctacacatcaccagagtgatacaaaatacaactcccatgccattgatatcattcccatacctgaaatccctcaatgcctcctagctgctctcaggttaaagtctaaattctcctgcaaatcacacgaggcccataatctggccctctcctacctttctacctcaccttcaccatcccccagaaccctcttccctgaaaccacactcacacctcatgcaggtgaaacagaccactccgttaccaactcttcctgtccatctctcccatttattccttagcccactgattttatgtcagacactccaatgggactaaaaaggaacaaatgccctcaaggcagctcaaggcactgatatccagtagggcacacagaaaagtgggcacacaattcaatcagcagaggcagaactttgtcatcgcctctgtgatcccactgccatctccccagtggactgtgagcctccagaagagagagcatcttcatgtcttcatctttatagtccacaggaacttggacatggtaagtgtggtctacagggtgtacaacttgtatttgtcacaattgttgcattaaggaatgaatgaattcccagcctctttaagtttggctctagcacagaaataaaaagaaatgaaacattaaaatatagagatgaaacaaaattcttcatagtgcatgcactcaaaagcccagaaac

SEQ ID NO: 11691 - DNA, 406 bp, Homo sapiens
tattcaaaggttccaataagtttattttgtgtgctttgttttcaatttaattaatttcatcaacttaatttaaacaaatctttgaaattaataaaatgtgagatgtctgcaggtgtttgcagcaagcattgtggtgagattcttccctgaagtaaggagagtccttaaaaacaaagatgcctagaaacacacatattattattatctttaaaaatataacaaatgtgggggttgcagtggacacttcacttttttttagcttgtatcaaaactgttggacaatgtaaatgaaggatcaagaacaagaagcctgggggaataaatgggatgacgagtgtagagatacttgtggagaactctttattgccaccaatttaattgtgattacagtggcagacatcaacat

SEQ ID NO: 11692 - DNA, 141 bp, Homo sapiens
ttttttttttttttgagacagagtttcgctcttgttgcccaggctggagtgcaatggcatgatctcagctcactgcaacctccacctcccaggttcaagcaattttcctgcttcagcctcccaagtagctgagattacagg

SEQ ID NO: 11693 - DNA, 1720 bp, Homo sapiens
gactttttattcataggagaaatatatgtgtgcacatctacccacacagatactgttttagtttcactgggacatttgcccaaaggcagaagacagattgctgttgcagagttgtagattattattatatttagcaagatagccagctaaatcctaacttactccactgggtgactccctgggatgttattttctctatctctgaagttatttgagcaaggaaagcatttcttttatgctgtctatattctgttttatttggttcatatatttccttggattctttatgcatattttatggcactgactttcaagaataaagatgtagttgagaggcatgtcagagtcgatggtttgttgttaattgatagtttgattgattaatatagtaggatttttctgcttgatcctgacctaacccattggctttctttagtggacagttttacaaggacagtggcaggtgcagggaattgcccacttcagcagggctctgacatacttgatctgtttctccttccctcaggaaaagctttgccagcagaagtataatgtctcctgcataatgatcatgccccagcaccaaaggcaaggatttggacggtttctcattgatttcagtaagtgaagtactttatttactttcatgatccaggaagctgatggccgttacaggaaacagtaaaatataaaactttatttaacctgcattgttgtttttatcaatagataatgggctttctatttatatttacataggttagaacatcttcctcaagtgaaaaatgtactgctgctcagtgattgtactctaggaaattgagactagatctctcggcagcaggcctcatgcacaaagccattaccctgaatgaaccgacagaattacattccattttgtggtgctcatgctcattagcaccaaaagaggcaattatttgtgattaaagctaaaggaagtattatttgaaaggattttcagctctctgaaattttgcctataatcttgtacagtacaaagcagaaaaggtatatttccatttagaaaaataattttctaggcagcttatcctgggccttgctagtagaaataactcttaccttattttgttaatttcccttttctattatggaaattaatacagtgtttgtatctagaggtttcccaagaaatatttatcttatatgcactcatatcttctgaaccttctcagttaaaaccggcataatatataaaagtatgcacatggataatgtttttaaaaatggtagttttttttttcctccttgtttatattatactggatgtgtaaatgttgtgttaggggtacatttggagaatcaattcaaaatatctagataacatgatgaccagataacccatgataatagtcatttctcgtcatgtaaaaatctgtcactggccgggcgtggtggcttatgcctgtaatcccagcactttgggaggccaaggcaggtgggtcacaagatcaagagatcgagaccatcctggccaacatggtgaaccccatctctactaaaaaatacaaaaattagctggatgtggtggcacacacctgtactcccagctactagggaggctgaggcaggagaatcacttgaacccgggaggtggaggttgcagtgagccgagatggtgccactgcactccagcctgggtgacagagtgagagactctgtctcaaaaaaaaaaaaaaaa

SEQ ID NO: 11694 - DNA, 1438 bp, Homo sapiens
ctcaaactatgcattaattttgcgtgcatagttctaataattttaattgtctcatccagtcgaggggttgacagactagaacagaccaggctcagttcacatgctgcctatttttgtaacacttttttttgtttgttttgttttgttttgtttattttgccctacaaaaactgatttgagtagttgtgacacaactatgtgagactgtattgagactacatggcctgccaagcctaaaaaatatttacacctgaccctttacctgaaatgtttgctgacctctgaatccgagagttgaagggaatctataaaagtggctcatattaccaaactcgtagagcttgtgaagaataatgcaaatctattcatttatatattcttttccagtgtttttagaaggctcactgagcacagtacctcatattccagatccaaggattcctgaggaatccaaattagtatccagaaggttcattggtagtcatggttataaaccagagcaaaagttaatgggaagaaatggtaaagagtcactgcattgcagctgacacctgggattttaaaatctttttttcgtttttgagatggagtcttgctctgtcgcttaggctggagttcagtggcgtgatcttggctcactgcaacctctgcctcccaggtgcaagtgtttctcctgcctcagccttccgagtatctgggattacaggcacgcgccaccacgattggctaattttttatttttatttttatttttatttttgagacggagtcttgctgtctcgccaggctggagtgcagtgacatgatttcggcccactccaacccccgcctcccaggttcaagtgattctcctgcctcagcctcccaaatagctgggactacaggcgtgcgccaccacgcctgggtaatttttgtatttttagtagagatgtggtttcaccatgttggccaggatggtctcgatctcttgacctcaggtgatccgcccgctcggcctcccaaagtggtgggattacatgtatgagccaccacgcccggcccacgctcggcaaagtttttgtatttttggtagagatggggtttcaccatgttggtcaggctggtctcgaactcctgacctcgtgacccgcccaccttggcttcccagagtgttgggattacaggtgtgagccaccgtacccggccaaaatccctttagttctagtcagtagaggaataaagcactgttctttcaaatgtgaacccctcttgatcagtattgtccaatctggcctgttctttaaccagtcagcctcttttcctgcctcttgcatgggctttttgttgttgtttctttgtttgttcatctatcatctcttgctttaatcataacctaactttccctgatgtggcacgtgtaaaactgaaaaacagaaactctatctggtaaaaaaaaaaa

SEQ ID NO: 11695 - DNA, 300 bp, Homo sapiens
gttgaaggtatgtgtcagttttaaccaggtgttgagttatttgatcactcctccaaagattatttaatagtttcaataatatctaatgatgtgtgggaaaccgtagaatttttcatacaaactgggacaaatgaacatgcatactattaaaatacttcctacaataggcataaaatgggctttcttaggtgaaccaggaggtatagttagcctaatcatatgctatgattattagtaatggttttctgtgttttatcattcatatttgtaaatcttttttgaatgactacttggaaatga

SEQ ID NO: 11696 - DNA, 1577 bp, Homo sapiens
ccttaacaggagtatttgagaattaccttataaatgcagagaatgaacatgaaaagcatcagactttatctagacttaagatattattagaaaattcactgaacactagataaagttaagtcctaaattgtttcttaatttattcatgaattctttgagtttctgagatagaaatttggagatcttggtaatgggcagtggtatactttgggaagtaggaaggccagttgatttgtgctttgatggttgttggaggtcattccatgattggaatgtgttgattttcttgatttatttgttattacaacaaagcagttattcttggacagttgacatttcagaactaaacaatccttaaatatacttggaattacagaaatggaattacttggcacgtttgtttaataatcaacagggcagtcctgtttaattattttcacacatttgagtcacctgtaatctctcccctaatctcttctatgatcttaaatttgcatcatgcttgacatcatgaggaacattgttgctcagaaacatatcctttgtcctttaataggcagtgctagctaatcagtctggttgctgaatgaatgatccatcttctgtagggccatgttttaagcctgtgttagtcagctcaagatgccgtaacaaaatgtagactgggtggtttgaacaacagaaatctatttcctcacagtccttgaggcagaaagcccaagatggagtgtcagcacagttgggttctggtgaggcccctcttcttggcttccagacagccaccttctcaatgtgtgctcacatggccttttgttagcatctatgttagcagagagaccaagagcaagctctctggtgtcttttactataagggtactaatgtcatcagactaagctctgcccttatcacctaatctcctcccaaacaccccctctccaaatatcattacactggggggttaggccttcagcatatgaatttgagtgggaacacattcagtccataacaaagcctaaacagtactgagcctttaataatcagatatgatctctcttaagtttcatactagttaatgaattccagttagactaacttttgttccattagtagtagtgctttaaacctctatgtgaagtaaactattaaccaattccaagtcctaaatttcccatacccattatgaatgcgctataagttataaacattctccaggttaccagttttaaatagcaattgtgaaagactaatgcaagtataaaaacactttgtgaggctgggtgtggtggctcatgcctgtaatcccagcactttgggagaccaaggcaggcagatcacgaagtcaagagatcgagaccatcctggccaacacggtgaaaccccgtctctactaaaaaaatacaaaaattagctaggcatggtggtgcgcgcctgtagtcccagctactcgggaggctgaggcaggagaatcgcttgaacccaggaggtggaggttgcagtgagccgagattgtgccactggactctagcctggtgacagagcgagattccatctcaaaaaaaaaaaaaaaaaaaaaaac

SEQ ID NO: 11697 - DNA, 356 bp, Homo sapiens
cccttcttatggaatatggtagaatattatttttaaggacttttaaaaaaattattaaaaaacttttatgttccttcgtctctctggcttataaaaagaaataggatgtgtttgcattgaaatctggcaatgattaattaactttctaagtgaagtttaaagaatacagaaaaaataacccatgcatattcagtagtaacgtgtgatagatttctaaaaaccagtgatcacagtttctttccccctctttccattctagtgaaaaagtttttacttcctgctgcatagagctaatataaaaacaccttttcctgaaatattttaaatttccttttacttatttgagaaatctttaa

SEQ ID NO: 11698 - DNA, 1479 bp, Homo sapiens
gctttgtcacacaatgtaatcttgtaatcctctgtccatctgtggccggcctgcttctctaaacgggaagactactgcttcatgctgctctattgcttgttgcctaccatctctgcctcatggtctgtcagtcattattgctcctagaccagctaagttgccccagtgtctcatttctgggtcttctgtgtgggctgttggtctgtaagcatctgtcagtatctaagcctgctgtgaggtcatccctcacaattacagaatacacttggtatacaaaaacacatgtagaggaaaagaaaattactgaagttccaaaaaacacctacaattggaccaagaattggcttatttttttttttaaagaaagagcagcttctgtatattatttacaaaggtcatcatttcattgtctgcactggacagactaataattttttacccataaaattgtttagggttagtaccctgttaggacctttttgaacgtaaagaaggttttactttccatttaagacaccaggtttgaggtcaaaagataaacataagcccagagaagcaagcaattctatttcttctcatccctgttgctgagattgctgtaggtgaaatattaagtatccctggacagggcagaagtatgtaggataggaggcttgtgtgtagtgaggcttttatgaataaatcagtgaaatctgacacagaagccagggctcttcccctgatcaaatcaacaagatggccttaagtgctccgtcaactgtggacactgtggggagaggctgatcagttggatttggagccagagataagagtcaggagggccttgttcctctttacaaaggaattgacatgactaaattgaggaagtctcaccctaaggtgagatgccaaggaagatggcttgctgtcttactgtgtacccacatccaccatttcttataacttcaacccactatctagcatttgactgttctctcaaaggaactgaggcttttttatttctattataattgatagtcctattttacctagtcataaaataagtcctcaaaatatactgttatgaaaagtaaacaaaataaaagttgtgtttgacattttagatcctatttccaaaaaaagtaccattttattgtagtatgtggttatttaaaaccttaatttattgtcatttttagccaatacactattttatcaaaaagaggcagattgcagtagaagaatgaggaaaatgaaataccattcaggatttaggctgtgtcctatgctgcttctcctacacctctggacctctggtacacacacacactctctctctctctctgctataaaatgaggctcgcttttcaaaatgattatactgaaatttcagatgtcaatgaaatataattatgagtgtttgtgtatacttatgtatgtgtgtttccagagtagtggagtgatatactttataaaagcattttcccaaaattacagaaa

SEQ ID NO: 11699 - DNA, 1479 bp, Homo sapiens; identical to SEQ ID NO: 11698

SEQ ID NO: 11700 - DNA, 1479 bp, Homo sapiens; identical to SEQ ID NO: 11698

SEQ ID NO: 11701 - DNA, 1679 bp, Homo sapiens
  SITE (81): n equals a,t,g, or c
  SITE (229): n equals a,t,g, or c
gcagtggctactcagggtaggctggtcctgagacccatccccgacacctctcctgctgaaccctcaggctgctccccacanccagggtgtgactgaggggtacacaggcctggatttctggtgtgaggaaggggctagcacctcccctgttgtgtagccagcacaggcacaatttgtgggtttggtggcaggtaggtggtgcgtgggagaaaggacagtgttagaggtnccactccgtggtctaggatcatgaaaggtgaacacacaagtacacaaatgtgccatgccctggcatggggcttatgtgtgcacaggcaaggcactcggtgtgtgtgtgcggaccccagggtcccaggtcatgtgaagcgtacgtgtgtgtgcattgtatgtgtgtgtacattgtgtgtgcattgtgtgtgcatgtggccaaacagatgtgacctcccagaacacagtacccctccacctctacccgagctcagacagccgagctctcccttgtcctgtgtgtgtgtcagtgtggccacgtgcgtaaccccaggtgggctgtcctgagctgggggcctgcctgtcccttcccagaacgcccctctgcaggacaggaagtctgccccaagtctggccacggccctcctgctcccatctcgggctgcttgggagacatcagagcaggccccagcccccagtcccctcttccggccgcctggacaggacccccattcagcccaggtgtttccggaagtcccacggccttggggccacaggagaagggttgaagcgtggctggggcaccactccccccacctggagtggcattgggcccacagctgcccatctctgggcctcaggtggaccaggggatctctaagggtctgctgtgccctttctatgcgtcctccacatcctatgatgtgcctgcttgttggctgctgtctgtgtgcgtcctggcatgttgtctggaggctggtgtcttttgcatgttcttggacaaatgtgtgctacctgcccaggcgcctgcaaccattgagcccacatgtgccccacgtgtgccctgcgggtggtcccgggcctggccagggctcagtgctcctcttccccctcctccctgttcccacccctcatgaagcacatgcgtgtccatcccatgtacccgtgggtcgacgcacgctcttgccacgccctgagcgtgtacacatgatgtgttctatgcattcaccctgccccccagcccgccctgcagaggacaagatgggtggccccggctccctttcccctaaccgcccctgcccgctgtgcagccgtgtgcgttggcgtgtgtttctgtgtcactggcgtgtcacgtgatgtagccgtgtttgctgacatgagcccctgcccccttctctgtttctccgttggtttctagagctctctccctccccttctcagaggggacaggactcctggggcctggctggggcccagagccaggccgccctctcctgttagccctcagagtcccatttctgttagccctcagagtcccatttctattggtgaccaacttgcaaatggataaaacacaggaaaatcctgccccccccttcctccctgcatgtcctgtccccagagccccccaccccaccctgggccaggtcaggcctgtggacgggagaaatagcaaccaatccaacagcggg

SEQ ID NO: 11702 - DNA, 632 bp, Homo sapiens
cacggtcgtggatgaggcttttaatccggggtcagccaggtacagcattggggacatccccaggcccagggctggcgatgtgctgggaaggaacttaggtagagaggtgggaagtgaaagcatagggaggccatagccctccagaggggaattctaagacagacagttgaaggtgaggcctttgaaaaacaatgggaacatcacctcccaaagagggactgaggtggctggaggaaccagagccgcctctgcactctgcaccgagggtcgcgtgtggctgtcaggagagcagcgtaagcctgtggagcctctgctcgcttcctgctcagaaagccagaagagagctggggcaggccaccagggcaccagacactcaccaagcggccatcaggactgggatgagaggacagaggaaggacactctgtccccaaaccctcccgtgtcctgacggccctagaacttggaggtgtcaggacacaacacagactcaaggctcctggattgaaaatgtggagggcttgggccaggcgcggtggctcacacttgtagttccagcgttttgggaggcccacgtgggaagatcacttgagcccaggagttcaagaccagcctgagcaatatagtgagaccc

SEQ ID NO: 11703 - DNA, 1415 bp, Homo sapiens
agtggggcggaggggacgagagtagtatctttggttctttggccctgacgctgtgttcctcttctcccagggcatcagcagcctgttcagctctctaaaagttgtccggctgctccgtcttgggcgagtggccgtaagctggaccactacattgaatatggagctgctgtgctggtcctgctggtgtgtgtgtttgggctggctgcacactggatggcctgcatctggtacagcattggggactatgagatctttgacgaggacaccaagacaatccgcaacaacagctggctgtaccaactagcgatggacattggcaccccttaccagtttaatgggtctggctcagggaagtgggaaggtggtcccagcaagaattctgtctacatctcctcgttgtatttcacaatgaccagcctcaccagtgtgggctttgggacatcgccccatccacagacattgagaagatctttgcagtggccatcatgatgattggctgtaagtatgacagtgctggggtggggttggccatctcttctgttagctggaaacagggaaatggctacagtgccagcaggatcaggagaataataacttaaaacaaggaagagtttttttaagactaggcttacagttaccctgataattaaagcagtatatgcttactgcaaaaaaatttagaaaatacaaaagagtgcaaagtagaaagtaaagactatccataattctgcttttcagagataactactaatactgttggtgtcttctcttacagactattttctttgcatatctgaatacatatagatttttataaacttaaaatgagatcttgctgcatacgcactttagtaaactactcatagaacagtgaattatggaagtcttttcatgtcaatttttttctttttaataaaaattgtatatatttaaagtatgaaatgagattttgatatagtgaaatgattatgacagcaaagcaaattaacatatccattcctttacatcattaccttttttttggtgaaagcacttgaaatctgctctctcagcaaatttcctgtaggcattacagtattattaactatagccgtcatgctacatgtcctacatgtcaatttgaacatagctgtagcttggcatatagtctaatgtagtatgagaaaaagaatgtatgaaaaatgaatgcaaaacatctcattaattgtattttatattgattatatattgaaatggtaatatttctgatgtatcggttaagtaaaatattctcttagaattaatttaatctgtttcattttccttttaaaagtagctcctaggaaaaatttaaatttaatcatttggacggtgctggtctagataaacatttttgatgtcttgcttgatgggaaattttccaactcaaaaacaaa

SEQ ID NO: 11704 - DNA, 255 bp, Homo sapiens
  SITE (34): n equals a,t,g, or c
ctctgttgcccaggctggagtgcagtggcacgantctcagctcaccatgcaagctctgcctcccaggttcacgccattctcctgcttcagcctcccaagtagctgggaccacaggcgcctgccaccacgcctggctaagttttttgtatttttagtggagacagggtttcaccatgttagccaggatggtctcgatctccttacctcgtgatctgcccgcctcggcctcccaaagtgctgggattacaggcatga

SEQ ID NO: 11705 - DNA, 18367 bp, Homo sapiens
cttatttgcaggtggactggcagaggaagtggacgacaaagttcttcatgctgcgttcattccttttggagacatcacagatattcagattcctctggattatgaaacaggtgagttagtgtctctcacgttcagaatcctcttactaggaaaataccttaaaaaattaaagtcacatcacaattctaaatatgcattctaaatatggttagtatacactacaggtaagttcaggaaggtgtctggtgacagtgatctcgatggagaaggaatgttctgaggccatgtggttgtgaactctgaatactttccagagtcttcagctgttgggttgagataagacagatttttcaatagaccagtagggagataggtttgaactacattgagatttgaatgttgttttaatctacctgatgggtaccccatcccacctgcaccttcttgcagctgtgctattaaatgaggcagcgggaaagcctagccccataatgggggtgggtgagggcgggggttcttggcctctgcacccctgggtgggtttcccatcgattggtatcacaaccacagttcagttttctgtttacctttgttgtcatttttaagattatagttttaggcctagttttatcatcaaccttgcatatgattgttagcaaagtctttaaactctctgggcctgggaaatctttatttgcaaaatgataaggttatgttggctttctaagggccttctagtctctgagttctatgataaacattattgtgcttggtctttctagttagttcagcattttcctgaagataaagactgagcatctttatcaggttttaggattcatgctttatgcacagttgatgcgcaaaatatatatttagatagataattgataggtcaaatgactttatttttctaattgctttgcatgcaatggttaaggttttaagtttggctttcgtagaataattgaatacttatcaattaaaaatacagtttactattcagctatgtccattaaaaaaacaaagtttattattgcttaaaatattgtataagaagaatcaagaatgagattccttcttcctaaatagtgattggatagaacttctggtgtttggatacgacatgtaactgacttcactttgtgaccatcctgtttcttcccactaccccacatagtaattacttgtttttgtttttccattttgtagaaaagcaccgaggatttgcttttgttgaatttgagttggcagaggtgagagtctgtgttactagtgtctagtccttggtttgtgatgttgttactgattacaaaggaagcttttcaccatttggttaggtttttgggccttaggctgatgcttccagagagatcagaagtaagtgctgttctaaggaaagcgtctctcacataatcagactggactgtgaataacatgtcagacctgccaggccctcccattcttgccctgcagaggagctagctcatgcacccctgttcattgagcattcttgcctggaagtagtgattatttcttgtgccttcaactagatggcaaattgttgcaccaccagctctaaaatcagccaggaagtgctctttgttagaaacacacaaaacctaggcaagaaatacagaggtggcatttttctggatttttgctactgagcatgtgtttagacaccataagaagcatttggctgcaagcctaaacttgtacctttgtctttccttggcaggatgctgcagcagctatcgacaacatggtatggctgggaatcttaattctaactaaagttgctttttggtggtacagaggctccttattcatatatcagtgttctggacttccaaagttacaaggttgcatggggaggtaaaaattctcacatgaaaatattcactgtgaattgatcacttataaaattagttcttactcagactccttcgccatttcagaataatgtaagtcctcatcatccttgttgaccagtctctcactggctctcccatgtttaggataatttgcagacacagtgcaaattgattgcacggtgtaactgcatattttgcaaaatagcaggatttcatgaagtgttagaccaatttacaattgagaagagaaatttaattatggcaggtgcaaatcactgatacaaatgatttggatattctggaaaggtccttgggaaaaatgatgatgctctttagtatttgtgccttccttgagatccttttagttttcatgtctgataagaagtgcaaagataccatactgttgatagaattttgttggaaaaataatacttcagtgcctgttacttttctttctttctttttttttttttttttttttttaacaatcttgaactcatgagttcaagacttctcagcttctcaagtagctggaattacaggctcaagccaacagggctacctgggctacctgttacatttctttctaccaagttacatttctttctaccgattagtgcatagttagtcctgaatattaatggtaagaaacttgtttttattatttttagtttcatcacagtaatttcccagtcagccttttaaaatttttcaattttaccacgaaatcttcatcaccacttcaagtggagtcaccttaaatgacctttcctggtaccgattatctttggataatgagatgttgttttatttgttgttctgttatccattcaccaaacatattcatcagctgtcagagatcatttttctttcatttcaaagcttatcttgacttttgaaggtgaactcaaatactgggaaactgcatttatttttgtaattttggagtgttctgaacccagagttacttttggtaatacaggtctttgtgtgctgctatgaaagaaaggggtgtgagttccctgaaacccacaggtggctttggggtggctgcatagcttactggtagaggcccagggattaagggaggacaaatcatgagtgtgtctcagaagtatatggaaagctggctggccctcttttaacctaagagagtttaagcagctggattttcaatcttttcagaatgaatctgagctttttggacgtacaattcgtgtcaatttggccaaaccaatgagaattaaggaaggctcttccaggccaggtgagtaggagcaacttccagattccctgtgatgttctgcagtttggccttagttgcattttttgtctctatttacttggaagtagatgctaaatgctgcttcctggtagataggagtagatgatggttcacattgggaagggcatgcaccacctttttagagaaacaagtgagtttgagcttctcagcaaagccaaagtgattgtttctgttatgagagaaattcctgcctgagctcatctttcccagttttcttgatattccattcctggggtctccatcaagggctgaaatcagcaaaggctacacctttgctttcggcatagctattttccttagccctactgagagctggacttcagggcctacattctggatgggaactttccttacccctgggagttctcagtggggaattgtctggcatacaggccacatagcatcttccactttgctgaccaaagcagctacttttcagttcaagctgacagcttgaatgaacatttgtttgattctttcctttcagtttggtcagatgatgactggttgaagaagttttctgggaagacgcttgaagagaataaagaggaagaagggtcagagcctcccaaagcagagacccaggaggtgagaatgaagctcctgcttccagagcacaggccggcgctgtccacaggagacttttttttttaagttttaatggaaatttgccaatatgtatatcaaagtggagggaatgaataatgaattcttagtactttggtaaagtcaatattgagttcttagtactttggtaaagtcaatatcgagtgaattcaagggcgaaactttgggtctcttgtccatgttgtgttctatgtgatgagtgtctcagctctgctcaggtatggatttgtgattatcaactgacagggaggaagctgaggtgcccctcttcacccctcctgatcagtccccctccttcactgaagagtttgccacaagggtcgtggtcttcctattcctgtgctaatggaggggagacagaatagggtagtgtcccttccttcaacctgtacatgggttcagggttctccagtcctacgggaacctgctggggcacttccccctgattctcagcatagtctctgacagttgcttcctgggcgtcccctcctctgagtactttgtgaatgttgtcattcttctgtatttctttcttggctcatggtttctctctcttctctcagctgaaacagtagcagtctatctctagttttatgcagcctctgttatgctgttgatcttcatggtctctttctagtcctgagcttcagatatttctgcctgcaagtctcatgggcagcttaagtttgcctaaaatggattctcccgcttctctaatcctgtcttcctgtgttctcaatcttggctaatttgccaccattcatccacacattgacccacgccagaaatttgaatgcaaatcagaactcataaagtggccatcacagtcagtggagtccccctggatcatcctgtatcctctgcttagtcttacctacttggagcacaatgcaaggcccaacatcttccactgtcttctgagcacttaggcctgagcaagagggctgcccccttgcttccatgtagttagccagtgtatatgcagggccaggcacagagggacgaggtggtacatggatgggtctgcctaactagaggacagtgggtgggctggaactggcatttgaagatactgagagttgtggatcatggaccagaaaagtgctgttctgtgactgtgaagcaagaggaggaagcagatgcatctgagggcaagcatgatgagataacacccccgtgtgtgaggctcaggttagccagtgctgagacctcctgtcgctgggcatccagctgggtgctacggccatggctcctgcctcctgcagccctatcagggcccaaggccttccccgtcagcacttgctccagcctacgcactggagttgtgttctgggtgggtgtgtagaatactcgcactcctacttagggcgtcagggagctctctctaactagcaatttcttctgcacctagggagagcccattgctaaaaaggcccgctcaaatcctcaggtgtacatggacatcaagattgggaacaagccggctggccgcatccagatgctcctgcgttctgatgtcgtgcccatgacagcaggtgagcaggacgctgtggtcagaacggcgggacgctggtggctgagcagtgagcctttcccaggttcttactgcttcacttcttgtgtccttgatattgcttctgacctaagttgatttgaggcatctcagatcctgggatctagtaacagataagtcagagcaggtgtttttgaagctttataagtgctggcttactgttttttaatcgttttttaaaaatacaagtaaataatgtattcttttttttaaagaatagcatatacatatattccaataatatttaagacaataaattgaaaattcattttcccctctctacatccagtcctcaattctagaagtaactagtgcttttattgagtattctttgtaatttattaaatattgacttctattctctttttaatctaaattttattatctagacatataaagagtcaattcagtttcacaaagcttgttttgaaaaaacagtcgtcccctggtgctgtccctgtgccctgctgccaacaccatttgctgctcctcagaggagcggatttcaactcttaggtgttttggtttttatttccatgttgataacagttttatatttctacttcctgttttccattttaaacattatcttctgattttctacttcagagaacaaagaattagttttttaaaatccccttccctgccccctcatcttccctgtataggtaccataattttggttaggtcctaagttattttaacaatgtaagcatcatgtgataacctcctttcatgcacagcattttgttttgcctggaattgataattgccttgtttttgcatagttttctgtgtaatcattcctgattttctcccagaccatcctgctgggggttttgcatccaggtgtctgcatcttgttaaggggagatgagggcaaggctgaattcctcaacattcagtatataaactttcacataatctccatttgtcattatggtacctcagccctcactatgcgtaggatgtcctagtccagagaccctctgctttaacctaccaaagactagacccccagctggctaccaggttggggaggggtggcccccagctgcagagtcagggaaaggatcccaaagattaaccactttcttaaatgggctttcagccaaacttactgtctccaggattacctgcaccctttcctctgagcttttggagtgcaaattgagttgcttcttggcttttaccagcttaagattcagctttctcgggtctgctatatcatttaggactcatctattttgttttctaacttcagaaattttgttgctgttgtctcttcctccctgctttttaagtttattttttggctattttagccactttaaagtgtttgttagcagtaattactctgttcgaaatttttgaatcatcctaaacaaaaccacttattaaaggtacctattaaataataactccccattttctcctccccttagcttctgataacctctaatctttgtgtctatgaattggcctatcctagatttttcatgtaagtggaatcatacaatagctgtccttttccacgccttgttgattttgcatagcataatgctttcaaggttcatccttgtaccatgtatcagtgcctcattcctttttgtggctgaataatattccgttgtatttggataaatatcttgttcattcatttgttgatgggcacttgcacattgttttcaccttttgactattgtaaatgcctgtgtgaatatccacatgtaagtatatgtttaaattcctgttttcaattcttttggatatatatgcctaggaatggaaatgcttagtcatatggtaactctgtatttaactttttgaggaaatgccaaactattttccacagtggctggaccattttacatttctaccagcaatgtatgagtgtttcagtttttccacatcttctctttttttttttttttttttttttttgagacagagtctcgcactgttgcccgggctggagtacagtggcgtgatattggctcactgcaacctccgcctcccaggttcaagtgattcttgtgcctcagcctcccgagtagctgggattacaggcgtctgccaccatgcccagccaattttttgtatttttagtagagacgaggtttcaccatgttggttggccaggctggtctcaaactcctgacctcatgattcgcctgcctcggcctcccatagtgctgggattacaggcgtgagccaccatgcctggcccacatcttctcttaacaggtgtgacatggcatctcattgtggtttttatttttattccctactgactaatgatgttgaacatcttttcatgtgcttgttgaccatttgtatatcttctttggagaaacatcttttcaaatctttggcttatttattaactggattgtttgttttgttttttttaagagacagggtcttgctctgactcccaggctggagtgcagtggtgagaacatggcttactgtagctttgaacccttgacctccagtgatcctcctgccttgacctcccaaagcactgggattacaccgtgcctggccattttgttgttgaattataggagttcattatatattctggatattaaacccatgttaaatatgatttgcaaataagcattctcctgttctgtgggttgctttgccctctattggtacggttctttgatgcacgtcttaaattttgataaaatctaattatttttttctttcacctctgcttttggtgtgacatttaagaaaccatcaccaaatccagagtcatgaagatttgcccctatgttttcttctaagatcctttggtttttcttttaaaaaatcagtttcctaccaatttagtgtggttttaaaagggaacagagctcgaacatgtatattcaatcccccttcaacagaatctcctatagtcctggccaggtgtggtggtttacacctgtaatcccagcactttgggaggccaaggtgggcggatcatctgaggtaggagttctagaccagcttggccaacatagtgaaaccccatctctactaaaaatacaaaattagccaggtgtatggtacatgcctgtagtcccagctactcaagaggctgaggcaggggaatgacttgaacccaagaggtggaagttgcagtgaactgagattgtgccattgcactgcagcatgggcaacaagagtgaaactccgtctcaaggaaaaagaatcccttatagtccttacaaggttagtatcacaaaggtttataatgagtatctcttattttaaaacaaaaatatgaacactaaaccaaagttttttcgaggttttttattttgtcctattttttaaccccagcgctttttcctttctcaattccagagaatttccgctgcctgtgcactcatgaaaagggctttggctttaagggaagcagcttccaccgcatcatcccccagttcatgtgccagggcggtgatttcacaaaccacaatggcactgggggcaagtccatctatgggaagaagttcgatgatgaaaactttatcctcaagcatacgggaccaggtaggagccagttggcatgtggtgacgagggaggctgggcaagggtgggatggccaggcaggatggaaggacaggttgtagttctggctggcggacactaagagtctggaggagacccagccaccagacataggagaaccatgcagccttgctagggtggagttggcttgttgacattcaggtactgttcatcccccaaccgtgtccacaattcctattagccccgcttggattctgtggtctgctgttgcaggctcttatgctctcaaccccactgctctccctgccctcaccatcagatttactcagtaaaatctcggtggttagtcccccagcaactagagaaaaaacacagaattgtactgaacaatcccacttgaaatttataactatagttcttaaggggacccttgccaacctgaccagatttccctacttgatgctcagtcccaaccggagatgatgtgtccatgcccgtcttcacttctgaagccctcatatcatcaccttcccacctcatctaatgcttcacctcctgcatctctccactcgtgcatgctctttcttccaattacaggggatgagctgtctctcctaggccagcctctccacctgtggactggatcctgtccctctcctctacttaggaacatggcttctaaagttgtccccttcttgtaatccatttcccctgctctgctagatcagtccattagcatgaaagcatgcagttatcaacctttaaaaaaaatcttcatccggttgccgggtgcagtggcttagtcctgtaatcccagcattttgggaggcagaggcaggcggatcacctgaggtcaggagttggaggccagcctaactaacatggagaaaccccatctctactaaaaatataaaattagccgggcgtggtggcgcgtgcctgtaatcctagctgctcggaaggctgaggcaggagaatcacttgaacctgggaggcggaggttgtgatgagccaagatcgcaccattgcactccagcctgggcaacaagagcgaaactccgtctcggaaaaaaaaaaacaaacttcatccttgtactcttgttccctctccagctatcacccatgcccctggtcccccatcttttttcaagaagtaaaagcataacttcttgaaaacatggtacagacttgctgccttcgcgttttctctaatcccttctaggcagacttctagtcccatctcgccattgaaaccactcttgccaaaaatacgagtagccagttcttggcgatcatcttatcccacctcccagatgttatcccacctcccaggagcatttcatactacaggttgagtgtccctttcctgaaatgcttgggaccagaagtattttgtattttggaatatttgcattatacttaccagttgagcatcccaaatctgaatatctcaaatctgaaatgctcgagtgagcagttcctttgagtatcatatcagtgctcgtgaagtttcagattttggggcattttggattttggattttcacatttgggatgctcagcctgtactaactctgttctccttgactccttcttcacttggctggcaggactcctgcctcttcttgtctccttttacctagatggctgctttttctgtctttgctgtctccttcttttcctgacccttaaacactgaagtggctcagagcccattctttggttctccagaagcctgttaccctgtgctccgtttttctaactggtggtttgtagggcccctctttactatactgaactgacatgtgtaggtgatatagcccactgacccacatcgttattttaaaaatcagtattcatctgtaactataatagggaagaacatcagaggaaataaacgaatttgtataatactcgaatatgtttccagatgtacatgcttaagcacagctgtgtcagaacacaaagtgaattattcaggcgtctgcccctgtactcaaacgcagcagttagaaatgcagacgggagtgtcaactggataccactaggagtgatgctattggtgatacggctttgtgaaatggtagataaagttgattagagtccaaagtaaagaataatctgtttatttacatagtagttacattcctagaagattccatggaaaatcaaaagcactccaaaactttgggcttatatgtataatggaattatgttttaggtgcagataactgtaaacacattttttacctataccaatatctggcaggatatttgttgttttgttgttgtttggtttttgtttttttgagacagggtctctttctgttgctcaggctggagtgcagtggtgcaagacggctcactgcagcctcaacctctccagctcaagcagtcctgcctcagcctcccaaatagctgggattataggtgcacgccatccataatgccaggctaatttttaagttttttgtagagacagggtttcattatattgctcaggctagtctggaactcttagcttcaagtgatcctcccacttcagcctcccagagtgctgggattacaagcattagccactgcgcccagcctctagcaggatgtttgtaagggccaagaggatatgagacaattcattgtgccagacattgcagaacatctagcattccaggcccccacctgctaaatgccagtagcacccccacaatatttcagacagtcaaaaacactttcaggccaggcacggcggctcatgcctgtaatcccaacactttgggagtctgaagtggcagcccaaagccagaggatcacgtgagttcaggagttcgagaccagcctgggcaacatagtgagaccctatatctactgaaaaaagaataaaaaaattatccaggtgtggtggtgcacgcctgtagtctcagccgcttgggagttgaggtgagaggattgcttgtgccccagagattgaggctacagtgagctgtgatgcactcctgtactcagcctgggtgacagagtgatccccatctcaaaaaaagtaaattcagatttccaaaggtttcctagggacaggacaccaaccccactgagaagcagtgccctaagcagtcacacccggtcccagggctttcagcggtatctctgagttaagtttgtgcagactggcatctgcatgctgatggctccctgagctccagactcctgtccaactgcctgcctgttgtcttcactggatatcccacgagcatctcacactttacatgtctaaaacagctcttggccttctcccctaaactcttcctcctcctcttccctgtttcaataaatgactccaccatccacttagccgcttgatcagaaacttaggagtcattgtggacacacacacacatacatacatgtacacatacacacacagacacacacatatacatgtacattctcttacgtgacaaatgtccatgttaccaggcctcactgtgtcatagctgtcattttgaatggctcttttccactgattgtgagctccaccagagcttggactatgttctgctcatcagtgttcccagggcttaacagggacctggttgtcaagtagacacttaattgttaaataaatgaattaatgaaagaacagaccagtataaagtgattgaaacacctcacttaccatttcactgactattaactgaatccaagataaggtggccgcatttgcatgtgatctgtgcatccccgagtctgagcctgactggctgaagggctgtcaacagcctgcacagacgtcctttaagggctggtagccagggttcggggagctgatggttgttctctccctcaggtctactatccatggccaactctggcccaaacaccaatggctctcagttcttcctgacatgtgacaagacagactggctggatggcaagcatgtggtgtttggagaggtcaccgaaggcctagatgtcttgcggcaaattgaggtatgtggccaggaatgggcctcctccttacccaggccctaggagcacagccctgtgtgagggctggagagtctctgtggcctgagagagatggccaggggctgtgtccagcgggaggggctgctgctgcccaggttccggggtggaagtgggcaaatgggcaggcaggggttggtatccctaaaccactgttagtctccggccttactccctcacttctattctgccacaaaggcccagggcagcaaggacgggaagccaaagcagaaggtgatcatcgccgactgtggggagtacgtgtgaggcggcactctctctgcttccccctccgctcttgaccctgcatatccaggaaggaactgccagcctcagaggaggcagcaccgagggtgcctgtttgaagcaagcagcatttgggatatgtgcccttcctcagggtctgcttggagcagctcctctgcaggcacagcctggactattcccaggcacagctgtgggcccaggagccagctcaggtgctcccctccaccatgggcaggctgtgcaaaaagccactggcttttctcagcatttgctgctgggcctctcctgggactaccagtgtggctcttacgtgttttctttgctaaaataaaccctagttcttatattgctcttcctgctagttcttgggagttgtcagagattgtgtctgtggctaagctggacctctgaggcaggctggtgagtggggagagcagagcatctttttcacagctttcatttcctcccttgggccgatccccttagatgtcaggtgatgtatcttcacaccaggcatcgatgtcagggcaacggaaattaaagactggaaagctccggtcttctgctgcctctgctcctaaacccagctgccggccttacagccagcaagtgtactctcagtggttcatttgtttatttgttcactttcaccctacagattttaaaaaatgaaatttttataactcaaagtgccttctctgtgccaagtactatgcctatttgtcaggagacaggaagccaacaaactacatgtgcctaatccagcccactgcctgtttttatgaatcaggttttattggaacacagccacgtccatttatttacatattgtccatggtggtttcttactgcagtggcagaggtgcgtaaggggctatagacacaatacaggctatggtccctgtattagggttttctagagaagcagaaccaatagggtgtgtatatatgtagaaagagatttattttaaggaactggctcaagcagtggtaggagctggcaagtctgcaatctgcacaacagaccagcaggctggagactcaggaaaaaaactgatgttgcagttcagctctgaggcagtttggaagcagaattcttcctccagtgatctcagtcttttttctcttaagaatttcaactgattggatgaggcctacccacattatggagggtaatctgctttactctctactgacttaaatattaatccatctaaaaaataggccaggcatggtggctcatgcctataattccaccactattgggaggctgaggcaggaggatcacttgagcccaggagttcaagaccagcctgggcaatgtagagacccccatctctagggggagaaaaaaaagccaggtatggtagtgcacacctatagtcccagctactcagaaggctgaggtgggaggatcgcttgaacctgggaggttgaggctgcagtcagccatggtcatgccactgtactccagcctgggtgacaagagggagaccctgtcttgaaaaaaagaaaccatcatcacagcaacatctagactagtgtttgactaaaaactggataccatggcctagccaaattgacacacaaaatagaccatcacagtcccaaggcctaaaatacttactatctgagcctttacaaaacaggattgccagccactgaagagaacaaatggtcccaccccctgctgagctcacagtctggctctcctgtgtgcagccacttcttggagctggcttctctccactccccctccagatgctggtcagccaggcggttataaagaatctcatctgctgaaggcttttagcagggactgagtcctgtagctgttggacacctcctgtgggttgggtcactcagaccattcagaatccactgagctgagcttttgcatcttggattgagatctggatgagccaggaggcaggagaggctaggtggtcctcatgaccctaggatagctcttgctgagggatggtggcattctgccctacctctggctcccatgtgccgactggactttgtgagctccagctgctacagttgactgagttcaggctccatgtagctgggatatactacatggttacccctcacccctatggagcttccaaaagagaccctccctcaaagcacagccccttctctgagtgcaaataatggccatcagaggtcagtcacaggtgttaggcaggcatctatgaagctggggatgatagcactgacttcagtgcttggacgagaaccaggagagagtgtgtagaaaaagcacagccagcctcccataaaaggacagactcctgtgacaaccttgtcactctgttcctccctgatactctggggaggtggaggccagtgggcagttctgaaagctcagcaggtttggagccattgggtgtggactcctctcccagtgttcctcctgggtgttcacagatgttattgaatgcacactggaaccctgcacaggtaaactgaggctttattggcgtgactgccaaaggtcacacagggtggtttggcagagctgggattagaagcccagcctgtctctcttcagtagtaatggagtcctgggaggtttactaggctttagcctcaatctgtggcggcagggtccacagccctggggagtgacacagtcatggtccccatgattggccaggacctgtgtggagagacacaggagacaagaccctgctcttccaggccagaagggaggggagccccagagctgggcagtggcatgccccacagcctggccacctgcttcggctacgcaccatgcagcagctgcacctggctgcctcgggaaaactctgacctctctgggaagtggagccagtggctctgtgggcgtcctttcctgcagcctggagagcaaagcggctttccctgggactgtgtggctcctgtcccaactggcctccccattccacattcccattgctggaccagcaccaggactgggcacagggcttccttttgctgattcatttcccccctaactcattcagagttgagccccatctgagtccccacatgctggccctgaaacggttacaaaggctgaaaccagggatggcaggcccaggatcagtgctgtggctgttggagtgtcctctccaacagcatgacagccgcctccaggtgctcccagcatctgttgcagtcatggcagcctcacggcaacctctgaagaaggaattatagaaccaactttttattgttgaaaatggagtcttgtagagttcagtgatgggaaactaaagtagaaaaagcacatcacaaagaaacatatatagtacagtgtgatcccaattttgtaaaaatatctgtaatatgtaagcataggtatttgtatatcttaagaaaaaaagcctagaaataaagccacaaaaatattaatagtgtgtttatttgacttgtgggactgtagtgatttgaattgtattttattttttatatatcccactttcctccaaaactgcattatttttttgagaagtgaaagacatttttgaaaaagggggtcaagtgcccatccagggttcctttcaaaaagggggccaagcagttgacctggatgggcagttcccccatgcaaattgccacccaagacacctggtgggtacagacctctctcagcaggacatgggatcccattgtctgggaacacagcaaagtttcacagccgctgccacaagtgacacttgctaggcctttaaaggctataagaatacaagtcccgccctctgagggatgccatgtgtagatggtttaggaaagagcacagctctgaaataaatacatcatcacctgcagaacacattttggtttaatggacagacatagaagtggctcaaaaataagcaaattcatttgtaataataccagcaaatacctattgttaagcatttatatgtcagacatcccaaagatttgtgtacatatttagtctttataatagctttgggaggaaagaaccaatatcatactctacaaaggaagaagcagaaccaggattcaaatctatttggcaccaaaaatctgcctcttgctacactgcctctattcctgtttctttggaccttttccagaacatgttacttccctgcctcagttagaagttagtgactacgaatcccctgctgacttggcctcaaggccagtattgcaccgcaaggaccaagactgctgggcattcctcttttgcctgttgtatgcgtcctctcttcctgtcaactgtcattgatttctcattgctgtcagtagatctgaaacaaccaccaccatcatccttccaaccctcatctggtgcaacgagataaacaggccatgccctgagcaaagaaaagggaaatggtggtatctgtgctgccagcctgggccacccactgcagatgcacatgcttggctcagcaaacggataaggattaaattcatggactttgtgttcattcacaattgtttcattgctcaagggatttttctattttatttcatttggtgactatctggatgataaaagttgctgaaagtctgatggccaactaggtagacaaagccttatgtttttccattgttctgtatgaaccaggaggatcacggctcgtattggttcctgctatgcacagcttgattaatgggtaaggtgtactccatatctacaaaccttcaggtagtttacagacattcttggtgcacccctaactatgccagatcattggctgggcactaaagatacaggtggagtaaaaaattaattgtcaaaataactggctaatttaaaatttacaattgcctagaagaccatctttgatgttaagaaggaacaattaagtaaatactaggatggcaaacaggttccataatttcattttgttgagacaacagttttgctcatgtcaccaggctgaagtgcaatgttgtgatctctgctcactgcaacctccacctcccaggttcaagcaattctgcctcagcctcctgagtagctgggattataggcatgcaccaccatgcccaggtaatcttgtatttttagtacagatggggtttcactgtgttggccaggatggtcttgaactcctgacttcaggtgatctgcctgccttggcctcccaaagtgctggggttataggtgtgagccaccatgc

SEQ ID NO: 11706 - DNA, 19633 bp, Homo sapiens
gcgcgcgagcaagatggccaccaccaagcgcgtcttgtacgtgggtgagcaggaggggttgctaggcggagtctgagtgaacgcgacccccaagggtcggggcgtggggtgggacgcatctctgaaccaggaggacggcgagctgctgtcaaggccgggtctctggcggtagtgctggcgatagctctggctgtgcttaaactccttccaaggtttcccactgtcctcaggaaaaagtgcagacttcttagcagtacgcacttctccagcttctttgctttgcttcccgattcgctgggtctcccgaaaaatgacccacttgcccccaaggttcaggttatttcacacctttgggcctctgcttttgcgactcccttgcagtgaacagccttgccacacacctcaggtgcgtgaacccgagacggaatgattattctgacttcctagcccgctgagctccagcgggccccgaggagcggtaaaggagtattatggcccttcggatcctctcgttcatttgttttacaaacattcagtgcagcgacggctcagccccagcccctgccataaaggaaggagttcccagactagccagaaaaaaagtggaattacctcagtagcacacttttgataagcgctgtagtgaggatggatcatgataatatgggcctggctgcgggacaaatgacccatccatctggagaagcgagggcaaattctggatgcggcgatgccagagctgatgagcaggagttagctacgtaaccgaagcagaggcaaggccgttcactgcaagggagtcgcaaaggtgtgaaatagcctgacacttgggggcaagtgggtcattattcgggagacccaggaaattaggaagcaaagcaaaaaagctggagaggtgggtactgctaaggagtttgcactttatcctgaggacagtgggaagcctttgaaggagtgtaagcgaaaagttacgggttcaaatttgcattttcctaagatcattctagttggctttgtggagttgatggaatggaggcagggaggtcagttgtgaagctattgcagtaatcccaggactagatgagagtctgaaagaagggcgaagagaggaatatttttcataagtatgggtgggcagagatgagagggggatgtttgtttacccaaagaactgaatggaagggtcctgtcccctggctagcatgctaactgggctgcaaggacttctgcaagagtatggagatcagtggctcagaaggcccttggcttatttgcaggtggactggcagaggaagtggacgacaaagttcttcatgctgcgttcattccttttggagacatcacagatattcagattcctctggattatgaaacaggtgagttagtgtctctcacgttcagaatcctcttactaggaaaataccttaaaaaattaaagtcacatcacaattctaaatatgcattctaaatatggttagtatacactacaggtaagttcaggaaggtgtctggtgacagtgatctcgatggagaaggaatgttctgaggccatgtggttgtgaactctgaatactttccagagtcttcagctgttgggttgagataagacagatttttcaatagaccagtagggagataggtttgaactacattgagatttgaatgttgttttaatctacctgatgggtaccccatcccacctgcaccttcttgcagctgtgctattaaatgaggcagcgggaaagcctagccccataatgggggtgggtgagggcgggggttcttggcctctgcacccctgggtgggtttcccatcgattggtatcacaaccacagttcagttttctgtttacctttgttgtcatttttaagattatagttttaggcctagttttatcatcaaccttgcatatgattgttagcaaagtctttaaactctctgggcctgggaaatctttatttgcaaaatgataaggttatgttggctttctaagggccttctagtctctgagttctatgataaacattattgtgcttggtctttctagttagttcagcattttcctgaagataaagactgagcatctttatcaggttttaggattcatgctttatgcacagttgatgcgcaaaatatatatttagatagataattgataggtcaaatgactttatttttctaattgctttgcatgcaatggttaaggttttaagtttggctttcgtagaataattgaatacttatcaattaaaaatacagtttactattcagctatgtccattaaaaaaacaaagtttattattgcttaaaatattgtataagaagaatcaagaatgagattccttcttcctaaatagtgattggatagaacttctggtgtttggatacgacatgtaactgacttcactttgtgaccatcctgtttcttcccactaccccacatagtaattacttgtttttgtttttccattttgtagaaaagcaccgaggatttgcttttgttgaatttgagttggcagaggtgagagtctgtgttactagtgtctagtccttggtttgtgatgttgttactgattacaaaggaagcttttcaccatttggttaggtttttgggccttaggctgatgcttccagagagatcagaagtaagtgctgttctaaggaaagcgtctctcacataatcagactggactgtgaataacatgtcagacctgccaggccctcccattcttgccctgcagaggagctagctcatgcacccctgttcattgagcattcttgcctggaagtagtgattatttcttgtgccttcaactagatggcaaattgttgcaccaccagctctaaaatcagccaggaagtgctctttgttagaaacacacaaaacctaggcaagaaatacagaggtggcatttttctggatttttgctactgagcatgtgtttagacaccataagaagcatttggctgcaagcctaaacttgtacctttgtctttccttggcaggatgctgcagcagctatcgacaacatggtatggctgggaatcttaattctaactaaagttgctttttggtggtacagaggctccttattcatatatcagtgttctggacttccaaagttacaaggttgcatggggaggtaaaaattctcacatgaaaatattcactgtgaattgatcacttataaaattagttcttactcagactccttcgccatttcagaataatgtaagtcctcatcatccttgttgaccagtctctcactggctctcccatgtttaggataatttgcagacacagtgcaaattgattgcacggtgtaactgcatattttgcaaaatagcaggatttcatgaagtgttagaccaatttacaattgagaagagaaatttaattatggcaggtgcaaatcactgatacaaatgatttggatattctggaaaggtccttgggaaaaatgatgatgctctttagtatttgtgccttccttgagatccttttagttttcatgtctgataagaagtgcaaagataccatactgttgatagaattttgttggaaaaataatacttcagtgcctgttacttttctttccttctttttttttttttttttttttaacaatcttgaactcatgagttcaagacttctcagcttctcaagtagctggaattacaggctcaagccaacagggctacctgggctacctgttacatttctttctaccaagttacatttctttctaccgattagtgcatagttagtcctgaatattaatggtaagaaacttgtttttattatttttagtttcatcacagtaatttcccagtcagccttttaaaatttttcaattttaccacgaaatcttcatcaccacttcaagtggagtcaccttaaatgacctttcctggtaccgattatctttggataatgagatgttgttttatttgttgttctgttatccattcaccaaacatattcatcagctgtcagagatcatttttctttcatttcaaagcttatcttgacttttgaaggtgaactcaaatactgggaaactgcatttatttttgtaattttggagtgttctgaacccagagttacttttggtaatacaggtctttgtgtgctgctatgaaagaaaggggtgtgagttccctgaaacccacaggtggctttggggtggctgcatagcttactggtagaggcccagggattaagggaggacaaatcatgagtgtgtctcagaagtatatggaaagctggctggccctcttttaacctaagagagtttaagcagctggattttcaatcttttcagaatgaatctgagctttttggacgtacaattcgtgtcaatttggccaaaccaatgagaattaaggaaggctcttccaggccaggtgagtaggagcaacttccagattccctgtgatgttctgcagtttggccttagttgcattttttgtctctatttacttggaagtagatgctaaatgctgcttcctggtagataggagtagatgatggttcacattgggaagggcatgcaccacctttttagagaaacaagtgagtttgagcttctcagcaaagccaaagtgattgtttctgttatgagagaaattcctgcctgagctcatctttcccagttttcttgatattccattcctggggtctccatcaagggctgaaatcagcaaaggctacacctttgctttcggcatagctattttccttagccctactgagagctggacttcagggcctacattctggatgggaactttccttacccctgggagttctcagtggggaattgtctggcatacaggccacatagcatcttccactttgctgaccaaagcagctacttttcagttcaagctgacagcttgaatgaacatttgtttgattctttcctttcagtttggtcagatgatgactggttgaagaagttttctgggaagacgcttgaagagaataaagaggaagaagggtcagagcctcccaaagcagagacccaggaggtgagaatgaagctcctgcttccagagcacaggccggcgctgtccacaggagacttttttttttaagttttaatggaaatttgccaatatgtatatcaaagtggagggaatgaataatgaattcttagtactttggtaaagtcaatattgagttcttagtactttggtaaagtcaatatcgagtgaattcaagggcgaaactttgggtctcttgtccatgttgtgttctatgtgatgagtgtctcagctctgctcaggtatggatttgtgattatcaactgacagggaggaagctgaggtgcccctcttcacccctcctgatcagtccccctccttcactgaagagtttgccacaagggtcgtggtcttcctattcctgtgctaatggaggggagacagaatagggtagtgtcccttccttcaacctgtacatgggttcagggttctccagtcctacgggaacctgctggggcacttccccctgattctcagcatagtctctgacagttgcttcctgggcgtcccctcctctgagtactttgtgaatgttgtcattcttctgtatttctttcttggctcatggtttctctctcttctctcagctgaaacagtagcagtctatctctagttttatgcagcctctgttatgctgttgatcttcatggtctctttctagtcctgagcttcagatatttctgcctgcaagtctcatgggcagcttaagtttgcctaaaatggattctcccgcttctctaatcctgtcttcctgtgttctcaatcttggctaatttgccaccattcatccacacattgacccacgccagaaatttgaatgcaaatcagaactcataaagtggccatcacagtcagtggagtccccctggatcatcctgtatcctctgcttagtcttacctacttggagcacaatgcaaggcccaacatcttccactgtcttctgagcacttaggcctgagcaagagggctgcccccttgcttccatgtagttagccagtgtatatgcagggccaggcacagagggacgaggtggtacatggatgggtctgcctaactagaggacagtgggtgggctggaactggcatttgaagatactgagagttgtggatcatggaccagaaaagtgctgttctgtgactgtgaagcaagaggaggaagcagatgcatctgagggcaagcatgatgagataacacccccgtgtgtgaggctcaggttagccagtgctgagacctcctgtcgctgggcatccagctgggtgctacggccatggctcctgcctcctgcagccctatcagggcccaaggccttccccgtcagcacttgctccagcctacgcactggagttgtgttctgggtgggtgtgtagaatactcgcactcctacttagggcgtcagggagctctctctaactagcaatttcttctgcacctagggagagcccattgctaaaaaggcccgctcaaatcctcaggtgtacatggacatcaagattgggaacaagccggctggccgcatccagatgctcctgcgttctgatgtcgtgcccatgacagcaggtgagcaggacgctgtggtcagaacggcgggacgctggtggctgagcagtgagcctttcccaggttcttactgcttcacttcttgtgtccttgatattgcttctgacctaagttgatttgaggcatctcagatcctgggatctagtaacagataagtcagagcaggtgtttttgaagctttataagtgctggcttactgttttttaatcgttttttaaaaatacaagtaaataatgtattcttttttttaaagaatagcatatacatatattccaataatatttaagacaataaattgaaaattcattttcccctctctacatccagtcctcaattctagaagtaactagtgcttttattgagtattctttgtaatttattaaatattgacttctattctctttttaatctaaattttattatctagacatataaagagtcaattcagtttcacaaagcttgttttgaaaaaacagtcgtcccctggtgctgtccctgtgccctgctgccaacaccatttgctgctcctcagaggagcggatttcaactcttaggtgttttggtttttatttccatgttgataacagttttatatttctacttcctgttttccattttaaacattatcttctgattttctacttcagagaacaaagaattagttttttaaaatccccttccctgccccctcatcttccctgtataggtaccataattttggttaggtcctaagttattttaacaatgtaagcatcatgtgataacctcctttcatgcacagcattttgttttgcctggaattgataattgccttgtttttgcatagttttctgtgtaatcattcctgattttctcccagaccatcctgctgggggttttgcatccaggtgtctgcatcttgttaaggggagatgagggcaaggctgaattcctcaacattcagtatataaactttcacataatctccatttgtcattatggtacctcagccctcactatgcgtaggatgtcctagtccagagaccctctgctttaacctaccaaagactagacccccagctggctaccaggttggggaggggtggcccccagctgcagagtcagggaaaggatcccaaagattaaccactttcttaaatgggctttcagccaaacttactgtctccaggattacctgcaccctttcctctgagcttttggagtgcaaattgagttgcttcttggcttttaccagcttaagattcagctttctcgggtctgctatatcatttaggactcatctattttgttttctaacttcagaaattttgttgctgttgtctcttcctccctgctttttaagtttattttttggctattttagccactttaaagtgtttgttagcagtaattactctgttcgaaatttttgaatcatcctaaacaaaaccacttattaaaggtacctattaaataataactccccattttctcctccccttagcttctgataacctctaatctttgtgtctatgaattggcctatcctagatttttcatgtaagtggaatcatacaatagctgtccttttccacgccttgttgattttgcatagcataatgctttcaaggttcatccttgtaccatgtatcagtgcctcattcctttttgtggctgaataatattccgttgtatttggataaatatcttgttcattcatttgttgatgggcacttgcacattgttttcaccttttgactattgtaaatgcctgtgtgaatatccacatgtaagtatatgtttaaattcctgttttcaattcttttggatatatatgcctaggaatggaaatgcttagtcatatggtaactctgtatttaactttttgaggaaatgccaaactattttccacagtggctggaccattttacatttctaccagcaatgtatgagtgtttcagtttttccacatcttctctttttttttttttttttttttttttgagacagagtctcgcactgttgcccgggctggagtacagtggcgtgatattggctcactgcaacctccgcctcccaggttcaagtgattcttgtgcctcagcctcccgagtagctgggattacaggcgtctgccaccatgcccagccaattttttgtatttttagtagagacgaggtttcaccatgttggttggccaggctggtctcaaactcctgacctcatgattcgcctgcctcggcctcccatagtgctgggattacaggcgtgagccaccatgcctggcccacatcttctcttaacaggtgtgacatggcatctcattgtggtttttatttttattccctactgactaatgatgttgaacatcttttcatgtgcttgttgaccatttgtatatcttctttggagaaacatcttttcaaatctttggcttatttattaactggattgtttgttttgttttttttaagagacagggtcttgctctgactcccaggctggagtgcagtggtgagaacatggcttactgtagctttgaacccttgacctccagtgatcctcctgccttgacctcccaaagcactgggattacaccgtgcctggccattttgttgttgaattataggagttcattatatattctggatattaaacccatgttaaatatgatttgcaaataagcattctcctgttctgtgggttgctttgccctctattggtacggttctttgatgcacgtcttaaattttgataaaatctaattatttttttctttcacctctgcttttggtgtgacatttaagaaaccatcaccaaatccagagtcatgaagatttgcccctatgttttcttctaagatcctttggtttttcttttaaaaaatcagtttcctaccaatttagtgtggttttaaaagggaacagagctcgaacatgtatattcaatcccccttcaacagaatctcctatagtcctggccaggtgtggtggtttacacctgtaatcccagcactttgggaggccaaggtgggcggatcatctgaggtaggagttctagaccagcttggccaacatagtgaaaccccatctctactaaaaatacaaaattagccaggtgtatggtacatgcctgtagtcccagctactcaagaggctgaggcaggggaatgacttgaacccaagaggtggaagttgcagtgaactgagattgtgccattgcactgcagcatgggcaacaagagtgaaactccgtctcaaggaaaaagaatcccttatagtccttacaaggttagtatcacaaaggtttataatgagtatctcttattttaaaacaaaaatatgaacactaaaccaaagttttttcgaggttttttattttgtcctattttttaaccccagcgctttttcctttctcaattccagagaatttccgctgcctgtgcactcatgaaaagggctttggctttaagggaagcagcttccaccgcatcatcccccagttcatgtgccagggcggtgatttcacaaaccacaatggcactgggggcaagtccatctatgggaagaagttcgatgatgaaaactttatcctcaagcatacgggaccaggtaggagccagttggcatgtggtgacgagggaggctgggcaagggtgggatggccaggcaggatggaaggacaggttgtagttctggctggcggacactaagagtctggaggagacccagccaccagacataggagaaccatgcagccttgctagggtggagttggcttgttgacattcaggtactgttcatcccccaaccgtgtccacaattcctattagccccgcttggattctgtggtctgctgttgcaggctcttatgctctcaaccccactgctctccctgccctcaccatcagatttactcagtaaaatctcggtggttagtcccccagcaactagagaaaaaacacagaattgtactgaacaatcccacttgaaatttataactatagttcttaaggggacccttgccaacctgaccagatttccctacttgatgctcagtcccaaccggagatgatgtgtccatgcccgtcttcacttctgaagccctcatatcatcaccttcccacctcatctaatgcttcacctcctgcatctctccactcgtgcatgctctttcttccaattacaggggatgagctgtctctcctaggccagcctctccacctgtggactggatcctgtccctctcctctacttaggaacatggcttctaaagttgtccccttcttgtaatccatttcccctgctctgctagatcagtccattagcatgaaagcatgcagttatcaacctttaaaaaaaatcttcatccggttgccgggtgcagtggcttagtcctgtaatcccagcattttgggaggcagaggcaggcggatcacctgaggtcaggagttggaggccagcctaactaacatggagaaaccccatctctactaaaaatataaaattagccgggcttggtgggcgcgtgcctgttatcctagctgctcgaaaggctgaggcaggagaatcacttgaacctgggaggcggaggttgtgatgagccaagatcgcaccattgcactccagcctgggcaacaagagcgaaactccgtctcggaaaaaaaaaaacaaacttcatccttgtactcttgttccctctccagctatcacccatgcccctggtcccccatcttttttcaagaagtaaaagcataacttcttgaaaacatggtacagacttgctgccttcgcgttttctctaatcccttctaggcagacttctagtcccatctcgccattgaaaccactcttgccaaaaatacgagtagccagttcttggcgatcatcttatcccacctcccagatgttatcccacctcccaggagcatttcatactacaggttgagtgtccctttcctgaaatgcttgggaccagaagtattttgtattttggaatatttgcattatacttaccagttgagcatcccaaatctgaatatctcaaatctgaaatgctcgagtgagcagttcctttgagtatcatatcagtgctcgtgaagtttcagattttggggcattttggattttggattttcacatttgggatgctcagcctgtactaactctgttctccttgactccttcttcacttggctggcaggactcctgcctcttcttgtctccttttacctagatggctgctttttctgtctttgctgtctccttcttttcctgacccttaaacactgaagtggctcagagcccattctttggttctccagaagcctgttaccctgtgctccgtttttctaactggtggtttgtagggcccctctttactatactgaactgacatgtgtaggtgatatagcccactgacccacatcgttattttaaaaatcagtattcatctgtaactataatagggaagaacatcagaggaaataaacgaatttgtataatactcgaatatgtttccagatgtacatgcttaagcacagctgtgtcagaacacaaagtgaattattcaggcgtctgcccctgtactcaaacgcagcagttagaaatgcagacgggagtgtcaactggataccactaggagtgatgctattggtgatacggctttgtgaaatggtagataaagttgattagagtccaaagtaaagaataatctgtttatttacatagtagttacattcctagaagattccatggaaaatcaaaagcactccaaaactttgggcttatatgtataatggaattatgttttaggtgcagataactgtaaacacattttttacctataccaatatctggcaggatatttgttgttttgttgttgtttggtttttgttttttttgagacagggtctctttctgttgctcaggctggagtgcagtggtgcaagacggctcactgcagcctcaacctctccagctcaagcagtcctgcctcagcctcccaaatagctgggattataggtgcacgccatccataatgccaggctaatttttaagttttttgtagagacagggtttcattatattgctcaggctagtctggaactcttagcttcaagtgatcctcccacttcagcctcccagagtgctgggattacaagcattagccactgcgcccagcctctagcaggatgtttgtaagggccaagaggatatgagacaattcattgtgccagacattgcagaacatctagcattccaggcccccacctgctaaatgccagtagcacccccacaatatttcagacagtcaaaaacactttcaggccaggcacggcggctcatgcctgtaatcccaacactttgggagtctgaagtggcagcccaaagccagaggatcacgtgagttcaggagttcgagaccagcctgggcaacatagtgagaccctatatctactgaaaaaagaataaaaaaattatccaggtgtggtggtgcacgcctgtagtctcagccgcttgggagttgaggtgagaggattgcttgtgccccagagattgaggctacagtgagctgtgatgcactcctgtactcagcctgggtgacagagtgatccccatctcaaaaaaagtaaattcagatttccaaaggtttcctagggacaggacaccaaccccactgagaagcagtgccctaagcagtcacacccggtcccagggctttcagcggtatctctgagttaagtttgtgcagactggcatctgcatgctgatggctccctgagctccagactcctgtccaactgcctgcctgttgtcttcactggatatcccacgagcatctcacactttacatgtctaaaacagctcttggccttctcccctaaactcttcctcctcctcttccctgtttcaataaatgactccaccatccacttagccgcttgatcagaaacttaggagtcattgtggacacacacacacatacatacatgtacacatacacacacagacacacacatatacatgtacattctcttacgtgacaaatgtccatgttaccaggcctcactgtgtcatagctgtcattttgaatggctcttttccactgattgtgagctccaccagagcttggactatgttctgctcatcagtgttcccagggcttaacagggacctggttgtcaagtagacacttaattgttaaataaatgaattaatgaaagaacagaccagtataaagtgattgaaacacctcacttaccatttcactgactattaactgaatccaagataaggtggccgcatttgcatgtgatctgtgcatccccgagtctgagcctgactggctgaagggctgtcaacagcctgcacagacgtcctttaagggctggtagccagggttcggggagctgatggttgttctctccctcaggtctactatccatggccaactctggcccaaacaccaatggctctcagttcttcctgacatgtgacaagacagactggctggatggcaagcatgtggtgtttggagaggtcaccgaaggcctagatgtcttgcggcaaattgaggtatgtggccaggaatgggcctcctccttacccaggccctaggagcacagccctgtgtgagggctggagagtctctgtggcctgagagagatggccaggggctgtgtccagcgggaggggctgctgctgcccaggttccggggtggaagtgggcaaatgggcaggcaggggttggtatccctaaaccactgttagtctccggccttactccctcacttctattctgccacaaaggcccagggcagcaaggacgggaagccaaagcagaaggtgatcatcgccgactgtggggagtacgtgtgaggcggcactctctctgcttccccctccgctcttgaccctgcatatccaggaaggaactgccagcctcagaggaggcagcaccgagggtgcctgtttgaagcaagcagcatttgggatatgtgcccttcctcagggtctgcttggagcagctcctctgcaggcacagcctggactattcccaggcacagctgtgggcccaggagccagctcaggtgctcccctccaccatgggcaggctgtgcaaaaagccactggcttttctcagcatttgctgctgggcctctcctgggactaccagtgtggctcttacgtgttttctttgctaaaataaaccctagttcttatattgctcttcctgctagttcttgggagttgtcagagattgtgtctgtggctaagctggacctctgaggcaggctggtgagtggggagagcagagcatctttttcacagctttcatttcctcccttgggccgatccccttagatgtcaggtgatgtatcttcacaccaggcatcgatgtcagggcaacggaaattaaagactggaaagctccggtcttctgctgcctctgctcctaaacccagctgccggccttacagccagcaagtgtactctcagtggttcatttgtttatttgttcactttcaccctacagattttaaaaaatgaaatttttataactcaaagtgccttctctgtgccaagtactatgcctatttgtcaggagacaggaagccaacaaactacatgtgcctaatccagcccactgcctgtttttatgaatcaggttttattggaacacagccacgtccatttatttacatattgtccatggtggtttcttactgcagtggcagaggtgcgtaaggggctatagacacaatacaggctatggtccctgtattagggttttctagagaagcagaaccaatagggtgtgtatatatgtagaaagagatttattttaaggaactggctcaagcagtggtaggagctggcaagtctgcaatctgcacaacagaccagcaggctggagactcaggaaaaaaactgatgttgcagttcagctctgaggcagtttggaagcagaattcttcctccagtgatctcagtcttttttctcttaagaatttcaactgattggatgaggcctacccacattatggagggtaatctgctttactctctactgacttaaatattaatccatctaaaaaataggccaggcatggtggctcatgcctataattccaccactattgggaggctgaggcaggaggatcacttgagcccaggagttcaagaccagcctgggcaatgtagagacccccatctctagggggagaaaaaaaagccaggtatggtagtgcacacctatagtcccagctactcagaaggctgaggtgggaggatcgcttgaacctgggaggttgaggctgcagtcagccatggtcatgccactgtactccagcctgggtgacaagagggagaccctgtcttgaaaaaaagaaaccatcatcacagcaacatctagactagtgtttgactaaaaactggataccatggcctagccaaattgacacacaaaatagaccatcacagtcccaaggcctaaaatacttactatctgagcctttacaaaacaggattgccagccactgaagagaacaaatggtcccaccccctgctgagctcacagtctggctctcctgtgtgcagccacttcttggagctggcttctctccactccccctccagatgctggtcagccaggcggttataaagaatctcatctgctgaaggcttttagcagggactgagtcctgtagctgttggacacctcctgtgggttgggtcactcagaccattcagaatccactgagctgagcttttgcatcttggattgagatctggatgagccaggaggcaggagaggctaggtggtcctcatgaccctaggatagctcttgctgagggatggtggcattctgccctacctctggctcccatgtgccgactggactttgtgagctccagctgctacagttgactgagttcaggctccatgtagctgggatatactacatggttacccctcacccctatggagcttccaaaagagaccctccctcaaagcacagccccttctctgagtgcaaataatggccatcagaggtcagtcacaggtgttaggcaggcatctatgaagctggggatgatagcactgacttcagtgcttggacgagaaccaggagagagtgtgtagaaaaagcacagccagcctcccataaaaggacagactcctgtgacaaccttgtcactctgttcctccctgatactctggggaggtggaggccagtgggcagttctgaaagctcagcaggtttggagccattgggtgtggactcctctcccagtgttcctcctgggtgttcacagatgttattgaatgcacactggaaccctgcacaggtaaactgaggctttattggcgtgactgccaaaggtcacacagggtggtttggcagagctgggattagaagcccagcctgtctctcttcagtagtaatggagtcctgggaggtttactaggctttagcctcaatctgtggcggcagggtccacagccctggggagtgacacagtcatggtccccatgattggccaggacctgtgtggagagacacaggagacaagaccctgctcttccaggccagaagggaggggagccccagagctgggcagtggcatgccccacagcctggccacctgcttcggctacgcaccatgcagcagctgcacctggctgcctcgggaaaactctgacctctctgggaagtggagccagtggctctgtgggcgtcctttcctgcagcctggagagcaaagcggctttccctgggactgtgtggctcctgtcccaactggcctccccattccacattcccattgctggaccagcaccaggactgggcacagggcttccttttgctgattcatttcccccctaactcattcagagttgagccccatctgagtccccacatgctggccctgaaacggttacaaaggctgaaaccagggatggcaggcccaggatcagtgctgtggctgttggagtgtcctctccaacagcatgacagccgcctccaggtgctcccagcatctgttgcagtcatggcagcctcacggcaacctctgaagaaggaattatagaaccaactttttattgttgaaaatggagtcttgtagagttcagtgatgggaaactaaagtagaaaaagcacatcacaaagaaacatatatagtacagtgtgatcccaattttgtaaaaatatctgtaatatgtaagcataggtatttgtatatcttaagaaaaaaagcctagaaataaagccacaaaaatattaatagtgtgtttatttgacttgtgggactgtagtgatttgaattgtattttattttttatatatcccactttcctccaaaactgcattatttttttgagaagtgaaagacatttttgaaaaagggggtcaagtgcccatccagggttcctttcaaaaagggggccaagcagttgacctggatgggcagttcccccatgcaaattgccacccaagacacctggtgggtacagacctctctcagcaggacatgggatcccattgtctgggaacacagcaaagtttcacagccgctgccacaagtgacacttgctaggcctttaaaggctataagaatacaagtcccgccctctgagggatgccatgtgtagatggtttaggaaagagcacagctctgaaataaatacatcatcacctgcagaacacattttggtttaatggacagacatagaagtggctcaaaaataagcaaattcatttgtaataataccagcaaatacctattgttaagcatttatatgtcagacatcccaaagatttgtgtacatatttagtctttataatagctttgggaggaaagaaccaatatcatactctacaaaggaagaagcagaaccaggattcaaatctatttggcaccaaaaatctgcctcttgctacactgcctctattcctgtttctttggaccttttccagaacatgttacttccctgcctcagttagaagttagtgactacgaatcccctgctgacttggcctcaaggccagtattgcaccgcaaggaccaagactgctgggcattcctcttttgcctgttgtatgcgtcctctcttcctgtcaactgtcattgatttctcattgctgtcagtagatctgaaacaaccaccaccatcatccttccaaccctcatctggtgcaacgagataaacaggccatgccctgagcaaagaaaagggaaatggtggtatctgtgctgccagcctgggccacccactgcagatgcacatgcttggctcagcaaacggataaggattaaattcatggactttgtgttcattcacaattgtttcattgctcaagggatttttctattttatttcatttggtgactatctggatgataaaagttgctgaaagtctgatggccaactaggtagacaaagccttatgtttttccattgttctgtatgaaccaggaggatcacggctcgtattggttcctgctatgcacagcttgattaatgggtaaggtgtactccatatctacaaaccttcaggtagtttacagacattcttggtgcacccctaactatgccagatcattggctgggcactaaagatacaggtggagtaaaaaattaattgtcaaaataactggctaatttaaaatttacaattgcctagaagaccatctttgatgttaagaaggaacaattaagtaaatactaggatggcaaacaggttccataatttcattttgttgagacaacagttttgctcatgtcaccaggctgaagtgcaatgttgtgatctctgctcactgcaacctccacctcccaggttcaagcaattctgcctcagcctcctgagtagctgggattataggcatgcaccaccatgcccaggtaatcttgtatttttagtacagacggggtttcactgtgttggccaggatggtcttgaactcctgacttcaggtgatctgcctgccttggcctcccaaagtgctggggttataggtgtgagccaccatgc

SEQ ID NO: 11707 - DNA, 314 bp, Homo sapiens
aaaaaaaaaattagctgggcatggtgacgtgcacctgtactcccagctgctactcgggaggctaaggtgggaggatcatttgaggctgggaggttgaggctgcagtgaaccatgatcatgtcactgccttccagcctgggtaagagagcaagaccctgtctcaaagaaaaaaagaaaaaaaaaatcaccctggacaagtggattggaggaacagagccactatcaactcttccttagtctactacattaacttcctggtctcctgggttccaatcaacccatcctgggcctagtgtcagagcactgtctaaaat

SEQ ID NO: 11708 - DNA, 599 bp, Homo sapiens
aaatgtccatgctcttacatgtctttcctagatggcagaggcaaatgcaaagcaggaagacaagggaagataaatgccattggctttagccctaaatcatgctgttcactcagctttttcttgagttgactccacatgtctacctgtgaccagtggatcagtgcttcagatccatgaatatacaatacttcaggggttatccagttttataccccaccttgcacctcgggcaggcaatggggagccaaccagaccctgactacacacaccacaccctgtgatggatggtgaagagctcaaggtggccaacagtgggctccaggtgcctctcaggtcattccacatctatctcacgacctgagccagtaaggggcatggataggacctcagacaggacttctgtgccaaccccaaagaaccagccaggacatgcctccgggagaggcgtttgcatttgggtagaacactgcctgatgattgagaccacctgggctggaaacaggacagtcacacaaatgcctggcagggcaaggggagcataggagcctggcatgaaggagaaagggtcatgtacgtggttgtgagggtcctccctggca

SEQ ID NO: 11709 - DNA, 5900 bp, Homo sapiens
cgcggcacggcctagcgagtggttcttctgcgctactgctgcgcgaatcggcgaccccagtgcctcgaccactatgccgcgctctttcctcgtcaggaagccctccgaccccaatcggaagcctaactacagcgagctgcaggactctaatccaggtgcgttggaggggttctgggctccaggaggtttgggggagacaggcgaaggctgcgtggggggcacctgagggaggcggcctgcctgagccaggatcgagtcacaggatgttttgtggaccattgcgggctcgggagaccgggcaagtgggtccccagttccggggatctgtctgggtggttgggggagtgccgtgtagagggcaggggtcttcagcttggggggcctttgtagccggcgagaggcggaggagctccgcaagaggggaaggagaggaggcctgtgtcaggagggccctctggacgctgctggggagagtccggagtccagagggttgaggggaggggtggggagacgagatgtgtgtgaggagggggattggggcagggtggtggctccggggctgggatgatggggttctggcctcaggctggagactggggacttaggagagggagatcaggaaatgacctccttcaactgggggtcctacgtgtgagagactcagattgggtgacctgggcgaggagggcaggaacctggtctgtcctgtggataatttttttgatctaattatgtattgagaatcggccccacccagcccctggccagcggtgggctcatgtttgttgattgagtgaatgatttaattaacgcctgactctgctttttctccctcagagtttaccttccagcagccctacgaccaggcccacctgctggcagccatcccacctccggagatcctcaaccccaccgcctcgctgccaatgctcatctgggactctgtcctggcgccccaagcccagccaattgcctgggcctcccttcggctccaggagagtcccagggtggcagagctgacctccctgtcagatgaggacagtgggaaaggctcccagccccccagcccaccctcaccggctccttcgtccttctcctctacttcagtctcttccttggaggccgaggcctatgctgccttcccaggcttgggccaagtgcccaagcagctggcccagctctctgaggccaaggatctccaggctcgaaaggccttcaactgcaaatactgcaacaaggaatacctcagcctgggtgccctcaagatgcacatccgaagccacacgctgccctgcgtctgcggaacctgcgggaaggccttctctaggccctggctgctacaaggccatgtccggacccacactggtacgtgcccctccaggcgcccccaccgttgctctctctggcagcttttgtgaatctgggcttgctgttctcattcccaaagctgtggacactgaggccccgagtcttctaacttctagctcaagttccagggcctggctctctggaaacgtttggcagaaactttcttcatcagctaagcagatgggcaaagcagacaccttcccaatcccctgcagcctgtttctcagccaaatgggtcggagctggatatgggaaaggtgcaaccaacaccttgctgtgggggccaggtgtgaaggggcccacccggccacaccctctcccgggtccgccccctccctagccagacaggatgttgtcagaccccccgcctggctctgaatccttctttgagaactttctcaaaacttaggctgatgtttctcttctgtgagcctcattttctctatctttcagatgggcatgagaacagcttttggggtttctatacaggctaaatgcaggaatgcatatgggaagcacctggcaaagtgccggtacctgctaaactctcacaaaaatggttccttggcatttgctctgcttccttgctgtgtgactttgggcaagcaacttaacctctctgagccttaggggaaaactatgatagcatatgttttagagagtggctgtaaaggtggctaatcactttatagtaatttattatacccgaacggttctcaggtcggcttccccacccccactgaatcctagcacacagaccaggaaacggcatctttggggcagaaaacacaatcacgtcttttgaaaatttactaaatgtgtaaaaaactttctggacatggagaaaaggtagaactttttagaacttgaatggtggcagccactgtgcctggagctgctctttggagagtgacagttgagggagaagattccacagggttcaagctggccaggttctgccatttcctggcctggcgcctgacctctgagcggtgagggttagtgaggtgtctgggaggactggcaattcgcgggctttattggcatcttattcgactaaggctacccatttctcttccttcgtgcaccaattgctctgattttaacatgtaaaggtccaactgcctggcctcctgggtgcctgcccagctcacagggctctattttgggacagttgaacccctcagggtgctgcagtcctgcctgcctctctcacctcccatctggacattattttaatgtaaaggcatggctgagacacagaaatccccttgaaatgtatcattgcggtcctcattgactcccattgtgtgccttaatggtgggcccagtgggtgggggctgggaggggtggagcaggtgcatggggcagcggtgcccagcacctgttccagtcacagctgctggcccactgcatggcaggcccctttaatccggggatatcgcatgtacagtgcccccctcggcgccctttgtccccgccggcctggtgccgatttcacacttgccaggagtaccatgaaggcgtctggggggcgagggatccaaggagtgggggtctgtgcctcctgcgtgtgcacacagcccccgcccccagcccatcatgtcctagaatgtctccttccccttttgtttgggttcaggtctcatcacactttgggcacttactgtacaggagggtagtgctcaggacttcaccaacagccctgggaagggaagggaggtgctgtcctaactctggtcttacaaatggactccagccccttttccagatctccagagtcagcccttagttcacaagggtgaacttacccttctcattcacatgaagacttagaatgcaatcaacaaacccttcaggcgtggcgtgtggaggctgctgagtaatggcagagtggagtagtgctcaggcacccctcccccaatcctctatgtcccccaccctttggagtggcgagtttccatttctgccccatgagactgagtccagctctcaggcgctccataagtccctattgaatgcatgggtcccattggagccatcctctggactctctcctaccctggtagctcagtgtggcaccctaggcacccaggaggtgatggaatgaattcactctcagctcttaaattccatccagcgctgggatttcacaggcgggccctgaccttgcgggcatatcagactgggcgtgaggggattggagaattgcatgttttttaaaaagactattcagtattatggaatagtgtctagcacttagtaggagctcagtagattaaaaaaaaaattatagacagggtcttgctttatcgcctaggcttgtctcaaactcctggcttcaagcaatcctgcctcactcggcctcccagagtgatgggattacaagcgtgagccaccacacccagcctcaatagatttttgtttaatgggttactgttatgaccttttatttggaaaatgctgcatcccccagaaaaaaacaaatcaacattattggtgtttttggaactatatagctttttggttggagcagggattgttatgaggcatgagtgagggggcagactcctctgaggcctctttaatttttaaaacagacttatttattctctaagggcttgttgaggatttactgggcacccagctccatgtgcaagacttttcccaacacagccttggccaggcagatggtgtgtcagggccacaggtttccgtagcctcttgggtgatagaaaggggcccaggccctgggctggggctcagaagggactcaaaggaggcccttgcccttatgggactcagcctgattggagaacagacaaggagatttgggattacagcgcaggaggtggggtggtgaggaaagcaggctgctggccgggccccaggagtggcctaaccagcttggaggtgggggtggggaagcctcttaaggctgactctggctttggcccccaacagagtaaatcaaggaatgactccaggactgatggtaaggacaccagtcacgtcctcccttgactgaaggcagtaagggcagtaggtgaaatcagaggctttggggtcctgccaggggaacctgaacatgctacttctgggcctcagtttcactgtctctgaaatgagaccacagtaggatcaagtgacagtaggatgaatcagtaaaggtgttgagtcattgttgaccacttcgcacgtccctgcgggatgtggatgagtaccctaccttctgtcacttatcaacccctatgagtggggggtgaatagccccattttacaggtgggaaaatggaggctcagagaagccagacaacttgctcagagttgcacagtgggaagcagcagagctccgtcaggtcccggcctttggaccctggctgtgtgtttgacggaggcctggctttcctgggatcatgggattctttcagggtttggggtatgcggggagggattcccatcactgccagccgttgtcccacggctcactcggcctttctggcgttctctccccaggcgagaagcccttctcctgtccccactgcagccgtgccttcgctgaccgctccaacctgcgggcccacctccagacccactcagatgtcaagaagtaccagtgccaggcgtgtgctcggaccttctcccgaatgtccctgctccacaagcaccaagagtccggctgctcaggatgtccccgctgaccctcgaggctccctcttcctctccatacctgcccctgcctgacagccttccccagctccagcaggaaggaccccacatccttctcactgccatggaattccctcctgagtgccccacttctggccacatcagccccacaggactttgatgaagaccattttctggttctgtgtcctctgcctgggctctggaagaggccttcccatggccatttctgtggagggagggcagctggcccccagccctgggggattcctgagctggcctgtctgcgtgggtttttgtatccagagctgtttggatacagctgctttgagctacaggacaaaggctgacagactcactgggaagctcccaccccactcaggggaccccactcccctcacacacacccccccacaaggaaccctcaggccaccctccacgaggtgtgactaactatgcaataatccacccccaggtgcagccccagggcctgcggaggcggtggcagactagagtctgagatgccccgagcccaggcagctatttcagcctcctgtttggtggggtggcacctgtttcccgggcaatttaacaatgtctgaaaagggactgtgagtaatggctgtcacttgtcgggggcccaagtggggtgctctggtctgaccgatgtgtctcccagaactattctgggggcccgacaggtgggcctgggaggaagatgtttacatttttaaaggtacactggtatttatatttcaaacattttgtatcaaggaaacgttttgtatagttatatgtacagtttattgatattcaataaagcagttaatttatatattaaaaa

SEQ ID NO: 11710 - DNA, 187 bp, Homo sapiens
tagaggagtgggtattttgaaaggtctttggtaagggaggaggggacaggaattcctgaagcttagatatttctgacacagccttaaatcttgtccttggaaacatcatagggctttggagtcctgggtgtcactgtcagggaccttatgagactgggttttcccgttggcctgggtgtcctgtctg

SEQ ID NO: 11711 - DNA, 15230 bp, Homo sapiens
gcaatttgaaggaatttcttttttcataaatttatttactaagaaataacactgaaatttcttctatgggcctggttagcaattttgtaatatttcttgtgtttgtgagtgactttctctttaaaaacaaagtcttatctgagtgttttgatttcccagtaactacaaagtttttgtaagacagttttgagttattttccctcaaatgcaatattgtgttgcatatattttaacaagtataaagatgtggataaaattgataccttttagaaaataaaggaaaacattgtcttttctttgtgattctgtttaacttctcagcattaagtgaaagataaaaatttgagtgatccttttcaatattttccacagggaagagacttccaccttaggatagtgttgcctgaagatttacaactgaagaatgcaaggtgatatggtgtttagttataaacgtgcatttttgcattttggtgggacaggcagtacatttggtataaattgattctagtgactagagttttgcctaaaatgcttattagtcatttgccccaaaagaaacatttctgatttttccaaaccaatgcagcatttgtaaatatttacctgttactaaagtgcttttaaacattagttctctcatttttaaaaaaatatttaaagcagtaaacagccattgtgtacacttcactaacaaatactgaacaggtatataaagggagaacaaaaggattagaaaactttttttccaacttttgactgatattattaatgtgtatattcattatatgagaagagtcacatcagttcagtcctggcttaaattaggtaccaacattgagtgctggtagatacaactagtcaggatatgagactgaaaatttaggtaccaccccaaatctcaattctgcctctaaatatttctggagaagaatggaggaaaaggaatccagagatatttatgagtagaattgagaggattttgtgaccaacagaagtgtagttaagagggaaaaaggaatagaggatgcttttcaaattcccggctcagatctctaagctagagaagaggtcacagatggaaaagtagaagagagattgttttaaggcatatttggtgtgaaataccaagaggagctatttagtaggtagtaatgtagtggtgtggaaatagagtgtgagacctggagtgcagatgtgtgtggaagttacaacagatgaaggatttgagaccttgattatgaatagactttttggtgctgtgtctagcggggtagaagagaaagccagtgacaagaccttggggcgtaccaacatttaaaggactggtcactaaagaggaacttacaaggagactaaggattgaccagagaagaggaaaacttgggcagcagagtctttcaagccaaataaagagaggcttaagcaaggcatggttagcaatgctgaggattacaaagagataggttagatgcaagtaagttttgtgtggtggcagaagccatttgtgttggatgagtgggaggaaagtataaagtattttgaagaaaaagaggtggttagagaatggtatgcattcaagaaggagttatgatgttctttaaagatatatatttgagcaagttaattcattaaggagaaaaaaactagcagaacataaattaaggataccacaataaagggataattaattgaagtcaccaagttggtagcaggggagagaaagcacattttgagcaggggttaccaatggacatttgaatgaactactctgccactaagagaggagatagggatggttatggggatttgaagaccaagaatggagagagttgtgacagtttgaaaaggccatgttggggaaaactcagagaggcttcctacttgtaggtaactaaaagtaattccttagaagagttacttaatagtatcgggagcacaacagaggtcagccagtaagtggatgaacattaacttatcacttcttatacaattaattagaagtatgtatctttctagccaggcttggtggtgggtgtctgtagtcccagctacttgagaggctgaggcgggagggtttcttgagcctaggagttcaggttgcagtcagctattctactgcactccagccagcctgagtgacagagcgagatcctgtctctaaaaaataaaaaataaaaataaaatgtatccttttagttatattaatcgggaatttgaagataatattgctacacatgctttttcaaatacatgtttgatacattatatttgatgatatattgttatcaaaactgttggttttatttaacctatcttggaaaagaatctacttcagtggaaaactttgcttcggatgtgttaaagttaaaaaacaagatgtactgtttgcatgtcatttactgattgcagttatttatattttgaaataaaattagtaccaacagtttgaagacaagactttgaacagtatcagtggtaaaaattttattaacttgtccaaattatgtttgtcattcttttgtatgtacatgcatgtttgtgttagcatacaaataagtttttaattctgaacaatgaataaaccattttgtctcattaaaattttagattattatgtagttggcagctgagaacaatacttagtggataccatcgaatagtacaacaggtaagtcctttttaaaaggtttatgttttcagtgaagataagaaattactaaatttattgttctttaaagacctgctttgcacaatgttgtaacaaactggtttaatagttgttaagttttgtaggtttcatctctgtgtgtttttaaatctcagtgtcctcaggagatctccaggcagcctttgtgttgaaatcgatttccatctttgagactttaggttcttcaaatgcattcacccttatccatatccatcacttcttcagtgatttttcttctgagactgaatggtggtgatagggaaaaaaaatcagacccatttagagctgtgggatatctgtggcaaaaatgggattttagtcctagattagcaacagaaaagatgtggcagaaataatttaggatcatgtgtacttgcataatgaggggagataaattaaaggctgcttagtgtgttaataggcaggattaatttctttattcttaatgtttaggttcctctacctgaaaattcctttaaagattagaaaaaaaaatcagttactgaagcaaaataatgacataatataattcttcttttagaaaaatagtttttagaattgcctttctttttatgctttatgcatttgtgtgtttttttcctgattttctatatttctgtgtcttaaaggcaggttattatctatgataactgacaatcacagtaactctcccataaagcattaaagctgcaaagaagtataggagataaactatttgatttatagaatgaaggttatcatcctggcaatataattacagaagtttttttaaggatatgttcaaattatttctgttttctttccatccctgtctccatccctttgactatttatattgtacactaaaatttaagaaatgcatctgttgacatattgaaatagcatgggaaaaaatggtttatgtagtctaatattaagatctattactctgtttttcaccagcaagttatcaagaggattcctagaaaaaaatcccaattatttatctttccttgccccccaattggttaggtagaacccagtgttaaagtcttctttttattttacagtcccagtgaatattactattcttttcttgtatcatttttaattttagtaaatatgggccagggagtcaacagactttttctgtaaagaaccagataataagtttttctggcttagtaagccataagatctctgttgcagctactcaattctgccgttatagcaaccatagacaagaggtaagtgaatgtgtatggctacatgccaataaaactttgtttacaaaaacagtattgagctggatttggcctctggactttagtttccagaccctgtcatttattgatcatctgtaataaactaaggggaaaatgcaatgtagaagaagggatagtcaaggatttgctctacacagacccactcaaagctatgttaagatgtgaatcatatgtgttcatgcattgttgaaaacaatgtaaaacttgagaatatttttttctgtagttattttaagaatgaaggatttctaggaaatggaatagtaactcttaaatatttattgtactttagagattatttccttttttgccattttattataacaggttttactttaatgaatgactgtctccattttgactaatatggattagttgtgagaggacaaaaatcacaattataggtagtttttaaggtcaagggaaaaataaaaaaaatgaccatattgttaattaataattgttaatttattgctgccactagattttaaaaattacatagagttgcctgatttttatattttatactcctcttcccactcacatcactcctatacctcttctttctctttttttttctcttcctcctcctcctcctcttctttctcttcttctttaaaaaaagtaatgatgaggttgttagatttgctagacatagtagtgatacagaagggcggcagggaagtgctgagtagagaaagatgggtccctggtgagggctccacccccgggcctgtgcccactgacctaggtgaggacaggcatttcccaagaccaccctggcctgccatacctccatcttgtgcctataaaaacccgagaccctagcaggcacacacacacacaagtggctggacgttgagagaaatatatcggtggaggaacacacaagtggctggacatcgagaggacatcgagagcatgtcaagagcacaccgatagacttcagcatgccggcaggccattgaccggcagaatgacgtggagttcgaccagggtggttggaggagagcctgggctgctgagcaacccgacgccaggggaaaaccgtctcccttctgtctcccacatctactgagagctacttgcacttaataaaaccttgcactcattctccaagcccacatgtgatccaatttttccagtacaccaaggcaggaaccacgggatacagaaagttctttgtccttgcaataaggcaggggtctaattgagctgactaacacaagctgcctatggatggctaaactaaaaaagcaccttgtaacacacacccactgggctttcagtagctgtaaacattcacccctagacactgctgtggggttggagctccacagcctgcccgtctgtatgctcccctagaggtttatgcagcggggcactgaagaagcaagccacactcccatcgcatgccctgcaagggggacaagggattcagtagtaaacagtgctcaagaaacagagtagtgtgaggttttaagtgacattctaacacagtttaatatatctcagcaaattagatttgaggacattaattactgtttcaaaatgaaattggtaggagtagtaaagttgatgaccgatacttcatttcttatagttttcagatgtagatatagctaatctttttttcacattcacttgggcctacatttttttacagttttagtggatagaatatttattgtgcaaatgaaattaattggaaatattttgatctagagaatgcagcactctcctgatctaatgagctttatgatggagttgaagatgcttttggtaagaattttttttttttctgacactgttaccatactgcaagtcttgatttcttttttgtaactcctttaaaaactgacattattagaatttgtcttcttaactctcagtcatttgatgttttcttttactgtgtacataaatatagatgacgcatttcttgaactgcatgagggacataactgttcgaaggaacctctttgattgtattataaactaggtattcttgacactagtgttgggcaggtggtgaagaaataaaatgtactcctggcctatcagcagagagtttaacatctaagaagagattaggtagtcctacttaaagatataatatgatgtataaataattttgtgtatagctacagatatctgaaaaacttattaggcttcattttatgtatactgttacatatgtactgtttaatcagtgttgcataaaatacttgattattcagtttatcctgtagacattttattattttcttaaaacccaagttcattttattacccaagttttcaacataaacaaaagaagagggaagattatagtgaatactgctgggcctgaccaaattttaacattttgccaatcttatttcctcttctacttttttagaagaaagacaccatagtattttaaaggaaattctggatattgtatgtatccctctgtaaatatgtcagtgtgtatctctttaacagctaagtgctttttatctgtttttaaatatattattataacctcaataaagttaataatttcttatagctgctttgtttgtattagtatgcaaacaaggtcctcacattatatttagttgataagtctcttaagccttatataagacttataaggtacttatgtataacatcatctctctcctctttacctcaccctttttattcatgccatgtatttgttgaataaaacaaattaggtgtcctataaaatcttctacattctggatttggcttgtaagatattcatggtttatcttttaacatattctactttctttgtaatctggcagttagatctagaggcttcagcagatttggattcatttgttcttatgagattacttggtgctctgtatttattatattacatgaggatccacgtggtatctgatggttccttggttcctgttttagtaaatttaagattgatcaataggtttagatccattcaatataaagtttcccatcagactgtcacctaatgattttagcctctaataacaatcattgcctgtatctaatgtttcattaggatttacaaatggtaattttaaaaattccatcatctgcatttattagttgaaaatcttctgtagagaacttctcatcagttgtttggttaatttgaggtacagcttatactggagagactggataagtgcttgtttcttttccttttaaaacagaaaccaatttttagaataatgagttggtgcctagcaactgtcacagggatctaaagtgtttttttttttaaagtatctttatgaactcatagatttttatatatttaattaatttttttattgtagtcattttctttttgatgcttaaattgtcccatttttttggtcagcacaagtcccttcatattggctctttatttaatataacccaagcttgtttgccttctgataccagttgccccaggttcatttattcattttattccgtaactgtaatcagccatttctccaaagaatcatgatttctttgtgggaaatagtatttggatgcctcaatctggaaacttgagtgtgcattgctgttacttgtaggttttttcagtggacaaaactgagaaaaaatactttttggaaagaatataattatgagtttgtattgatatttacaattcaaattggcattatagaatttttacttgtttgcttgtatcacttttactctgaaaatgctgttttctaatgttaacatcattgtagtatggttttttgttatgttctacttgttatatttcacttatgcttttcctgtctatgtgttgttagtttatataaaaattacaatactaatattgctaacaatggaaagttttgatatttctttgtgatccttgttgagaccattttattcctagcagcagctactacatattgataacttagttgctaggttgttttctggagtccttttttaatgctaataagaaccttctaaggtaggactttgattaaatgtgtgagattagaataatagtttaaaattaatttctaaagtttgaattttgatttatgagttcataaatcctaattaataagggttatcaaacttgattacaaattacatcaaaggccttaatgtaataaccttaaaaaggtaaagtgaacaagtgaagcatatttggtttacatctccttgacattggagaaaagtttgcaacatttattttatctttttattataattttaataaacaatacaaatacaaggagagactaagggaaccagagtaaaagtatagatatcatgtcccattaaactcttcttatcaaaaataacttcattaaattgtaagtcacagctctcttggccatgtaattttggagaaacacttattagtttaaaactaaaataaaattttgagatctctgatttacaatatctatttagtatatttattcaatttctgaataaaaatgaaatcctgtattttagctttcttcagaaattacggacaaatttggtgattttattgctcatttaagatagtatacctaaagatataagaattattagtgttaggctgtattgtaagtaatagggttcctatactataatcaccaataaatatgttgagagtgatgctcacatgaaatcagtagttattgaacttattcagaaaatgttgtaaatcttccatggagtttcctagtaattactgcatatagtgggagttcagtatatatttaacaagtgaacaattacctatatttaaaataatcctaagtggtaggttattttatttctattttagagctgagccactgaagcctaaggcctcaaaataggaattgttaaagtcagtatttaaaacttctgtttgtgaagcctttccgctatgtacctttgcctcttttctgtgaagaatatgttgcttctctgcttttgcctttttagctgttacggttctacagtaggagtaacttacctgactcagaatagaaggtagagtgtataaatgtcataaacctaagattgaaaagtgtttttactattatccaggtttatttttaccttcaatttttgtgaatagcaataattaatatttcagaataaaaacaaatcttgaaagaagtactatactatattaatgcattttatttaataactagtagagcacaatcttcatagtattaggttggtgcacaacctaaatacgaatttattttggtggaccatcagtctatttttaggcaacattagtcatttatattataaaaaaggcagcatatactttgtcttctaggagcttaccctctaattaaatccatattgatattctcagctgtacggatctgttttcccagttgttttttttttttcatcataaagcagattcagaacgaaattgaagtagttcccgttaatagttttggttttgaagtgctgttttgtaatatctgttctttctaatatgatctcaatttgatagtgtcctatcctggttaaaaaaaattgatatatacttaaaaaataagattaaacatatacttaaaagaataaaaattacaaccttttattaggattatatttttcagaagtgtttataattttcaacttgtccctatctactttcgttatttattgtagctgatttatttaattaattaattatttactttttgtaataccgtttgatacttcagaccatatgaacatctaagtaatttgtagatagatttatttttactttccaaataagctgtctatctaggttggtaacttcaaaataattggtaattttagcttcagcaattctagtgatgtttatgtgtcttgtaaaaaattttagttttggttgggagaacataaacattttaaagccttcatagataggcctagcaaggaacgggactgtaatctagccagatggatggcataatactccgacttacctgcttgaagaatagtacagagtataagtcagtgaaaaaaattagcatgtggatatttgttctgataatgagtttgtttgttaggatgtggttcataatggtatacaaatatgtcagtttaggtaatgtacttagagttcaggcctttctttagaggtactttttaaaaaatgtatatatcaaacatcatattcatgggaatagagccatagtgaagccttgaggatgaatttaataaaaattttttttttatctccgataggcataatagtccaggagaatattaaaatctcaagttattttcatggcataaaaattgacattttgcatgaccttcagtgcagtcctttaactttttcttgtctctttttcatgagcaggggaatgagtcagccagatttccgtaaaaaaacaggcacttttattaggcactaagaagataatgaaattatgttttgcaatcaggtattaacagttcattgtcttgcgttccacagctaattcaggttttcttcttttaaacaggaagttgccttaaagaatagacaagagctgtatgcactacctcctcctccccagttctactcaagccttattgaagagataggaactcttggttgggataagtatgtctgttttaaaatatgttttaaatgcctttgttttatatattttaacttaatgtatttctagttttagcagtttatacctgattttagtcaaagtgtttaattgtaactagagtatttgatccttattgttgctgtgaattaaagagagggatatcatcataaaaaattgccttacaaagtaaaatgctaaatataatttggaaaaaatgacatttttatgtacacagtaagatgttaccgtaatagatactttcactgaacatacaactgtattctaaattttccatgtttgaagagtaatgctgagacacatgaaagagactggaaaaattgcagtatttctggaataattgttatttttggttaatatacaatttggcatgtctaaatttacatatatataacattataagtgcttttgtaatttgagtggtaaattttagcaactagggtttgtaagaatcatccagctttctttgaaaaaaatgattttttttttaaaactgatgcataaagaaacttaagttcagtaaacgtgtatgcaagttgttaaaacttaatccacataccacctggaaaaagtatgtgatgatttgtttgctattcagtttctgaatttagcttccttcttagtgtggatactttgaaacattacatttattattaagtgtattataacctttctactttgagctaaagcaccagtaaaaatatgccaatttttagttcttatcacttttttttttttgagaccgagtctcgctctgttgcctaggctgattgcaagctccgcctcccgggttcacgccattcccctgcctcagcctcccgagtagctgggactacaggcgcctgccaccacgaccggctaattttttgtatttttagtagagacggggtttcaccgtgttagccaggatcggtctcgatctcctgacctcgtgatccgcccgcctcagcctcccaaagtgctgggattacaggcgtgagccaccacgcccggcaattcttatcacttcttaaccgttatcaatagtattttagtattcatttattatttccatttagattgccctattactaagataaatcgagggctaacttaggtacaatgtggaaggaatgtgcaatttttcaccactaagtttttcttaatatgttttaaacatcttattattcatctgttttttagctattttctatgagttggccttttgataactaacctaaaaagaaccagaaaatcaaatcgccatttaaaagagaacaaggaacatatcttaagtgcagaatatatgtcctttaatatattttataccattacctgataactaaagaaaaactaaatagagacttaaacatattttagagttccaaattgttcccatgtaaatttgtttctagaggtgataaaaatgcactgtgattattacagaaataagaattattttcgttgcctttgccttctacttccctttatattccttaaaaggcttttatttagaacagtttctcttcttatgtgtagatcaattttttcccttttgttttaaccactaaaatttgactgagtgggccatacctcttttggtgcacctatgtgcagagataggttagccattccttcagtcatgactttatgtagacttaattttttatgaatacttctttaccttaccgttttccttaccgcctccctgattaagagtcaaagtgtgtacgatctgtacttaagagccaagttatttaaatcctggtcttgataaaaattacagcctcggatttcaactgttaaaaccttactaaaatcgcgattgcatgtaatagtgtttcactgcagatggactgcttaaagtctctgtaatcttattttatatgttttctcagttttacccatggatattagaaccgagctactttattttgctctcttgtataattgctcttgaggatgccactgacttggattaaaggatgttgtatgaaatagtcctaagatatgcagtagggattttatgtttggatgtcttccattgtatgataatagcactatctttatgagaagccatgaaagaagttttattctgtttcagatgctagaaaagtcatgctttgcctgactatccaacctgccacttaatgaataatgtgaactatgtaattgactatgttctctttgacttggcctctaggaaatttagagtcaaatttttggcacactttttagagccatgctggatataggatttatatttctgtatgctaatcttacctgacttttgttctcctgtgattcttctcttcatatcaagggtacatgttatctctgtgactcatcactgttgatcttgatcttgattacctggtgaggtagtatttgtcgggtttctgcaccgtaaagttactgtttttttctctctctccacactttactctttggaagtcactatatgtagctcacacttcaggagtgggcagttacgctcacacctcctttagggcacagtatttacacagatttggaatttttctgctcagattttgttccctctcatttatttgttttttcagtcatttatttgaaatactatggactcatggatatttattttatactttgggttataatcaaatactattttattttcttgctcaatttgttctagctttggccattgagagctctttcagttggctcctgtgtccttttgacaggcctcatcattgtggatatatatatatatatatatatatatatatatattttttttttttttttttttttttttttttttagcatgtatttactttctggcactgaaagaaattttgtatatttcctgccctttcctagaatcagccatttttccaaggagtcctggttgcttttatttgtgagtggtattagaaactaggatgtgggcactatgggtgcttgttgctattggtgtgttgttgtttctaggccttcttagctgaaaaatggaaaacaaatgtgtttatactaactcgtgtacatacttgtaaatgtttttgtatataaccatttatatctgtattaaggtaaacatgattttatactgatgtctacaactccagtccattaccatatgtagttttgtagcccacttgcttggtatatctgaaatctcatactccaacagggagaaaccgagctcccattatctgttatccatttacttaattgttcagttgcagtatacgtgcagagcactatcagaattattaatctgtacctccatgggtgacaactttatcaactatacaatgcttatttttatagtttttttttttttgcctttataggcttcactcattttcagttacttaggttagaaccatttcctccacccacttcaatgtacttctttcccatatttgtaacacagattgttttgtcacattctctgtttcatcctacgttcattttaaaaaatgattttaggatctatagtgatgctgcctttttctttccacatgagttttttgtgcctttttaatttttcttaatcagttttgcaagagccatatcaattatttaagttttttcaaagacccaacttttagcgttgttaattttctctgttgtatatttttttatcattaatatctgcttattaagaatttaatttttttagatttgcttcctttgtaatttgttgagatggatatgtaggtcattgatttttttccagtttatcttactttattatatattaatttaaggctgtaaatttgtaagcaattttagcttgatcccgtaagttttgatgttatatttctattactatcagttaaaaatattaattttcattgtgatttcttttgacttatttagtatatctcttaattttcaaacaactggagatttttgggttattgagttccagtttaagtctacttttgtcagaaatcatccttttaattatctcaatactttgaagtttactgaggcttgctttatgacccagcaccttgtcaattttggtatgtgttctatttccacttaagaagagtatgtaatctcttgttgggtacagtgctttgcttttattcattcctcacatttattaattatgtgtgtcagatatccaatatgtttaatgatttattttttttttttgtccgcttgtcctgagagctctggagagagctgtgttaaattctcccaatatgattgtgaatttttggaattgtttttgttcctcaaaattttgctttatgtctatttgcagtcatgttattgggtacatacagatttataattgctatatcttccttgttggttttcccttttgttattaggacatgtttcttttcatctctagaaatattcttgtcttaatgtctactttgttataactacacaagctaattagttacatattttaaaaactgctctttaccatttgcatttttttaaaacagattttaatgctgtattgaaattcttcctctttttctctattttctttcatagttttaaaatatttttcttgctggcagccaccagaaactggaagaggcaaggaatagattctctcctagagcctccagagggagcacatctttgctgacaccttgatttttgcccagtgaacagatgtggaacccctggcctccagaactatgagagaataaattcctcttgttttagcca

SEQ ID NO: 11712 - DNA, 499 bp, Homo sapiens
ttttatcagcctactttagttgttcactgtagaagtgttggtctttagcaagctattccatttaggccagaaatagatgttacatataattgtaagtgtactatattatgatattgaggactggttgatatttattcatgagattaggctttatttattaagacattagtcttgagtaggatttgggatggttggagccttttaaataaaattaagcataacaatggtgaggagagacagggaagacaagcaaaaagttgagatgccctagcagcagttcctgctgaggttatgattagttttgaggcattgatgtcatggacctagtcattctttaggtatagattgatggaataaagaaatattattttgacttatcttcagatgcttaatgttaatatttgttttttagagcatagttggaaatgtagaaagggtttgtcaaggacagaggaaatgttctagttttatttctgttgtattgagatggtgagtttga

SEQ ID NO: 11713 - DNA, 2600 bp, Homo sapiens
ctttctatttcatggagcatgtggcagctgagtgttcgacttggaattacttctggcaacaagtcctggatcctgcctggcaccttctgtttgatgggtgcaacctgaccagagagagctggaaggccctggagcgggccagcttctctaagctgaagctgcagcacatccaggccccactgtcctgggagttggtgcgccctcatatctatggatatgctgtgaaatagtgtgagctggcagttaagagctgaatggctcaaagaatttaaagcttcagttttacatttaaaatgctaagtgggagaagagaaaccttttttttggggggcggtttttttggtttgttgttggttttttttttttttttggcgggaagaaagagttttgctcttgttgcccaggctggagtgcaatgacgtgatctccgctcactgcaacctccacctcgcgggtttaagcgattcttctgcctcagcctccctagtagctgggattacaggtgcccaccaccatgcccagctaatttgtatttttagttgagacagggtttcactacgttggccaggctggtcttgaactcctgatctcaggcaatccacccacctcagcctcccaaagtgctgggatgacaggcgtgagcaaccgcacccagcttaaggtttttttgttttgttttgagacggagttttcgctcttgttgcccaggctggagtgcaatgctgtgatctcagcttaccacaacctccacctcccgggttcaagtgattcacctgcctcagcctcctgagtagctggtattacaggcatgcgtcaccacgccggctaattttgtacttttagtagagatggtgtttccccacgttggtcagtctggtctcaaattcctgacctcaggtgatctgcctgcctcggcctcccaaagtgctgtgattacagacgtcagccaccatgcctggcctgaaaccttttttaggtaaagttgaattccatccttaaaagtttctgttatatcctatttagccattttctattgtctcccaaagaattcacatcaaaaaaacagctttgaactcccccttcaaaggaaacagtcgactttcataattagcatctaccattatccccaaatcttattttattcattgacttgaaattttttccaattgcttttttttttttttttttaaggttaagagcagaggtttactaggccaaagaaagagaatagctctctgttgcagagaggggtcctggagaaatgggttaccccagttgtcttatttaaatggttacccatcagattttaattttatcttctctttgagagcttggtaataagaagcacttaaatcactccaaagaagactttaaaaagggagcagtgaaaaggtcttaataatttattgattgaattaagaaatactagctaattaagaatctgagtctaaacagcacagattttttctttctgcttttaaattgtgttttaaaaaaagagacagggggctgggcgtggtggctcacgcctgtaatcctagcactttgggaggccgaggcgggtggatcacgaggtaggagttaaagaccagcctggccaacatggcaaaaccctactaaagatacaaaaaaaaaaaaaaattagccaggcgtggtggtgggtgcctgtaatcccaggtacttggaaggctgaggcaggagaatctcttgaacccagaaggcgaaggttgcagtgaaccgagatcatgccattgtactctagcctgggtgacaagagcaagactccgtctcaaaaaaaaaaaaaaaaaaaaaaagaagtagagacagggagacagggtctcactgtgttgcctaggccggtcttgaactcctgggctcaagtgattctcccaccttgacctcctaaattgttgggattacaggtgtgagacagtgcacctggccgaaatagctcaagtttctgaaaaacaaatctgaatctatttgttattcttagcgtcactggtctggctttcagaattaacatacaaggttgccacacctagttctgcccagctttatgtcttttattccagtattccaccaaagtttgttttcctgcattccagttctcaagtcttaagataaagattgtacttgacagtttagtatatccataaaactatttgaggtggttaaggttcttgggttcattttccttaatactttgctgaatattgtagattgtaggcaatgaaaaagtctactaaattaggaaaaccttgaataattaggtatcctaggtaagagcccctaaacatcaagcaatctgtgagtctgtaaagaaataaatattttttggattattcttatctaattccacccctgttggaagatgatttctttgttctttgcaactatggaagctgtgaaaatcatcacaagtgcctctgaaagcgagtgttaggttggttagagggtttaatattttctgcaatggtttgtaggaattttaataaatgtagtatattttctgagatgattttgtaaaagtactattttaaatatcaaatcaaccaataaattcacatttgtgttaggaacagaaatatggtttatat

SEQ ID NO: 11714 - DNA, 518 bp, Homo sapiens
actatctcttgaacgtgaaaagttattgatgcagtgaggtcgaatgcacacctactgcttcctaagctctggaacatgaatctccttcctctgtcatctccccagaattggaacctccttaatccaaccatctcactattggtcagtctagtgattgagaaataggaaaagccacaggttgaaatgatgaaatgtcattacactgaaagataataccaaagtacaaagtcctaggcacagtcttgtcaattccctcttgtctaagtggtgtggcaaatattattgtcacttttcagagaaaactgaggtgtagagaaataaataaatgaagttttttacagtcattccacaagttactgagcaagtcttagaagccctgactccccaaaccacaaaatctcctttgataatcattgctgccataacaccttcttttactgctttcctccttgaatccagagaacacatatttataatcattttaagagcctgaggaaatgacttcagcctgtgcaaaa

SEQ ID NO: 11715 - DNA, 628 bp, Homo sapiens
ccttcgcaactgaaaagctgatggagctggattccctgtttgtaaaggcatgaattcctggtggctccaccccattcccccagcgtgcatgtggggccttagtgggctgcaggcatgtttaggcaagcccctgtgcaagttcccttatctgcacaaaacatctcatgtaaccatttgtgggactggtcagaagttcttccgggacccttccctactgtctgcctaaagcaagctggctaactcctttcattggttcatttcacttatatacactccccagcaatctcatatacctccacagttctcaaataccacatatatacagatgtttccaaatctaaacatctatcccaggtctctcttctgaccccaaaccttcatatccagccgtctactcaacagtctcctggattgctcagaggcacctcttaacatatgtaaaccagagggcaacactgacctccccaaacctgcctctcctcctttatgctgccctatcctatgaagattttttttaaaatcagggccgggcacggtagctcacgcctgtaatcccagcactttgggaggcctagacaggaggatcacttgagctcaggagttcgagaccagcctgggcaatgcggcg

SEQ ID NO: 11716 - DNA, 2204 bp, Homo sapiens
atcaggcctccaagaaccatgtccccttcagagaggattcctaagcttcctcctcttcctcctcttcttactgcaagggaaatacaagatcagtctggaatgggcttccagattcatacaacctcccccaggacacagattctgggagagagaagaggaaggcaggtttggagcctccaccaccaccagtttccctcacgccctcctctctcccttcccctctttctcaacttcctcctttccctctcttccttctatgatctgtccctgcccctctgtctcctcttcctttccttccttcctcccttttctcctcccttccttagcaggcagcaatgagcaggtggcactgaacttagattccaccatcacaggtgggtagatcttggctcacaagcctgtcattgactagctaagtagccctgattggaggagtcattttatttccctgagcctttgtttctcatctgcaacatggagattttactcaccaccgtggtgcagacaaagtaggacaaagtatcctttaacccagggcttgacacgtgacactcatcaaacattgctgagctctaatctgcatcaggatatggtaagtgtctactgggtgctgggacaaaaggtacagatgggagcaaggcagagatccctaaacagacctctgttgtgatctttgttgtaatacatggtaattatttgtttccaaaaagaggtggaaggagacatagatagcttctaccgccaggcattcaggcaccagctgtgaaggccttctgcacattgaaaaactcagagtagcctggtggctggaatgaaaagtcaacaccagttcccccagcaaaatatttctccattcagccttttcggctcattggtttgcctgaaatcagttgtttctccctggggaagcaatctttaaaatggtgaggagagtgtgcatctgatgtgcctgcacttgtgcctgtgaaacagggtaggctcagagctccgtgcaggcccatgaagtcccctcagagacaccagtgttgggttgtcatagggtcccagaaaatgcctgtctgcttcgtgagatttaggctgggtgcacagaggtttcacttggtgtgcctgacttatttaggggctgcctgaagtgccatgtgagaaaggaggctgagggcgttgggtttggaggaagagagcactagggtggattagcagtatctgctgcaagtggaatttggaggggatagaaatcgtgcgttcagcttatttggcatctctgggttggcctcactttggcagttggttcctgctggctgggctctgctcacacgcagtgagaggtctctcagaggctctttgttctgctgctggggatgccttgggaatgatgccctggggtgcactgccacatcccacacaaaaggtctccttagctggagagccttaccaggtgcatggaggggaagacgcggtaccataaagatgaggattcctctcaaagtaatatatgcattgaatgaaatgcctacttcagtaaggaatttcccaaagctttacaagctaattctaaaattcacatggaagagaggccagagaatagcttaaattactttgaacaaggaggggagacttagctgccagctattaaaatccattattaaggcactgatgttaaagaatcaccacacaaatagacaaacagacattggagcagaagacagggaacagaaagacgctcatatgtatctggataacattgacaggaaaatcaaattgtaatgtcacatacaggagtcttcatgaaggtaagatgtttaaaaacatttttaaaagtataaaacattgtttagaaatatacgcctttgtagtaaatgtgtaaaaacacgcattagaatgatgaacaccaaattccagagaaagggaatggatccctgtggggcacagagtgtgcattaactatgtttatgtctttaaaggaagaaaatatttgaagcagatatggcaaacggagaagattcatgaaagctggatggccggcgcatgagcgtttgcggtgtcatactttgtttccttatgtttgaaatattagcatggctgggcatggtggctcacgcctgtgatcctagcattttgggaggctgaagctgggggaacacttgaggtcaggagttcaagactagcctgggcaacatagtgagacctcatctccaaaaaaaaaa

SEQ ID NO: 11717 - DNA, 2204 bp, Homo sapiens; identical to SEQ ID NO: 11716

SEQ ID NO: 11718 - DNA, 2146 bp, Homo sapiens
gctcaaacggggatgtgcttgcaaaggctagagacagcacgggaggaaggagcagtccattctgctgagagtgtgagtaccgagaaagcatggcactgggcttgaaggatgaggagttcgccagacacagaggatgaggagagcagcacgtgagtaaagaaaacagagaaaggaactctctgtcatgttgtgggctggagggcagcattcacactggacaagtgcttcagaaagatccttctggcaggtagtgggcagaaaaatgagtgaagtcagagcgatcgactaggaatccactgaaagtggatttaaatgagaggtgatgaaaaactcagctacagctgggcgaggtggctcacacctgtgatcccagcattttgggaggccgaggtgggcggatcacaaggtcaggagtttaggaccagcctggccaacatggtgaaaccctgtctctactaaaacaaacaaacaaacaaaactctctctatatatatgtataatatattaatatattatagatctataatatattaatagaatgtattatagatatatattaatataatgtattatatatataaatataatatattatatataatattattttatatatatatatacacacacaaaaattagccaggtgtgatggcaggcacctgcagtcccagctactcgggagggtgaggcaggagaatcgcttaaactcaggagacagaggttgcagtgagctgaggtcacaccactgcactccagcctgggcgaaagagcaaaactctgtctcaaaaaaataaatgaataagaaaaaaagaaaagaaaaagaaaaactcagctacaacagagtgactggttataatttccctgcaaaactgctaattctctgatggagggacaagcgctgaatcaggttttgtttatctctgcagagtacctacattgttccctcttatgataggagctcaaacacatgttgatgaaagggagggaggaaggaagcaggcaggcccgcaggcccatgcccttcttttacagataaggagacagagctgggacgggtggaggagtgttcaaggacattcttggctagaaacttactatctaaaatagtaaagagacctctaaccattctgctgacaaacttataagcacaataagctttgaataacaaacactccgcaggtaaagttccatgacaacgattcttgttataaagttgtggtcttcatagagaagtgctttcctctctcaggcaggaaaagagttcctttaaaatagatcgaaatgctctgtgatgaataatacgaagcagtaaggccttcacctggcctgggtccaaataacaggttctattcaggtggctctgaaagcacctgattgtgtgctgtcgccactgtgggcagggcaagtccagcagaactttacaagtcttttgttctgccagcaagcagtaattggttctccaccccagtgtagtaaacttccagccacctgaatgaaattcacctaatttaacaaactgcacgagaagcaaagcaactcccggagcatacacaggtgtgaatattgtgcatctgtcttctctgtgattcctcttgtcttgaggcttccacacccctctggtccttggttcgtcctgtcccctcttctccagacccatcttcccatctactgcagacctggctctattgggtattgaatctgcttctctccacacctcagtttccccctttcacctagctcttccttttagcttctaaacatgctcaaggcttgcagcctaaaaatgaaaatactacaaactactctttattctgcttcttcccccactgtgtgccccttccagtcataagcgattctgcaaggaaccatctatactcagtctctaccatctcatttcttgctacatagcaaacaacgttctaagaattttacatatattgacttatggaagcctgacaacatcactgtgatgtaagtgctattgttatttacattttatggatgaggacaaggaggcactgaacagcaaagtatttgccctggatcaccaggatttgggcaaaggtatgctctgagacctttttccccgccttatgcccattacaaggtaccttgaatgaaaaaatacacaagaacattgcatgga

SEQ ID NO: 11719 - DNA, 2146 bp, Homo sapiens; identical to SEQ ID NO: 11718

SEQ ID NO: 11720 - DNA, 1811 bp, Homo sapiens
aacctagaaaacatccagtggattacagaatttcttccccatattcactcctcacttttacaattttcccacaatcctctacttcagtgggatgctgtgtctagtgattaaacaaaaatatagagctgtgcaatttgattttggcttccacaacgaatatctgaatccattccaaatgaaattttagatataacaaagacttgtcctaatcatactgaaatattggtgcacacctctctgcattagatttcacttttttaaaaaacccagtggacattgctataaataagatttatttggctacaaataacctgggatgttgcttattatgattgatgcctgctggtttgttcccaagctgagtgaaattgaacctcgtcctccctactcattttgatgactgaggctggtttataagaaaaggaagtttggagaagaaaaccgagattagaaaatatcatgttttggttggagataagaaccagggatggcaagtaccagtgtgtacaaatgtatttcacggagtttgaaggaacgcataatcaagagggaaaacaatttgtccttcattggacgtattatttggatttgggtgagcaacaaaatggaatgtggtctgttaggagcattctgtttgttcttttgtccctgatgtgatgaatcattgccacatgctagatggactcttcatatccaggttttgtccctcagggctgagcactgtattaaagagtttttgttgagtcatttaaccttagtgtccacatccagatcagctgtaaaatggggaagacgtgtgctgatttggaatgaatgcaaaatatcactatcattttcctaattacagaggagcaaaggttatcttcagccctttcagttctatgctcacatattcaaatatcaaatgtaatttagctgaagttatttaataatcaagtctttcaatatctgttcaaagaaaaagaacacactttgaaaattctgcaaagctgtctcccagtctttaaaatgtctggaagcactctccttctttacaataccaacatcactggcccagaatcttccctgtgctagtttgtaaatataaataaattacttgttttgtaaacttttgtaaagaatattttggtagaaatacttcaaacatattctttgggttatatttatacatatgtgaaataaatatactatcaaaaggttatattttatacaaaaagtaaattgctaccttttgtatgctaatatgcaaagttttgtataatatgatggtttatttttagctctacacttaaaccataggtggttgagtgggaacttttgaaaactatcaagaggcttgttagacaaatttatattctgaaacctcaataagaaagcattccaggtttcaatccttgttttttgtcctgctcccaaattcttttttaaacccatagttcttgtgtcttatttgattcttctgctgtgcacattgtattggtccttgttgcatgtagtctactgtgtgttttccgattttataaggcagcatttctccatacaaaaagaaaaaaaatgatgtacatataaacgcttttgttgtatggctcctccatgttactgtatatatctgccagcacttcccagttacactcctgtgagtcagcttatttttaccctaacataaatagtatgttttgtagtagttatcaaatttaagagataaagcaatcagaatgtttggattttcttctatcttaatgtgaatttcataattaatgtctatttattcagctattcattaaaatacaggattctttgggaaaacatga

SEQ ID NO: 11721 - DNA, 1811 bp, Homo sapiens; identical to SEQ ID NO: 11720

SEQ ID NO: 11722 - DNA, 179 bp, Homo sapiens
gcaatttttcttttttgttttaagtcaaagactagaaagcagttttaagcaagtaattcggtcttggctttgtaattaagccctatgaagataaataactctgctctaagtgaatgcgctaatgttacctgcattactgtaaacgtaccataacggtaaagatttcaacttgtaaaaca

SEQ ID NO: 11723 - DNA, 1551 bp, Homo sapiens
ttttctcaggtggctcatccacaataagcttaaactctaaccaggctttggcaaaacccagtttcaacacacaccattttaactcccaattccagcctcctgtctacttctcacgggacaagaatgccatcattatctacagcagttcagaatatggggatgtatggaaatctgccttgtaatcaacctaacacatacagtgtcacttcaggaatgaatcaattgacccaacagagaaacccaaagcaattgttagcaaatcaaaacaaccctatgatgccacggccacctaccttagggccaagtaataataacaatgtagccacttttggagctggatctgttggtaattcacaacaattgagaccaaatttaacccatagtatggcaagcatgccaccacagagaacatcaaacgtaatgatcacatccaacacaactgcaccaaactgggcctctcaagaaggaacaagcaaacagcaagaagccctgacgtctgcaggagtccgcttccccacaggtacacctgcagcctataccccaaatcagtcactgcaacaggcagtaggtagccagcaattttcccagagggcagtggctcctcctaaccagttaacaccagcagtgcaaatgagacccatgaaccaaatgagccaaacactaaatgggcaaaccatgggtcccctcaggggtctgaatctcagacccaatcagctaagcacacagattttgcctaatttgaatcagtcaggaacagggttgaatcagtcgaggacgggcatcaaccagccaccatccctgacgcccagcaattttccttcacccaaccaaagttccagggcttttcaaggaactgaccacagcagtgacttagcttttgacttcctcagccaacaaaatgataacatgggccctgccctaaacagtgatgctgatttcattgattctttattgaagacagagcctggtaatgatgactggatgaaagacatcaatcttgatgaaatcttggggaacaattcctaaagaagaaagggaagacaatttacaaactccaagcactaaaaggcagtatattacagaaactctgtagaggctgaactgttgatgttcaggtggactacatgaagataacatgcttaaaaatggaaagcagaaagtaactgcagtgatgaacattttggtccaaattcttgttttaaatcttacacctgaaagtaaaatattgggatcacttttccctgtctaaactccaggatacagtatccaatttatccaaacagaactgtggtgtcaatgtgtaattaattgtgtaaaatagccttcccaagtttctttttccctggaaaataaaaaaggtaatagaacttgtagtttatttaaaccccatgtcatgaggaggtactagttccaagcaacaaactccttaatttgctctaatagataggtatggtttaatctttccattgtgtcttttcatttaattttcctgaagcttgcaggatagattgaaatgttataggtttgtttggagtaaccaaacagtatgca

SEQ ID NO: 11724 - DNA, 1550 bp, Homo sapiens
ttttctcaggtggctcatccacaataagcttaaactctaaccaggctttggcaaacccagtttcaacacacaccattttaactcccaattccagcctcctgtctacttctcacgggacaagaatgccatcattatctacagcagttcagaatatggggatgtatggaaatctgccttgtaatcaacctaacacatacagtgtcacttcaggaatgaatcaattgacccaacagagaaacccaaagcaattgttagcaaatcaaaacaaccctatgatgccacggccacctaccttagggccaagtaataataacaatgtagccacttttggagctggatctgttggtaattcacaacaattgagaccaaatttaacccatagtatggcaagcatgccaccacagagaacatcaaacgtaatgatcacatccaacacaactgcaccaaactgggcctctcaagaaggaacaagcaaacagcaagaagccctgacgtctgcaggagtccgcttccccacaggtacacctgcagcctataccccaaatcagtcactgcaacaggcagtaggtagccagcaattttcccagagggcagtggctcctcctaaccagttaacaccagcagtgcaaatgagacccatgaaccaaatgagccaaacactaaatgggcaaaccatgggtcccctcaggggtctgaatctcagacccaatcagctaagcacacagattttgcctaatttgaatcagtcaggaacagggttgaatcagtcgaggacgggcatcaaccagccaccatccctgacgcccagcaattttccttcacccaaccaaagttccagggcttttcaaggaactgaccacagcagtgacttagcttttgacttcctcagccaacaaaatgataacatgggccctgccctaaacagtgatgctgatttcattgattctttattgaagacagagcctggtaatgatgactggatgaaagacatcaatcttgatgaaatcttggggaacaattcctaaagaagaaagggaagacaatttacaaactccaagcactaaaaggcagtatattacagaaactctgtagaggctgaactgttgatgttcaggtggactacatgaagataacatgcttaaaaatggaaagcagaaagtaactgcagtgatgaacattttggtccaaattcttgttttaaatcttacacctgaaagtaaaatattgggatcacttttccctgtctaaactccaggatacagtatccaatttatccaaacagaactgtggtgtcaatgtgtaattaattgtgtaaaatagccttcccaagtttctttttccctggaaaataaaaaaggtaatagaacttgtagtttatttaaaccccatgtcatgaggaggtactagttccaagcaacaaactccttaatttgctctaatagataggtatggtttaatctttccattgtgtcttttcatttaattttcctgaagcttgcaggatagattgaaatgttataggtttgtttggagtaaccaaacagtatgca

SEQ ID NO: 11725 - DNA, 137 bp, Homo sapiens
tagtcccagctcctcgagaggctgaggcaggaaaatcacttgaacccgggaggcggaggttgcagtgagcccagactgcgccactgcactccagcctggcaacagagcgagactccatctcaaaaacaaaaaaaaaa

SEQ ID NO: 11726 - DNA, 1745 bp, Homo sapiens
cttagccctcacttctaagagtctgtaagatattcccacttgaggagcttgtcttcttcaatgctgtatctcagaaattaaactcctccttttctcacgccaaaccatctctcctcctggcttctctcctcttcatggggttgttcatctcccacacactcaggtcagaaaccttgctattgcctcccctctttccacgcccccacttttttctgctcatatcttgcccatcactcaatcctgcagattctttcttcatgcctttcattccttccttcccgtttctatggcccctactctgacccaaatcatattacctaatattgcttcatatttttacccaagagcttcgtcctatctctggttcccttggaagctccccaatgcctgcaggcaaatccagcccccttaaatttaccattcagtgcctcccataatccaaccttgatctgctcttctaactaaactttccccatacccaaatgaagccccagccagcctggtgtgctccccagtctctggcaagcctctgctcaagtcctgtgttctgtttggaatgccagccccatgcacttcaccagtcctacttactcctttaaggctcagtcggtgacccacccttttggaggacatctgagctccccatggcagcttctgggcttctttgcatcctgggatctcccagaatctatttttcaacctgatgctacattcctccacagcagggagatgccttttattttgttcttcttccttataccgtcaaattccaaggatagaaaattgcatttccctgggcctgtgaaaagggatccctccctccctgcacactcatgcctggctcacacggagtgagccagacagcgcttcctcattccccgcagtgggtgtcgcaacagccagttgcaactagaataggggccacatcccgagtctcttgaattcttgccctgtggttaggatgcccttcttgcctgtcctgaaggtggagatttcctacagccgagagagagggagtcagcagtctagggcaggaactccatcatttctttattaaaccactcctaactctctctaatctctgtgagtcttgcctttcccttttctctcctcctcctactgttgagtacaactaggccaggctgaatgagaggagaaagatggggaggaggaaagaagttaggcagccttggcagagggtgcaatgctccgggaaaatgggagagatttacaaggcagagattgacagtttttagtaacttgactttgacctccagtgtacacagacatagccttggctgctggactctgagctttctggccctgggaagctcgagatttgcaaacacttgttcgacaatcacctcgtttatctgcattgtcaccagtgcagcctctgagccctctccctgtctttacttgaccctgtatagaaaaatgctttcagggccaattgcagtgactcatgcctgtaatcccagcactctgggaggccaaggcgggcagatcacctgaagttgggagtttgagaccagcctgaccaacatggagaaaccccatctgtactaaaaataaaaaattagccggatattgtggcgcaggcctgtaatcccagctaccagggaagctgaggcaggagaatggcttgaacccagtaggcggaggttgcagtgagccaagatcatgccattacactccagcctagctgggcaaaagagcaaaacactgtctcaaaaaaaaaaaaa

SEQ ID NO: 11727 - DNA, 828 bp, Homo sapiens
aactgtaagatatttatttaactctaagttacttaaaggtaaataatgtgccataaaagaggcacgaagtgctatgagattgcagggcagagattccttctggctatggactctgggaatgcttcctggaggagacggcatttggcaaagctctgaaaggatagacaggatacactgtgggaacttgagatggtggctgtagtcaaagaagagtataaataacagcagagagatggagaggtgtggtttgagtgactcattttgggtggaaccaagagtggcaaaaggcaatcagagttgggggtggaacggaagataaggcttggacagggaggccaatgtgtttgggagttatcctggaagtcccagacagccatggggctttattctgaaggcagtaggagctgttgaccatgctgacttcggtggaggtgcgagggtcagattctggtgtgtagagtggatgagagtgaagagagcttgaattcgcaagggagcagataagagagtgttgtaatatttcaggcctcacacatctgaataaattgcgtaactcagatactttgcggtcctgtggagcatgcaggcatcccctggaggcttctactttctctgagctgaaattggttctttgatgaatttgagagatatataacttatgagaacatccatgagaaacccaccattcctcttcacctctgtcttccatattcttgattcccagcctggccgcttccccctgggcctcccctctgctaggagtgtgttaaatgccaagcctgtctcaacctctatctggcagcaccttgaagtatcaagtcaggaata

SEQ ID NO: 11728 - DNA, 552 bp, Homo sapiens
tgcaggtcatctggaattctttccgggtctcaggctcgtgaggtgctcattgtgtatgtgtcatgggagctggagaatggctgtaggtgcaaatggacttggaaaagaacaatgtcaaagtcgtaagtccagcctggggcatggcaggtttatgtatgtgtgagtggcgggaggggctgtagatttgaactccctgaaagaagatatgtgtaattcttaccaaagagtaaatgcatatgtttatgaaagaaagttcattgctatcatctggctctccaaggcacctgtgaccccaaaagattaagaacatctctcataagatattatcatccgttctacaaacctttcataaaaatgacctcaaacttgagctcctttttaattcagacaaactaggccataagccctgttgaggaaagaaccgtatctgtatggagagtcactgttacatcccaaggacacagcctggtacctgacacacagctggcattgagtacgtacaatgtgtgcctgatataaggcagctctgttctcccaataaggagggctgct

SEQ ID NO: 11729 - DNA, 38771 bp, Homo sapiens; identical to SEQ ID NO: 7561
  SITE (7892): n equals a,t,g, or c
  SITE (7893): n equals a,t,g, or c
  SITE (7894): n equals a,t,g, or c
  SITE (7895): n equals a,t,g, or c
  SITE (7896): n equals a,t,g, or c
  SITE (7897): n equals a,t,g, or c
  SITE (7898): n equals a,t,g, or c
  SITE (7899): n equals a,t,g, or c
  SITE (7900): n equals a,t,g, or c
  SITE (7901): n equals a,t,g, or c
  SITE (7902): n equals a,t,g, or c
  SITE (7903): n equals a,t,g, or c
  SITE (7904): n equals a,t,g, or c
  SITE (7905): n equals a,t,g, or c
  SITE (7906): n equals a,t,g, or c
  SITE (7907): n equals a,t,g, or c
  SITE (7908): n equals a,t,g, or c
  SITE (7909): n equals a,t,g, or c
  SITE (7910): n equals a,t,g, or c
  SITE (7911): n equals a,t,g, or c
  SITE (7912): n equals a,t,g, or c
  SITE (7913): n equals a,t,g, or c
  SITE (7914): n equals a,t,g, or c
  SITE (7915): n equals a,t,g, or c
  SITE (7916): n equals a,t,g, or c
  SITE (7917): n equals a,t,g, or c
  SITE (7918): n equals a,t,g, or c
  SITE (7919): n equals a,t,g, or c
  SITE (7920): n equals a,t,g, or c
  SITE (7921): n equals a,t,g, or c
  SITE (7922): n equals a,t,g, or c
  SITE (7923): n equals a,t,g, or c
  SITE (7924): n equals a,t,g, or c
  SITE (7925): n equals a,t,g, or c
  SITE (7926): n equals a,t,g, or c
  SITE (7927): n equals a,t,g, or c
  SITE (7928): n equals a,t,g, or c
  SITE (7929): n equals a,t,g, or c
  SITE (7930): n equals a,t,g, or c
  SITE (7931): n equals a,t,g, or c
  SITE (7932): n equals a,t,g, or c
  SITE (7933): n equals a,t,g, or c
  SITE (7934): n equals a,t,g, or c
  SITE (7935): n equals a,t,g, or c
  SITE (7936): n equals a,t,g, or c
  SITE (7937): n equals a,t,g, or c
  SITE (7938): n equals a,t,g, or c
  SITE (7939): n equals a,t,g, or c
  SITE (7940): n equals a,t,g, or c
  SITE (7941): n equals a,t,g, or c
  SITE (7942): n equals a,t,g, or c
  SITE (7943): n equals a,t,g, or c
  SITE (7944): n equals a,t,g, or c
  SITE (7945): n equals a,t,g, or c
  SITE (7946): n equals a,t,g, or c
  SITE (7947): n equals a,t,g, or c
  SITE (7948): n equals a,t,g, or c
  SITE (7949): n equals a,t,g, or c
  SITE (7950): n equals a,t,g, or c
  SITE (7951): n equals a,t,g, or c
  SITE (7952): n equals a,t,g, or c
  SITE (7953): n equals a,t,g, or c
  SITE (7954): n equals a,t,g, or c
  SITE (7955): n equals a,t,g, or c
  SITE (7956): n equals a,t,g, or c
  SITE (7957): n equals a,t,g, or c
  SITE (7958): n equals a,t,g, or c
  SITE (7959): n equals a,t,g, or c
  SITE (7960): n equals a,t,g, or c
  SITE (7961): n equals a,t,g, or c
  SITE (7962): n equals a,t,g, or c
  SITE (7963): n equals a,t,g, or c
  SITE (7964): n equals a,t,g, or c
  SITE (7965): n equals a,t,g, or c
  SITE (7966): n equals a,t,g, or c
  SITE (7967): n equals a,t,g, or c
  SITE (7968): n equals a,t,g, or c
  SITE (7969): n equals a,t,g, or c
  SITE (7970): n equals a,t,g, or c
  SITE (7971): n equals a,t,g, or c
  SITE (7972): n equals a,t,g, or c
  SITE (7973): n equals a,t,g, or c
  SITE (7974): n equals a,t,g, or c
  SITE (7975): n equals a,t,g, or c
  SITE (7976): n equals a,t,g, or c
  SITE (7977): n equals a,t,g, or c
  SITE (7978): n equals a,t,g, or c
  SITE (7979): n equals a,t,g, or c
  SITE (7980): n equals a,t,g, or c
  SITE (7981): n equals a,t,g, or c
  SITE (7982): n equals a,t,g, or c
  SITE (7983): n equals a,t,g, or c
  SITE (7984): n equals a,t,g, or c
  SITE (7985): n equals a,t,g, or c
  SITE (7986): n equals a,t,g, or c
  SITE (7987): n equals a,t,g, or c
  SITE (7988): n equals a,t,g, or c
  SITE (7989): n equals a,t,g, or c
  SITE (7990): n equals a,t,g, or c
  SITE (7991): n equals a,t,g, or c
  SITE (7992): n equals a,t,g, or c
  SITE (7993): n equals a,t,g, or c
  SITE (7994): n equals a,t,g, or c
  SITE (7995): n equals a,t,g, or c
  SITE (7996): n equals a,t,g, or c
  SITE (7997): n equals a,t,g, or c
  SITE (7998): n equals a,t,g, or c
  SITE (7999): n equals a,t,g, or c
  SITE (8000): n equals a,t,g, or c
  SITE (8001): n equals a,t,g, or c
  SITE (8002): n equals a,t,g, or c
  SITE (8003): n equals a,t,g, or c
  SITE (8004): n equals a,t,g, or c
  SITE (8005): n equals a,t,g, or c
  SITE (8006): n equals a,t,g, or c
  SITE (8007): n equals a,t,g, or c
  SITE (8008): n equals a,t,g, or c
  SITE (8009): n equals a,t,g, or c
  SITE (8010): n equals a,t,g, or c
  SITE (8011): n equals a,t,g, or c
  SITE (8012): n equals a,t,g, or c
  SITE (8013): n equals a,t,g, or c
  SITE (8014): n equals a,t,g, or c
  SITE (8015): n equals a,t,g, or c
  SITE (8016): n equals a,t,g, or c
  SITE (8017): n equals a,t,g, or c
  SITE (8018): n equals a,t,g, or c
  SITE (8019): n equals a,t,g, or c
  SITE (8020): n equals a,t,g, or c
  SITE (8021): n equals a,t,g, or c
  SITE (8022): n equals a,t,g, or c
  SITE (8023): n equals a,t,g, or c
  SITE (8024): n equals a,t,g, or c
  SITE (8025): n equals a,t,g, or c
  SITE (8026): n equals a,t,g, or c
  SITE (8027): n equals a,t,g, or c
  SITE (8028): n equals a,t,g, or c
  SITE (8029): n equals a,t,g, or c
  SITE (8030): n equals a,t,g, or c
  SITE (8031): n equals a,t,g, or c
  SITE (8032): n equals a,t,g, or c
  SITE (8033): n equals a,t,g, or c
  SITE (8034): n equals a,t,g, or c
  SITE (8035): n equals a,t,g, or c
  SITE (8036): n equals a,t,g, or c
  SITE (8037): n equals a,t,g, or c
  SITE (8038): n equals a,t,g, or c
  SITE (8039): n equals a,t,g, or c
  SITE (8040): n equals a,t,g, or c
  SITE (8041): n equals a,t,g, or c
  SITE (8042): n equals a,t,g, or c
  SITE (8043): n equals a,t,g, or c
  SITE (8044): n equals a,t,g, or c
  SITE (8045): n equals a,t,g, or c
  SITE (8046): n equals a,t,g, or c
  SITE (8047): n equals a,t,g, or c
  SITE (8048): n equals a,t,g, or c
  SITE (8049): n equals a,t,g, or c
  SITE (8050): n equals a,t,g, or c
  SITE (8051): n equals a,t,g, or c
  SITE (8052): n equals a,t,g, or c
  SITE (8053): n equals a,t,g, or c
  SITE (8054): n equals a,t,g, or c
  SITE (8055): n equals a,t,g, or c
  SITE (8056): n equals a,t,g, or c
  SITE (8057): n equals a,t,g, or c
  SITE (8058): n equals a,t,g, or c
  SITE (8059): n equals a,t,g, or c
  SITE (8060): n equals a,t,g, or c
  SITE (8061): n equals a,t,g, or c
  SITE (8062): n equals a,t,g, or c
  SITE (8063): n equals a,t,g, or c
  SITE (8064): n equals a,t,g, or c
  SITE (8065): n equals a,t,g, or c
  SITE (8066): n equals a,t,g, or c
  SITE (8067): n equals a,t,g, or c
  SITE (8068): n equals a,t,g, or c
  SITE (8069): n equals a,t,g, or c
  SITE (8070): n equals a,t,g, or c
  SITE (8071): n equals a,t,g, or c
  SITE (8072): n equals a,t,g, or c
  SITE (8073): n equals a,t,g, or c
  SITE (8074): n equals a,t,g, or c
  SITE (8075): n equals a,t,g, or c
  SITE (8076): n equals a,t,g, or c
  SITE (8077): n equals a,t,g, or c
  SITE (8078): n equals a,t,g, or c
  SITE (8079): n equals a,t,g, or c
  SITE (8080): n equals a,t,g, or c
  SITE (8081): n equals a,t,g, or c
  SITE (8082): n equals a,t,g, or c
  SITE (8083): n equals a,t,g, or c
  SITE (8084): n equals a,t,g, or c
  SITE (8085): n equals a,t,g, or c
  SITE (8086): n equals a,t,g, or c
  SITE (8087): n equals a,t,g, or c
  SITE (8088): n equals a,t,g, or c
  SITE (8089): n equals a,t,g, or c
  SITE (8090): n equals a,t,g, or c
  SITE (8091): n equals a,t,g, or c
  SITE (8092): n equals a,t,g, or c
  SITE (8093): n equals a,t,g, or c
  SITE (8094): n equals a,t,g, or c
  SITE (8095): n equals a,t,g, or c
  SITE (8096): n equals a,t,g, or c
  SITE (8097): n equals a,t,g, or c
  SITE (8098): n equals a,t,g, or c
  SITE (8099): n equals a,t,g, or c
  SITE (8100): n equals a,t,g, or c
  SITE (8101): n equals a,t,g, or c
  SITE (8102): n equals a,t,g, or c
  SITE (8103): n equals a,t,g, or c
  SITE (8104): n equals a,t,g, or c
  SITE (8105): n equals a,t,g, or c
  SITE (8106): n equals a,t,g, or c
  SITE (8107): n equals a,t,g, or c
  SITE (8108): n equals a,t,g, or c
  SITE (8109): n equals a,t,g, or c
  SITE (8110): n equals a,t,g, or c
  SITE (8111): n equals a,t,g, or c
  SITE (8112): n equals a,t,g, or c
  SITE (8113): n equals a,t,g, or c
  SITE (8114): n equals a,t,g, or c
  SITE (8115): n equals a,t,g, or c
  SITE (8116): n equals a,t,g, or c
  SITE (8117): n equals a,t,g, or c
  SITE (8118): n equals a,t,g, or c
  SITE (8119): n equals a,t,g, or c
  SITE (8120): n equals a,t,g, or c
  SITE (8121): n equals a,t,g, or c
  SITE (8122): n equals a,t,g, or c
  SITE (8123): n equals a,t,g, or c
  SITE (8124): n equals a,t,g, or c
  SITE (8125): n equals a,t,g, or c
  SITE (8126): n equals a,t,g, or c
  SITE (8127): n equals a,t,g, or c
  SITE (8128): n equals a,t,g, or c
  SITE (8129): n equals a,t,g, or c
  SITE (8130): n equals a,t,g, or c
  SITE (8131): n equals a,t,g, or c
  SITE (8132): n equals a,t,g, or c
  SITE (8133): n equals a,t,g, or c
  SITE (8134): n equals a,t,g, or c
  SITE (8135): n equals a,t,g, or c
  SITE (8136): n equals a,t,g, or c
  SITE (8137): n equals a,t,g, or c
  SITE (8138): n equals a,t,g, or c
  SITE (8139): n equals a,t,g, or c
  SITE (8140): n equals a,t,g, or c
  SITE (8141): n equals a,t,g, or c
  SITE (8142): n equals a,t,g, or c
  SITE (8143): n equals a,t,g, or c
  SITE (8144): n equals a,t,g, or c
  SITE (8145): n equals a,t,g, or c
  SITE (8146): n equals a,t,g, or c
  SITE (8147): n equals a,t,g, or c
  SITE (8148): n equals a,t,g, or c
  SITE (8149): n equals a,t,g, or c
  SITE (8150): n equals a,t,g, or c
  SITE (8151): n equals a,t,g, or c
  SITE (8152): n equals a,t,g, or c
  SITE (8153): n equals a,t,g, or c
  SITE (8154): n equals a,t,g, or c
  SITE (8155): n equals a,t,g, or c
  SITE (8156): n equals a,t,g, or c
  SITE (8157): n equals a,t,g, or c
  SITE (8158): n equals a,t,g, or c
  SITE (8159): n equals a,t,g, or c
  SITE (8160): n equals a,t,g, or c
  SITE (8161): n equals a,t,g, or c
  SITE (8162): n equals a,t,g, or c
  SITE (8163): n equals a,t,g, or c
  SITE (8164): n equals a,t,g, or c
  SITE (8165): n equals a,t,g, or c
  SITE (8166): n equals a,t,g, or c
  SITE (8167): n equals a,t,g, or c
  SITE (8168): n equals a,t,g, or c
  SITE (8169): n equals a,t,g, or c
  SITE (8170): n equals a,t,g, or c
  SITE (8171): n equals a,t,g, or c
  SITE (8172): n equals a,t,g, or c
  SITE (8173): n equals a,t,g, or c
  SITE (8174): n equals a,t,g, or c
  SITE (8175): n equals a,t,g, or c
  SITE (8176): n equals a,t,g, or c
  SITE (8177): n equals a,t,g, or c
  SITE (8178): n equals a,t,g, or c
  SITE (8179): n equals a,t,g, or c
  SITE (8180): n equals a,t,g, or c
  SITE (8181): n equals a,t,g, or c
  SITE (8182): n equals a,t,g, or c
  SITE (8183): n equals a,t,g, or c
  SITE (8184): n equals a,t,g, or c
  SITE (8185): n equals a,t,g, or c
  SITE (8186): n equals a,t,g, or c
  SITE (8187): n equals a,t,g, or c
  SITE (8188): n equals a,t,g, or c
  SITE (8189): n equals a,t,g, or c
  SITE (8190): n equals a,t,g, or c
  SITE (8191): n equals a,t,g, or c
  SITE (8192): n equals a,t,g, or c
  SITE (8193): n equals a,t,g, or c
  SITE (8194): n equals a,t,g, or c
  SITE (8195): n equals a,t,g, or c
  SITE (8196): n equals a,t,g, or c
  SITE (8197): n equals a,t,g, or c
  SITE (8198): n equals a,t,g, or c
  SITE (8199): n equals a,t,g, or c
  SITE (8200): n equals a,t,g, or c
  SITE (8201): n equals a,t,g, or c
  SITE (8202): n equals a,t,g, or c
  SITE (8203): n equals a,t,g, or c
  SITE (8204): n equals a,t,g, or c
  SITE (8205): n equals a,t,g, or c
  SITE (8206): n equals a,t,g, or c
  SITE (8207): n equals a,t,g, or c
  SITE (8208): n equals a,t,g, or c
  SITE (8209): n equals a,t,g, or c
  SITE (8210): n equals a,t,g, or c
  SITE (8211): n equals a,t,g, or c
  SITE (8212): n equals a,t,g, or c
  SITE (8213): n equals a,t,g, or c
  SITE (8214): n equals a,t,g, or c
  SITE (8215): n equals a,t,g, or c
  SITE (8216): n equals a,t,g, or c
  SITE (8217): n equals a,t,g, or c
  SITE (8218): n equals a,t,g, or c
  SITE (8219): n equals a,t,g, or c
  SITE (8220): n equals a,t,g, or c
  SITE (8221): n equals a,t,g, or c
  SITE (8222): n equals a,t,g, or c
  SITE (8223): n equals a,t,g, or c
  SITE (8224): n equals a,t,g, or c
  SITE (8225): n equals a,t,g, or c
  SITE (8226): n equals a,t,g, or c
  SITE (8227): n equals a,t,g, or c
  SITE (8228): n equals a,t,g, or c
  SITE (8229): n equals a,t,g, or c
  SITE (8230): n equals a,t,g, or c
  SITE (8231): n equals a,t,g, or c
  SITE (8232): n equals a,t,g, or c
  SITE (8233): n equals a,t,g, or c
  SITE (8234): n equals a,t,g, or c
  SITE (8235): n equals a,t,g, or c
  SITE (8236): n equals a,t,g, or c
  SITE (8237): n equals a,t,g, or c
  SITE (8238): n equals a,t,g, or c
  SITE (8239): n equals a,t,g, or c
  SITE (8240): n equals a,t,g, or c
  SITE (8241): n equals a,t,g, or c
  SITE (8242): n equals a,t,g, or c
  SITE (8243): n equals a,t,g, or c
  SITE (8244): n equals a,t,g, or c
  SITE (8245): n equals a,t,g, or c
  SITE (8246): n equals a,t,g, or c
  SITE (8247): n equals a,t,g, or c
  SITE (8248): n equals a,t,g, or c
  SITE (8249): n equals a,t,g, or c
  SITE (8250): n equals a,t,g, or c
  SITE (8251): n equals a,t,g, or c
  SITE (8252): n equals a,t,g, or c
  SITE (8253): n equals a,t,g, or c
  SITE (8254): n equals a,t,g, or c
  SITE (8255): n equals a,t,g, or c
  SITE (8256): n equals a,t,g, or c
  SITE (8257): n equals a,t,g, or c
  SITE (8258): n equals a,t,g, or c
  SITE (8259): n equals a,t,g, or c
  SITE (8260): n equals a,t,g, or c
  SITE (8261): n equals a,t,g, or c
  SITE (8262): n equals a,t,g, or c
  SITE (8263): n equals a,t,g, or c
  SITE (8264): n equals a,t,g, or c
  SITE (8265): n equals a,t,g, or c
  SITE (8266): n equals a,t,g, or c
  SITE (8267): n equals a,t,g, or c
  SITE (8268): n equals a,t,g, or c
  SITE (8269): n equals a,t,g, or c
  SITE (8270): n equals a,t,g, or c
  SITE (8271): n equals a,t,g, or c
  SITE (8272): n equals a,t,g, or c
  SITE (8273): n equals a,t,g, or c
  SITE (8274): n equals a,t,g, or c
  SITE (8275): n equals a,t,g, or c
  SITE (8276): n equals a,t,g, or c
  SITE (8277): n equals a,t,g, or c
  SITE (8278): n equals a,t,g, or c
  SITE (8279): n equals a,t,g, or c
  SITE (8280): n equals a,t,g, or c
  SITE (8281): n equals a,t,g, or c
  SITE (8282): n equals a,t,g, or c
  SITE (8283): n equals a,t,g, or c
  SITE (8284): n equals a,t,g, or c
  SITE (8285): n equals a,t,g, or c
  SITE (8286): n equals a,t,g, or c
  SITE (8287): n equals a,t,g, or c
  SITE (8288): n equals a,t,g, or c
  SITE (8289): n equals a,t,g, or c
  SITE (8290): n equals a,t,g, or c
  SITE (8291): n equals a,t,g, or c
  SITE (8292): n equals a,t,g, or c
  SITE (8293): n equals a,t,g, or c
  SITE (8294): n equals a,t,g, or c
  SITE (8295): n equals a,t,g, or c
  SITE (8296): n equals a,t,g, or c
  SITE (8297): n equals a,t,g, or c
  SITE (8298): n equals a,t,g, or c
  SITE (8299): n equals a,t,g, or c
  SITE (8300): n equals a,t,g, or c
  SITE (8301): n equals a,t,g, or c
  SITE (8302): n equals a,t,g, or c
  SITE (8303): n equals a,t,g, or c
  SITE (8304): n equals a,t,g, or c
  SITE (8305): n equals a,t,g, or c
  SITE (8306): n equals a,t,g, or c
  SITE (8307): n equals a,t,g, or c
  SITE (8308): n equals a,t,g, or c
  SITE (8309): n equals a,t,g, or c
  SITE (8310): n equals a,t,g, or c
  SITE (8311): n equals a,t,g, or c
  SITE (8312): n equals a,t,g, or c
  SITE (8313): n equals a,t,g, or c
  SITE (8314): n equals a,t,g, or c
  SITE (8315): n equals a,t,g, or c
  SITE (8316): n equals a,t,g, or c
  SITE (8317): n equals a,t,g, or c
  SITE (8318): n equals a,t,g, or c
  SITE (8319): n equals a,t,g, or c
  SITE (8320): n equals a,t,g, or c
  SITE (8321): n equals a,t,g, or c
  SITE (8322): n equals a,t,g, or c
  SITE (8323): n equals a,t,g, or c
  SITE (8324): n equals a,t,g, or c
  SITE (8325): n equals a,t,g, or c
  SITE (8326): n equals a,t,g, or c
  SITE (8327): n equals a,t,g, or c
  SITE (8328): n equals a,t,g, or c
  SITE (8329): n equals a,t,g, or c
  SITE (8330): n equals a,t,g, or c
  SITE (8331): n equals a,t,g, or c
  SITE (8332): n equals a,t,g, or c
  SITE (8333): n equals a,t,g, or c
  SITE (8334): n equals a,t,g, or c
  SITE (8335): n equals a,t,g, or c
  SITE (8336): n equals a,t,g, or c
  SITE (8337): n equals a,t,g, or c
  SITE (8338): n equals a,t,g, or c
  SITE (8339): n equals a,t,g, or c
  SITE (8340): n equals a,t,g, or c
  SITE (8341): n equals a,t,g, or c
  SITE (8342): n equals a,t,g, or c
  SITE (8343): n equals a,t,g, or c
  SITE (8344): n equals a,t,g, or c
  SITE (8345): n equals a,t,g, or c
  SITE (8346): n equals a,t,g, or c
  SITE (8347): n equals a,t,g, or c
  SITE (8348): n equals a,t,g, or c
  SITE (8349): n equals a,t,g, or c
  SITE (8350): n equals a,t,g, or c
  SITE (8351): n equals a,t,g, or c
  SITE (8352): n equals a,t,g, or c
  SITE (8353): n equals a,t,g, or c
  SITE (8354): n equals a,t,g, or c
  SITE (8355): n equals a,t,g, or c
  SITE (8356): n equals a,t,g, or c
  SITE (8357): n equals a,t,g, or c
  SITE (8358): n equals a,t,g, or c
  SITE (8359): n equals a,t,g, or c
  SITE (8360): n equals a,t,g, or c
  SITE (8361): n equals a,t,g, or c
  SITE (8362): n equals a,t,g, or c
  SITE (8363): n equals a,t,g, or c
  SITE (8364): n equals a,t,g, or c
  SITE (8365): n equals a,t,g, or c
  SITE (8366): n equals a,t,g, or c
  SITE (8367): n equals a,t,g, or c
  SITE (8368): n equals a,t,g, or c
  SITE (8369): n equals a,t,g, or c
  SITE (8370): n equals a,t,g, or c
  SITE (8371): n equals a,t,g, or c
  SITE (8372): n equals a,t,g, or c
  SITE (8373): n equals a,t,g, or c
  SITE (8374): n equals a,t,g, or c
  SITE (8375): n equals a,t,g, or c
  SITE (8376): n equals a,t,g, or c
  SITE (8377): n equals a,t,g, or c
  SITE (8378): n equals a,t,g, or c
  SITE (8379): n equals a,t,g, or c
  SITE (8380): n equals a,t,g, or c
  SITE (8381): n equals a,t,g, or c
  SITE (8382): n equals a,t,g, or c
  SITE (8383): n equals a,t,g, or c
  SITE (8384): n equals a,t,g, or c
  SITE (8385): n equals a,t,g, or c
  SITE (8386): n equals a,t,g, or c
  SITE (8387): n equals a,t,g, or c
  SITE (8388): n equals a,t,g, or c
  SITE (8389): n equals a,t,g, or c
  SITE (8390): n equals a,t,g, or c
  SITE (8391): n equals a,t,g, or c
  SITE (8392): n equals a,t,g, or c
  SITE (8393): n equals a,t,g, or c
  SITE (8394): n equals a,t,g, or c
  SITE (8395): n equals a,t,g, or c
  SITE (8396): n equals a,t,g, or c
  SITE (8397): n equals a,t,g, or c
  SITE (8398): n equals a,t,g, or c
  SITE (8399): n equals a,t,g, or c
  SITE (8400): n equals a,t,g, or c
  SITE (8401): n equals a,t,g, or c
  SITE (8402): n equals a,t,g, or c
  SITE (8403): n equals a,t,g, or c
  SITE (8404): n equals a,t,g, or c
  SITE (8405): n equals a,t,g, or c
  SITE (8406): n equals a,t,g, or c
  SITE (8407): n equals a,t,g, or c
  SITE (8408): n equals a,t,g, or c
  SITE (8409): n equals a,t,g, or c
  SITE (8410): n equals a,t,g, or c
  SITE (8411): n equals a,t,g, or c
  SITE (8412): n equals a,t,g, or c
  SITE (8413): n equals a,t,g, or c
  SITE (8414): n equals a,t,g, or c
  SITE (8415): n equals a,t,g, or c
  SITE (8416): n equals a,t,g, or c
  SITE (8417): n equals a,t,g, or c
  SITE (8418): n equals a,t,g, or c
  SITE (8419): n equals a,t,g, or c
  SITE (8420): n equals a,t,g, or c
  SITE (8421): n equals a,t,g, or c
  SITE (8422): n equals a,t,g, or c
  SITE (8423): n equals a,t,g, or c
  SITE (8424): n equals a,t,g, or c
  SITE (8425): n equals a,t,g, or c
  SITE (8426): n equals a,t,g, or c
  SITE (8427): n equals a,t,g, or c
  SITE (8428): n equals a,t,g, or c
  SITE (8429): n equals a,t,g, or c
  SITE (8430): n equals a,t,g, or c
  SITE (8431): n equals a,t,g, or c
  SITE (8432): n equals a,t,g, or c
  SITE (8433): n equals a,t,g, or c
  SITE (8434): n equals a,t,g, or c
  SITE (8435): n equals a,t,g, or c
  SITE (8436): n equals a,t,g, or c
  SITE (8437): n equals a,t,g, or c
  SITE (8438): n equals a,t,g, or c
  SITE (8439): n equals a,t,g, or c
  SITE (8440): n equals a,t,g, or c
  SITE (8441): n equals a,t,g, or c
  SITE (8442): n equals a,t,g, or c
  SITE (8443): n equals a,t,g, or c
  SITE (8444): n equals a,t,g, or c
  SITE (8445): n equals a,t,g, or c
  SITE (8446): n equals a,t,g, or c
  SITE (8447): n equals a,t,g, or c
  SITE (8448): n equals a,t,g, or c
  SITE (8449): n equals a,t,g, or c
  SITE (8450): n equals a,t,g, or c
  SITE (8451): n equals a,t,g, or c
  SITE (8452): n equals a,t,g, or c
  SITE (8453): n equals a,t,g, or c
  SITE (8454): n equals a,t,g, or c
  SITE (8455): n equals a,t,g, or c
  SITE (8456): n equals a,t,g, or c
  SITE (8457): n equals a,t,g, or c
  SITE (8458): n equals a,t,g, or c
  SITE (8459): n equals a,t,g, or c
  SITE (8460): n equals a,t,g, or c
  SITE (8461): n equals a,t,g, or c
  SITE (8462): n equals a,t,g, or c
  SITE (8463): n equals a,t,g, or c
  SITE (8464): n equals a,t,g, or c
  SITE (8465): n equals a,t,g, or c
  SITE (8466): n equals a,t,g, or c
  SITE (8467): n equals a,t,g, or c
  SITE (8468): n equals a,t,g, or c
  SITE (8469): n equals a,t,g, or c
  SITE (8470): n equals a,t,g, or c
  SITE (8471): n equals a,t,g, or c
  SITE (8472): n equals a,t,g, or c
  SITE (8473): n equals a,t,g, or c
  SITE (8474): n equals a,t,g, or c
  SITE (8475): n equals a,t,g, or c
  SITE (8476): n equals a,t,g, or c
  SITE (8477): n equals a,t,g, or c
  SITE (8478): n equals a,t,g, or c
  SITE (8479): n equals a,t,g, or c
  SITE (8480): n equals a,t,g, or c
  SITE (8481): n equals a,t,g, or c
  SITE (8482): n equals a,t,g, or c
  SITE (8483): n equals a,t,g, or c
  SITE (8484): n equals a,t,g, or c
  SITE (8485): n equals a,t,g, or c
  SITE (8486): n equals a,t,g, or c
  SITE (8487): n equals a,t,g, or c
  SITE (8488): n equals a,t,g, or c
  SITE (8489): n equals a,t,g, or c
  SITE (8490): n equals a,t,g, or c
  SITE (8491): n equals a,t,g, or c
  SITE (8492): n equals a,t,g, or c
  SITE (8493): n equals a,t,g, or c
  SITE (8494): n equals a,t,g, or c
  SITE (8495): n equals a,t,g, or c
  SITE (8496): n equals a,t,g, or c
  SITE (8497): n equals a,t,g, or c
  SITE (8498): n equals a,t,g, or c
  SITE (8499): n equals a,t,g, or c
  SITE (8500): n equals a,t,g, or c
  SITE (8501): n equals a,t,g, or c
  SITE (8502): n equals a,t,g, or c
  SITE (8503): n equals a,t,g, or c
  SITE (8504): n equals a,t,g, or c
  SITE (8505): n equals a,t,g, or c
  SITE (8506): n equals a,t,g, or c
  SITE (8507): n equals a,t,g, or c
  SITE (8508): n equals a,t,g, or c
  SITE (8509): n equals a,t,g, or c
  SITE (8510): n equals a,t,g, or c
  SITE (8511): n equals a,t,g, or c
  SITE (8512): n equals a,t,g, or c
  SITE (8513): n equals a,t,g, or c
  SITE (8514): n equals a,t,g, or c
  SITE (8515): n equals a,t,g, or c
  SITE (8516): n equals a,t,g, or c
  SITE (8517): n equals a,t,g, or c
  SITE (8518): n equals a,t,g, or c
  SITE (8519): n equals a,t,g, or c
  SITE (8520): n equals a,t,g, or c
  SITE (8521): n equals a,t,g, or c
  SITE (8522): n equals a,t,g, or c
  SITE (8523): n equals a,t,g, or c
  SITE (8524): n equals a,t,g, or c
  SITE (8525): n equals a,t,g, or c
  SITE (8526): n equals a,t,g, or c
  SITE (8527): n equals a,t,g, or c
  SITE (8528): n equals a,t,g, or c
  SITE (8529): n equals a,t,g, or c
  SITE (8530): n equals a,t,g, or c
  SITE (8531): n equals a,t,g, or c
  SITE (8532): n equals a,t,g, or c
  SITE (8533): n equals a,t,g, or c
  SITE (8534): n equals a,t,g, or c
  SITE (8535): n equals a,t,g, or c
  SITE (8536): n equals a,t,g, or c
  SITE (8537): n equals a,t,g, or c
  SITE (8538): n equals a,t,g, or c
  SITE (8539): n equals a,t,g, or c
  SITE (8540): n equals a,t,g, or c
  SITE (8541): n equals a,t,g, or c
  SITE (8542): n equals a,t,g, or c
  SITE (8543): n equals a,t,g, or c
  SITE (8544): n equals a,t,g, or c
  SITE (8545): n equals a,t,g, or c
  SITE (8546): n equals a,t,g, or c
  SITE (8547): n equals a,t,g, or c
  SITE (8548): n equals a,t,g, or c
  SITE (8549): n equals a,t,g, or c
  SITE (8550): n equals a,t,g, or c
  SITE (8551): n equals a,t,g, or c
  SITE (8552): n equals a,t,g, or c
  SITE (8553): n equals a,t,g, or c
  SITE (8554): n equals a,t,g, or c
  SITE (8555): n equals a,t,g, or c
  SITE (8556): n equals a,t,g, or c
  SITE (8557): n equals a,t,g, or c
  SITE (8558): n equals a,t,g, or c
  SITE (8559): n equals a,t,g, or c
  SITE (8560): n equals a,t,g, or c
  SITE (8561): n equals a,t,g, or c
  SITE (8562): n equals a,t,g, or c
  SITE (8563): n equals a,t,g, or c
  SITE (8564): n equals a,t,g, or c
  SITE (8565): n equals a,t,g, or c
  SITE (8566): n equals a,t,g, or c
  SITE (8567): n equals a,t,g, or c
  SITE (8568): n equals a,t,g, or c
  SITE (8569): n equals a,t,g, or c
  SITE (8570): n equals a,t,g, or c
  SITE (8571): n equals a,t,g, or c
  SITE (8572): n equals a,t,g, or c
  SITE (8573): n equals a,t,g, or c
  SITE (8574): n equals a,t,g, or c
  SITE (8575): n equals a,t,g, or c
  SITE (8576): n equals a,t,g, or c
  SITE (8577): n equals a,t,g, or c
  SITE (8578): n equals a,t,g, or c
  SITE (8579): n equals a,t,g, or c
  SITE (8580): n equals a,t,g, or c
  SITE (8581): n equals a,t,g, or c
  SITE (8582): n equals a,t,g, or c
  SITE (8583): n equals a,t,g, or c
  SITE (8584): n equals a,t,g, or c
  SITE (8585): n equals a,t,g, or c
  SITE (8586): n equals a,t,g, or c
  SITE (8587): n equals a,t,g, or c
  SITE (8588): n equals a,t,g, or c
  SITE (8589): n equals a,t,g, or c
  SITE (8590): n equals a,t,g, or c
  SITE (8591): n equals a,t,g, or c
  SITE (8592): n equals a,t,g, or c
  SITE (8593): n equals a,t,g, or c
  SITE (8594): n equals a,t,g, or c
  SITE (8595): n equals a,t,g, or c
  SITE (8596): n equals a,t,g, or c
  SITE (8597): n equals a,t,g, or c
  SITE (8598): n equals a,t,g, or c
  SITE (8599): n equals a,t,g, or c
  SITE (8600): n equals a,t,g, or c
  SITE (8601): n equals a,t,g, or c
  SITE (8602): n equals a,t,g, or c
  SITE (8603): n equals a,t,g, or c
  SITE (8604): n equals a,t,g, or c
  SITE (8605): n equals a,t,g, or c
  SITE (8606): n equals a,t,g, or c
  SITE (8607): n equals a,t,g, or c
  SITE (8608): n equals a,t,g, or c
  SITE (8609): n equals a,t,g, or c
  SITE (8610): n equals a,t,g, or c
  SITE (8611): n equals a,t,g, or c
  SITE (8612): n equals a,t,g, or c
  SITE (8613): n equals a,t,g, or c
  SITE (8614): n equals a,t,g, or c
  SITE (8615): n equals a,t,g, or c
  SITE (8616): n equals a,t,g, or c
  SITE (8617): n equals a,t,g, or c
  SITE (8618): n equals a,t,g, or c
  SITE (8619): n equals a,t,g, or c
  SITE (8620): n equals a,t,g, or c
  SITE (8621): n equals a,t,g, or c
  SITE (8622): n equals a,t,g, or c
  SITE (8623): n equals a,t,g, or c
  SITE (8624): n equals a,t,g, or c
  SITE (8625): n equals a,t,g, or c
  SITE (8626): n equals a,t,g, or c
  SITE (8627): n equals a,t,g, or c
  SITE (8628): n equals a,t,g, or c
  SITE (8629): n equals a,t,g, or c
  SITE (8630): n equals a,t,g, or c
  SITE (8631): n equals a,t,g, or c
  SITE (8632): n equals a,t,g, or c
  SITE (8633): n equals a,t,g, or c
  SITE (8634): n equals a,t,g, or c
  SITE (8635): n equals a,t,g, or c
  SITE (8636): n equals a,t,g, or c
  SITE (8637): n equals a,t,g, or c
  SITE (8638): n equals a,t,g, or c
  SITE (8639): n equals a,t,g, or c
  SITE (8640): n equals a,t,g, or c
  SITE (8641): n equals a,t,g, or c
  SITE (8642): n equals a,t,g, or c
  SITE (8643): n equals a,t,g, or c
  SITE (8644): n equals a,t,g, or c
  SITE (8645): n equals a,t,g, or c
  SITE (8646): n equals a,t,g, or c
  SITE (8647): n equals a,t,g, or c
  SITE (8648): n equals a,t,g, or c
  SITE (8649): n equals a,t,g, or c
  SITE (8650): n equals a,t,g, or c
  SITE (8651): n equals a,t,g, or c
  SITE (8652): n equals a,t,g, or c
  SITE (8653): n equals a,t,g, or c
  SITE (8654): n equals a,t,g, or c
  SITE (8655): n equals a,t,g, or c
  SITE (8656): n equals a,t,g, or c
  SITE (8657): n equals a,t,g, or c
  SITE (8658): n equals a,t,g, or c
  SITE (8659): n equals a,t,g, or c
  SITE (8660): n equals a,t,g, or c
  SITE (8661): n equals a,t,g, or c
  SITE (8662): n equals a,t,g, or c
  SITE (8663): n equals a,t,g, or c
  SITE (8664): n equals a,t,g, or c
  SITE (8665): n equals a,t,g, or c
  SITE (8666): n equals a,t,g, or c
  SITE (8667): n equals a,t,g, or c
  SITE (8668): n equals a,t,g, or c
  SITE (8669): n equals a,t,g, or c
  SITE (8670): n equals a,t,g, or c
  SITE (8671): n equals a,t,g, or c
  SITE (8672): n equals a,t,g, or c
  SITE (8673): n equals a,t,g, or c
  SITE (8674): n equals a,t,g, or c
  SITE (8675): n equals a,t,g, or c
  SITE (8676): n equals a,t,g, or c
  SITE (8677): n equals a,t,g, or c
  SITE (8678): n equals a,t,g, or c
  SITE (8679): n equals a,t,g, or c
  SITE (8680): n equals a,t,g, or c
  SITE (8681): n equals a,t,g, or c
  SITE (8682): n equals a,t,g, or c
  SITE (8683): n equals a,t,g, or c
  SITE (8684): n equals a,t,g, or c
  SITE (8685): n equals a,t,g, or c
  SITE (8686): n equals a,t,g, or c
  SITE (8687): n equals a,t,g, or c
  SITE (8688): n equals a,t,g, or c
  SITE (8689): n equals a,t,g, or c
  SITE (8690): n equals a,t,g, or c
  SITE (8691): n equals a,t,g, or c
  SITE (8692): n equals a,t,g, or c
  SITE (8693): n equals a,t,g, or c
  SITE (8694): n equals a,t,g, or c
  SITE (8695): n equals a,t,g, or c
  SITE (8696): n equals a,t,g, or c
  SITE (8697): n equals a,t,g, or c
  SITE (8698): n equals a,t,g, or c
  SITE (8699): n equals a,t,g, or c
  SITE (8700): n equals a,t,g, or c
  SITE (8701): n equals a,t,g, or c
  SITE (8702): n equals a,t,g, or c
  SITE (8703): n equals a,t,g, or c
  SITE (8704): n equals a,t,g, or c
  SITE (8705): n equals a,t,g, or c
  SITE (8706): n equals a,t,g, or c
  SITE (8707): n equals a,t,g, or c
  SITE (8708): n equals a,t,g, or c
  SITE (8709): n equals a,t,g, or c
  SITE (8710): n equals a,t,g, or c
  SITE (8711): n equals a,t,g, or c
  SITE (8712): n equals a,t,g, or c
  SITE (8713): n equals a,t,g, or c
  SITE (8714): n equals a,t,g, or c
  SITE (8715): n equals a,t,g, or c
  SITE (8716): n equals a,t,g, or c
  SITE (8717): n equals a,t,g, or c
  SITE (8718): n equals a,t,g, or c
  SITE (8719): n equals a,t,g, or c
  SITE (8720): n equals a,t,g, or c
  SITE (8721): n equals a,t,g, or c
  SITE (8722): n equals a,t,g, or c
  SITE (8723): n equals a,t,g, or c
  SITE (8724): n equals a,t,g, or c
  SITE (8725): n equals a,t,g, or c
  SITE (8726): n equals a,t,g, or c
  SITE (8727): n equals a,t,g, or c
  SITE (8728): n equals a,t,g, or c
  SITE (8729): n equals a,t,g, or c
  SITE (8730): n equals a,t,g, or c
  SITE (8731): n equals a,t,g, or c
  SITE (8732): n equals a,t,g, or c
  SITE (8733): n equals a,t,g, or c
  SITE (8734): n equals a,t,g, or c
  SITE (8735): n equals a,t,g, or c
  SITE (8736): n equals a,t,g, or c
  SITE (8737): n equals a,t,g, or c
  SITE (8738): n equals a,t,g, or c
  SITE (8739): n equals a,t,g, or c
  SITE (8740): n equals a,t,g, or c
  SITE (8741): n equals a,t,g, or c
  SITE (8742): n equals a,t,g, or c
  SITE (8743): n equals a,t,g, or c
  SITE (8744): n equals a,t,g, or c
  SITE (8745): n equals a,t,g, or c
  SITE (8746): n equals a,t,g, or c
  SITE (8747): n equals a,t,g, or c
  SITE (8748): n equals a,t,g, or c
  SITE (8749): n equals a,t,g, or c
  SITE (8750): n equals a,t,g, or c
  SITE (8751): n equals a,t,g, or c
  SITE (8752): n equals a,t,g, or c
  SITE (8753): n equals a,t,g, or c
  SITE (8754): n equals a,t,g, or c
  SITE (8755): n equals a,t,g, or c
  SITE (8756): n equals a,t,g, or c
  SITE (8757): n equals a,t,g, or c
  SITE (8758): n equals a,t,g, or c
  SITE (8759): n equals a,t,g, or c
  SITE (8760): n equals a,t,g, or c
  SITE (8761): n equals a,t,g, or c
  SITE (8762): n equals a,t,g, or c
  SITE (8763): n equals a,t,g, or c
  SITE (8764): n equals a,t,g, or c
  SITE (8765): n equals a,t,g, or c
  SITE (8766): n equals a,t,g, or c
  SITE (8767): n equals a,t,g, or c
  SITE (8768): n equals a,t,g, or c
  SITE (8769): n equals a,t,g, or c
  SITE (8770): n equals a,t,g, or c
  SITE (8771): n equals a,t,g, or c
  SITE (8772): n equals a,t,g, or c
  SITE (8773): n equals a,t,g, or c
  SITE (8774): n equals a,t,g, or c
  SITE (8775): n equals a,t,g, or c
  SITE (8776): n equals a,t,g, or c
  SITE (8777): n equals a,t,g, or c
  SITE (8778): n equals a,t,g, or c
  SITE (8779): n equals a,t,g, or c
  SITE (8780): n equals a,t,g, or c
  SITE (8781): n equals a,t,g, or c
  SITE (8782): n equals a,t,g, or c
  SITE (8783): n equals a,t,g, or c
  SITE (8784): n equals a,t,g, or c
  SITE (8785): n equals a,t,g, or c
  SITE (8786): n equals a,t,g, or c
  SITE (8787): n equals a,t,g, or c
  SITE (8788): n equals a,t,g, or c
  SITE (8789): n equals a,t,g, or c
  SITE (8790): n equals a,t,g, or c
  SITE (8791): n equals a,t,g, or c
  SITE (8792): n equals a,t,g, or c
  SITE (8793): n equals a,t,g, or c
  SITE (8794): n equals a,t,g, or c
  SITE (8795): n equals a,t,g, or c
  SITE (8796): n equals a,t,g, or c
  SITE (8797): n equals a,t,g, or c
  SITE (8798): n equals a,t,g, or c
  SITE (8799): n equals a,t,g, or c
  SITE (8800): n equals a,t,g, or c
  SITE (8801): n equals a,t,g, or c
  SITE (8802): n equals a,t,g, or c
  SITE (8803): n equals a,t,g, or c
  SITE (8804): n equals a,t,g, or c
  SITE (8805): n equals a,t,g, or c
  SITE (8806): n equals a,t,g, or c
  SITE (8807): n equals a,t,g, or c
  SITE (8808): n equals a,t,g, or c
  SITE (8809): n equals a,t,g, or c
  SITE (8810): n equals a,t,g, or c
  SITE (8811): n equals a,t,g, or c
  SITE (8812): n equals a,t,g, or c
  SITE (8813): n equals a,t,g, or c
  SITE (8814): n equals a,t,g, or c
  SITE (8815): n equals a,t,g, or c
  SITE (8816): n equals a,t,g, or c
  SITE (8817): n equals a,t,g, or c
  SITE (8818): n equals a,t,g, or c
  SITE (8819): n equals a,t,g, or c
  SITE (8820): n equals a,t,g, or c
  SITE (8821): n equals a,t,g, or c
  SITE (8822): n equals a,t,g, or c
  SITE (8823): n equals a,t,g, or c
  SITE (8824): n equals a,t,g, or c
  SITE (8825): n equals a,t,g, or c
  SITE (8826): n equals a,t,g, or c
  SITE (8827): n equals a,t,g, or c
  SITE (8828): n equals a,t,g, or c
  SITE (8829): n equals a,t,g, or c
  SITE (8830): n equals a,t,g, or c
  SITE (8831): n equals a,t,g, or c
  SITE (8832): n equals a,t,g, or c
  SITE (8833): n equals a,t,g, or c
  SITE (8834): n equals a,t,g, or c
  SITE (8835): n equals a,t,g, or c
  SITE (8836): n equals a,t,g, or c
  SITE (8837): n equals a,t,g, or c
  SITE (8838): n equals a,t,g, or c
  SITE (8839): n equals a,t,g, or c
  SITE (8840): n equals a,t,g, or c
  SITE (8841): n equals a,t,g, or c
  SITE (8842): n equals a,t,g, or c
  SITE (8843): n equals a,t,g, or c
  SITE (8844): n equals a,t,g, or c
  SITE (8845): n equals a,t,g, or c
  SITE (8846): n equals a,t,g, or c
  SITE (8847): n equals a,t,g, or c
  SITE (8848): n equals a,t,g, or c
  SITE (8849): n equals a,t,g, or c
  SITE (8850): n equals a,t,g, or c
  SITE (8851): n equals a,t,g, or c
  SITE (8852): n equals a,t,g, or c
  SITE (8853): n equals a,t,g, or c
  SITE (8854): n equals a,t,g, or c
  SITE (8855): n equals a,t,g, or c
  SITE (8856): n equals a,t,g, or c
  SITE (8857): n equals a,t,g, or c
  SITE (8858): n equals a,t,g, or c
  SITE (8859): n equals a,t,g, or c
  SITE (8860): n equals a,t,g, or c
  SITE (8861): n equals a,t,g, or c
  SITE (8862): n equals a,t,g, or c
  SITE (8863): n equals a,t,g, or c
  SITE (8864): n equals a,t,g, or c
  SITE (8865): n equals a,t,g, or c
  SITE (8866): n equals a,t,g, or c
  SITE (8867): n equals a,t,g, or c
  SITE (8868): n equals a,t,g, or c
  SITE (8869): n equals a,t,g, or c
  SITE (8870): n equals a,t,g, or c
  SITE (8871): n equals a,t,g, or c
  SITE (8872): n equals a,t,g, or c
  SITE (8873): n equals a,t,g, or c
  SITE (8874): n equals a,t,g, or c
  SITE (8875): n equals a,t,g, or c
  SITE (8876): n equals a,t,g, or c
  SITE (8877): n equals a,t,g, or c
  SITE (8878): n equals a,t,g, or c
  SITE (8879): n equals a,t,g, or c
  SITE (8880): n equals a,t,g, or c
  SITE (8881): n equals a,t,g, or c
  SITE (8882): n equals a,t,g, or c
  SITE (8883): n equals a,t,g, or c
  SITE (8884): n equals a,t,g, or c
  SITE (8885): n equals a,t,g, or c
  SITE (8886): n equals a,t,g, or c
  SITE (8887): n equals a,t,g, or c
  SITE (8888): n equals a,t,g, or c
  SITE (8889): n equals a,t,g, or c
  SITE (8890): n equals a,t,g, or c
  SITE (8891): n equals a,t,g, or c
  SITE (8892): n equals a,t,g, or c
  SITE (8893): n equals a,t,g, or c
  SITE (8894): n equals a,t,g, or c
  SITE (8895): n equals a,t,g, or c
  SITE (8896): n equals a,t,g, or c
  SITE (8897): n equals a,t,g, or c
  SITE (8898): n equals a,t,g, or c
  SITE (8899): n equals a,t,g, or c
  SITE (8900): n equals a,t,g, or c
  SITE (8901): n equals a,t,g, or c
  SITE (8902): n equals a,t,g, or c
  SITE (8903): n equals a,t,g, or c
  SITE (8904): n equals a,t,g, or c
  SITE (8905): n equals a,t,g, or c
  SITE (8906): n equals a,t,g, or c
  SITE (8907): n equals a,t,g, or c
  SITE (8908): n equals a,t,g, or c
  SITE (8909): n equals a,t,g, or c
  SITE (8910): n equals a,t,g, or c
  SITE (8911): n equals a,t,g, or c
  SITE (8912): n equals a,t,g, or c
  SITE (8913): n equals a,t,g, or c
  SITE (8914): n equals a,t,g, or c
  SITE (8915): n equals a,t,g, or c
  SITE (8916): n equals a,t,g, or c
  SITE (8917): n equals a,t,g, or c
  SITE (8918): n equals a,t,g, or c
  SITE (8919): n equals a,t,g, or c
  SITE (8920): n equals a,t,g, or c
  SITE (8921): n equals a,t,g, or c
  SITE (8922): n equals a,t,g, or c
  SITE (8923): n equals a,t,g, or c
  SITE (8924): n equals a,t,g, or c
  SITE (8925): n equals a,t,g, or c
  SITE (8926): n equals a,t,g, or c
  SITE (8927): n equals a,t,g, or c
  SITE (8928): n equals a,t,g, or c
  SITE (8929): n equals a,t,g, or c
  SITE (8930): n equals a,t,g, or c
  SITE (8931): n equals a,t,g, or c
  SITE (8932): n equals a,t,g, or c
  SITE (8933): n equals a,t,g, or c
  SITE (8934): n equals a,t,g, or c
  SITE (8935): n equals a,t,g, or c
  SITE (8936): n equals a,t,g, or c
  SITE (8937): n equals a,t,g, or c
  SITE (8938): n equals a,t,g, or c
  SITE (8939): n equals a,t,g, or c
  SITE (8940): n equals a,t,g, or c
  SITE (8941): n equals a,t,g, or c
  SITE (8942): n equals a,t,g, or c
  SITE (8943): n equals a,t,g, or c
  SITE (8944): n equals a,t,g, or c
  SITE (8945): n equals a,t,g, or c
  SITE (8946): n equals a,t,g, or c
  SITE (8947): n equals a,t,g, or c
  SITE (8948): n equals a,t,g, or c
  SITE (8949): n equals a,t,g, or c
  SITE (8950): n equals a,t,g, or c
  SITE (8951): n equals a,t,g, or c
  SITE (8952): n equals a,t,g, or c
  SITE (8953): n equals a,t,g, or c
  SITE (8954): n equals a,t,g, or c
  SITE (8955): n equals a,t,g, or c
  SITE (8956): n equals a,t,g, or c
  SITE (8957): n equals a,t,g, or c
  SITE (8958): n equals a,t,g, or c
  SITE (8959): n equals a,t,g, or c
  SITE (8960): n equals a,t,g, or c
  SITE (8961): n equals a,t,g, or c
  SITE (8962): n equals a,t,g, or c
  SITE (8963): n equals a,t,g, or c
  SITE (8964): n equals a,t,g, or c
  SITE (8965): n equals a,t,g, or c
  SITE (8966): n equals a,t,g, or c
  SITE (8967): n equals a,t,g, or c
  SITE (8968): n equals a,t,g, or c
  SITE (8969): n equals a,t,g, or c
  SITE (8970): n equals a,t,g, or c
  SITE (8971): n equals a,t,g, or c
  SITE (8972): n equals a,t,g, or c
  SITE (8973): n equals a,t,g, or c
  SITE (8974): n equals a,t,g, or c
  SITE (8975): n equals a,t,g, or c
  SITE (8976): n equals a,t,g, or c
  SITE (8977): n equals a,t,g, or c
  SITE (8978): n equals a,t,g, or c
  SITE (8979): n equals a,t,g, or c
  SITE (8980): n equals a,t,g, or c
  SITE (8981): n equals a,t,g, or c
  SITE (8982): n equals a,t,g, or c
  SITE (8983): n equals a,t,g, or c
  SITE (8984): n equals a,t,g, or c
  SITE (8985): n equals a,t,g, or c
  SITE (8986): n equals a,t,g, or c
  SITE (8987): n equals a,t,g, or c
  SITE (8988): n equals a,t,g, or c
  SITE (8989): n equals a,t,g, or c
  SITE (8990): n equals a,t,g, or c
  SITE (8991): n equals a,t,g, or c
  SITE (8992): n equals a,t,g, or c
  SITE (8993): n equals a,t,g, or c
  SITE (8994): n equals a,t,g, or c
  SITE (8995): n equals a,t,g, or c
  SITE (8996): n equals a,t,g, or c
  SITE (8997): n equals a,t,g, or c
  SITE (8998): n equals a,t,g, or c
  SITE (8999): n equals a,t,g, or c
  SITE (9000): n equals a,t,g, or c
  SITE (9001): n equals a,t,g, or c
  SITE (9002): n equals a,t,g, or c
  SITE (9003): n equals a,t,g, or c
  SITE (9004): n equals a,t,g, or c
  SITE (9005): n equals a,t,g, or c
  SITE (9006): n equals a,t,g, or c
  SITE (9007): n equals a,t,g, or c
  SITE (9008): n equals a,t,g, or c
  SITE (9009): n equals a,t,g, or c
  SITE (9010): n equals a,t,g, or c
  SITE (9011): n equals a,t,g, or c
  SITE (9012): n equals a,t,g, or c
  SITE (9013): n equals a,t,g, or c
  SITE (9014): n equals a,t,g, or c
  SITE (9015): n equals a,t,g, or c
  SITE (9016): n equals a,t,g, or c
  SITE (9017): n equals a,t,g, or c
  SITE (9018): n equals a,t,g, or c
  SITE (9019): n equals a,t,g, or c
  SITE (9020): n equals a,t,g, or c
  SITE (9021): n equals a,t,g, or c
  SITE (9022): n equals a,t,g, or c
  SITE (9023): n equals a,t,g, or c
  SITE (9024): n equals a,t,g, or c
  SITE (9025): n equals a,t,g, or c
  SITE (9026): n equals a,t,g, or c
  SITE (9027): n equals a,t,g, or c
  SITE (9028): n equals a,t,g, or c
  SITE (9029): n equals a,t,g, or c
  SITE (9030): n equals a,t,g, or c
  SITE (9031): n equals a,t,g, or c
  SITE (9032): n equals a,t,g, or c
  SITE (9033): n equals a,t,g, or c
  SITE (9034): n equals a,t,g, or c
  SITE (9035): n equals a,t,g, or c
  SITE (9036): n equals a,t,g, or c
  SITE (9037): n equals a,t,g, or c
  SITE (9038): n equals a,t,g, or c
  SITE (9039): n equals a,t,g, or c
  SITE (9040): n equals a,t,g, or c
  SITE (9041): n equals a,t,g, or c
  SITE (9042): n equals a,t,g, or c
  SITE (9043): n equals a,t,g, or c
  SITE (9044): n equals a,t,g, or c
  SITE (9045): n equals a,t,g, or c
  SITE (9046): n equals a,t,g, or c
  SITE (9047): n equals a,t,g, or c
  SITE (9048): n equals a,t,g, or c
  SITE (9049): n equals a,t,g, or c
  SITE (9050): n equals a,t,g, or c
  SITE (9051): n equals a,t,g, or c
  SITE (9052): n equals a,t,g, or c
  SITE (9053): n equals a,t,g, or c
  SITE (9054): n equals a,t,g, or c
  SITE (9055): n equals a,t,g, or c
  SITE (9056): n equals a,t,g, or c
  SITE (9057): n equals a,t,g, or c
  SITE (9058): n equals a,t,g, or c
  SITE (9059): n equals a,t,g, or c
  SITE (9060): n equals a,t,g, or c
  SITE (9061): n equals a,t,g, or c
  SITE (9062): n equals a,t,g, or c
  SITE (9063): n equals a,t,g, or c
  SITE (9064): n equals a,t,g, or c
  SITE (9065): n equals a,t,g, or c
  SITE (9066): n equals a,t,g, or c
  SITE (9067): n equals a,t,g, or c
  SITE (9068): n equals a,t,g, or c
  SITE (9069): n equals a,t,g, or c
  SITE (9070): n equals a,t,g, or c
  SITE (9071): n equals a,t,g, or c
  SITE (9072): n equals a,t,g, or c
  SITE (9073): n equals a,t,g, or c
  SITE (9074): n equals a,t,g, or c
  SITE (9075): n equals a,t,g, or c
  SITE (9076): n equals a,t,g, or c
  SITE (9077): n equals a,t,g, or c
  SITE (9078): n equals a,t,g, or c
  SITE (9079): n equals a,t,g, or c
  SITE (9080): n equals a,t,g, or c
  SITE (9081): n equals a,t,g, or c
  SITE (9082): n equals a,t,g, or c
  SITE (9083): n equals a,t,g, or c
  SITE (9084): n equals a,t,g, or c
  SITE (9085): n equals a,t,g, or c
  SITE (9086): n equals a,t,g, or c
  SITE (9087): n equals a,t,g, or c
  SITE (9088): n equals a,t,g, or c
  SITE (9089): n equals a,t,g, or c
  SITE (9090): n equals a,t,g, or c
  SITE (9091): n equals a,t,g, or c
  SITE (9092): n equals a,t,g, or c
  SITE (9093): n equals a,t,g, or c
  SITE (9094): n equals a,t,g, or c
  SITE (9095): n equals a,t,g, or c
  SITE (9096): n equals a,t,g, or c
  SITE (9097): n equals a,t,g, or c
  SITE (9098): n equals a,t,g, or c
  SITE (9099): n equals a,t,g, or c
  SITE (9100): n equals a,t,g, or c
  SITE (9101): n equals a,t,g, or c
  SITE (9102): n equals a,t,g, or c
  SITE (9103): n equals a,t,g, or c
  SITE (9104): n equals a,t,g, or c
  SITE (9105): n equals a,t,g, or c
  SITE (9106): n equals a,t,g, or c
  SITE (9107): n equals a,t,g, or c
  SITE (9108): n equals a,t,g, or c
  SITE (9109): n equals a,t,g, or c
  SITE (9110): n equals a,t,g, or c
  SITE (9111): n equals a,t,g, or c
  SITE (9112): n equals a,t,g, or c
  SITE (9113): n equals a,t,g, or c
  SITE (9114): n equals a,t,g, or c
  SITE (9115): n equals a,t,g, or c
  SITE (9116): n equals a,t,g, or c
  SITE (9117): n equals a,t,g, or c
  SITE (9118): n equals a,t,g, or c
  SITE (9119): n equals a,t,g, or c
  SITE (9120): n equals a,t,g, or c
  SITE (9121): n equals a,t,g, or c
  SITE (9122): n equals a,t,g, or c
  SITE (9123): n equals a,t,g, or c
  SITE (9124): n equals a,t,g, or c
  SITE (9125): n equals a,t,g, or c
  SITE (9126): n equals a,t,g, or c
  SITE (9127): n equals a,t,g, or c
  SITE (9128): n equals a,t,g, or c
  SITE (9129): n equals a,t,g, or c
  SITE (9130): n equals a,t,g, or c
  SITE (9131): n equals a,t,g, or c
  SITE (9132): n equals a,t,g, or c
  SITE (9133): n equals a,t,g, or c
  SITE (9134): n equals a,t,g, or c
  SITE (9135): n equals a,t,g, or c
  SITE (9136): n equals a,t,g, or c
  SITE (9137): n equals a,t,g, or c
  SITE (9138): n equals a,t,g, or c
  SITE (9139): n equals a,t,g, or c
  SITE (9140): n equals a,t,g, or c
  SITE (9141): n equals a,t,g, or c
  SITE (9142): n equals a,t,g, or c
  SITE (9143): n equals a,t,g, or c
  SITE (9144): n equals a,t,g, or c
  SITE (9145): n equals a,t,g, or c
  SITE (9146): n equals a,t,g, or c
  SITE (9147): n equals a,t,g, or c
  SITE (9148): n equals a,t,g, or c
  SITE (9149): n equals a,t,g, or c
  SITE (9150): n equals a,t,g, or c
  SITE (9151): n equals a,t,g, or c
  SITE (9152): n equals a,t,g, or c
  SITE (9153): n equals a,t,g, or c
  SITE (9154): n equals a,t,g, or c
  SITE (9155): n equals a,t,g, or c
  SITE (9156): n equals a,t,g, or c
  SITE (9157): n equals a,t,g, or c
  SITE (9158): n equals a,t,g, or c
  SITE (9159): n equals a,t,g, or c
  SITE (9160): n equals a,t,g, or c
  SITE (9161): n equals a,t,g, or c
  SITE (9162): n equals a,t,g, or c
  SITE (9163): n equals a,t,g, or c
  SITE (9164): n equals a,t,g, or c
  SITE (9165): n equals a,t,g, or c
  SITE (9166): n equals a,t,g, or c
  SITE (9167): n equals a,t,g, or c
  SITE (9168): n equals a,t,g, or c
  SITE (9169): n equals a,t,g, or c
  SITE (9170): n equals a,t,g, or c
  SITE (9171): n equals a,t,g, or c
  SITE (9172): n equals a,t,g, or c
  SITE (9173): n equals a,t,g, or c
  SITE (9174): n equals a,t,g, or c
  SITE (9175): n equals a,t,g, or c
  SITE (9176): n equals a,t,g, or c
  SITE (9177): n equals a,t,g, or c
  SITE (9178): n equals a,t,g, or c
  SITE (9179): n equals a,t,g, or c
  SITE (9180): n equals a,t,g, or c
  SITE (9181): n equals a,t,g, or c
  SITE (9182): n equals a,t,g, or c
  SITE (9183): n equals a,t,g, or c
  SITE (9184): n equals a,t,g, or c
  SITE (9185): n equals a,t,g, or c
  SITE (9186): n equals a,t,g, or c
  SITE (9187): n equals a,t,g, or c
  SITE (9188): n equals a,t,g, or c
  SITE (9189): n equals a,t,g, or c
  SITE (9190): n equals a,t,g, or c
  SITE (9191): n equals a,t,g, or c
  SITE (9192): n equals a,t,g, or c
  SITE (9193): n equals a,t,g, or c
  SITE (9194): n equals a,t,g, or c
  SITE (9195): n equals a,t,g, or c
  SITE (9196): n equals a,t,g, or c
  SITE (9197): n equals a,t,g, or c
  SITE (9198): n equals a,t,g, or c
  SITE (9199): n equals a,t,g, or c
  SITE (9200): n equals a,t,g, or c
  SITE (9201): n equals a,t,g, or c
  SITE (9202): n equals a,t,g, or c
  SITE (9203): n equals a,t,g, or c
  SITE (9204): n equals a,t,g, or c
  SITE (9205): n equals a,t,g, or c
  SITE (9206): n equals a,t,g, or c
  SITE (9207): n equals a,t,g, or c
  SITE (9208): n equals a,t,g, or c
  SITE (9209): n equals a,t,g, or c
  SITE (9210): n equals a,t,g, or c
  SITE (9211): n equals a,t,g, or c
  SITE (9212): n equals a,t,g, or c
  SITE (9213): n equals a,t,g, or c
  SITE (9214): n equals a,t,g, or c
  SITE (9215): n equals a,t,g, or c
  SITE (9216): n equals a,t,g, or c
  SITE (9217): n equals a,t,g, or c
  SITE (9218): n equals a,t,g, or c
  SITE (9219): n equals a,t,g, or c
  SITE (9220): n equals a,t,g, or c
  SITE (9221): n equals a,t,g, or c
  SITE (9222): n equals a,t,g, or c
  SITE (9223): n equals a,t,g, or c
  SITE (9224): n equals a,t,g, or c
  SITE (9225): n equals a,t,g, or c
  SITE (9226): n equals a,t,g, or c
  SITE (9227): n equals a,t,g, or c
  SITE (9228): n equals a,t,g, or c
  SITE (9229): n equals a,t,g, or c
  SITE (9230): n equals a,t,g, or c
  SITE (9231): n equals a,t,g, or c
  SITE (9232): n equals a,t,g, or c
  SITE (9233): n equals a,t,g, or c
  SITE (9234): n equals a,t,g, or c
  SITE (9235): n equals a,t,g, or c
  SITE (9236): n equals a,t,g, or c
  SITE (9237): n equals a,t,g, or c
  SITE (9238): n equals a,t,g, or c
  SITE (9239): n equals a,t,g, or c
  SITE (9240): n equals a,t,g, or c
  SITE (9241): n equals a,t,g, or c
  SITE (9242): n equals a,t,g, or c
  SITE (9243): n equals a,t,g, or c
  SITE (9244): n equals a,t,g, or c
  SITE (9245): n equals a,t,g, or c
  SITE (9246): n equals a,t,g, or c
  SITE (9247): n equals a,t,g, or c
  SITE (9248): n equals a,t,g, or c
  SITE (9249): n equals a,t,g, or c
  SITE (9250): n equals a,t,g, or c
  SITE (9251): n equals a,t,g, or c
  SITE (9252): n equals a,t,g, or c
  SITE (9253): n equals a,t,g, or c
  SITE (9254): n equals a,t,g, or c
  SITE (9255): n equals a,t,g, or c
  SITE (9256): n equals a,t,g, or c
  SITE (9257): n equals a,t,g, or c
  SITE (9258): n equals a,t,g, or c
  SITE (9259): n equals a,t,g, or c
  SITE (9260): n equals a,t,g, or c
  SITE (9261): n equals a,t,g, or c
  SITE (9262): n equals a,t,g, or c
  SITE (9263): n equals a,t,g, or c
  SITE (9264): n equals a,t,g, or c
  SITE (9265): n equals a,t,g, or c
  SITE (9266): n equals a,t,g, or c
  SITE (9267): n equals a,t,g, or c
  SITE (9268): n equals a,t,g, or c
  SITE (9269): n equals a,t,g, or c
  SITE (9270): n equals a,t,g, or c
  SITE (9271): n equals a,t,g, or c
  SITE (9272): n equals a,t,g, or c
  SITE (9273): n equals a,t,g, or c
  SITE (9274): n equals a,t,g, or c
  SITE (9275): n equals a,t,g, or c
  SITE (9276): n equals a,t,g, or c
  SITE (9277): n equals a,t,g, or c
  SITE (9278): n equals a,t,g, or c
  SITE (9279): n equals a,t,g, or c
  SITE (9280): n equals a,t,g, or c
  SITE (9281): n equals a,t,g, or c
  SITE (9282): n equals a,t,g, or c
  SITE (9283): n equals a,t,g, or c
  SITE (9284): n equals a,t,g, or c
  SITE (9285): n equals a,t,g, or c
  SITE (9286): n equals a,t,g, or c
  SITE (9287): n equals a,t,g, or c
  SITE (9288): n equals a,t,g, or c
  SITE (9289): n equals a,t,g, or c
  SITE (9290): n equals a,t,g, or c
  SITE (9291): n equals a,t,g, or c
  SITE (9292): n equals a,t,g, or c
  SITE (9293): n equals a,t,g, or c
  SITE (9294): n equals a,t,g, or c
  SITE (9295): n equals a,t,g, or c
  SITE (9296): n equals a,t,g, or c
  SITE (9297): n equals a,t,g, or c
  SITE (9298): n equals a,t,g, or c
  SITE (9299): n equals a,t,g, or c
  SITE (9300): n equals a,t,g, or c
  SITE (9301): n equals a,t,g, or c
  SITE (9302): n equals a,t,g, or c
  SITE (9303): n equals a,t,g, or c
  SITE (9304): n equals a,t,g, or c
  SITE (9305): n equals a,t,g, or c
  SITE (9306): n equals a,t,g, or c
  SITE (9307): n equals a,t,g, or c
  SITE (9308): n equals a,t,g, or c
  SITE (9309): n equals a,t,g, or c
  SITE (9310): n equals a,t,g, or c
  SITE (9311): n equals a,t,g, or c
  SITE (9312): n equals a,t,g, or c
  SITE (9313): n equals a,t,g, or c
  SITE (9314): n equals a,t,g, or c
  SITE (9315): n equals a,t,g, or c
  SITE (9316): n equals a,t,g, or c
  SITE (9317): n equals a,t,g, or c
  SITE (9318): n equals a,t,g, or c
  SITE (9319): n equals a,t,g, or c
  SITE (9320): n equals a,t,g, or c
  SITE (9321): n equals a,t,g, or c
  SITE (9322): n equals a,t,g, or c
  SITE (9323): n equals a,t,g, or c
  SITE (9324): n equals a,t,g, or c
  SITE (9325): n equals a,t,g, or c
  SITE (9326): n equals a,t,g, or c
  SITE (9327): n equals a,t,g, or c
  SITE (9328): n equals a,t,g, or c
  SITE (9329): n equals a,t,g, or c
  SITE (9330): n equals a,t,g, or c
  SITE (9331): n equals a,t,g, or c
  SITE (9332): n equals a,t,g, or c
  SITE (9333): n equals a,t,g, or c
  SITE (9334): n equals a,t,g, or c
  SITE (9335): n equals a,t,g, or c
  SITE (9336): n equals a,t,g, or c
  SITE (9337): n equals a,t,g, or c
  SITE (9338): n equals a,t,g, or c
  SITE (9339): n equals a,t,g, or c
  SITE (9340): n equals a,t,g, or c
  SITE (9341): n equals a,t,g, or c
  SITE (9342): n equals a,t,g, or c
  SITE (9343): n equals a,t,g, or c
  SITE (9344): n equals a,t,g, or c
  SITE (9345): n equals a,t,g, or c
  SITE (9346): n equals a,t,g, or c
  SITE (9347): n equals a,t,g, or c
  SITE (9348): n equals a,t,g, or c
  SITE (9349): n equals a,t,g, or c
  SITE (9350): n equals a,t,g, or c
  SITE (9351): n equals a,t,g, or c
  SITE (9352): n equals a,t,g, or c
  SITE (9353): n equals a,t,g, or c
  SITE (9354): n equals a,t,g, or c
  SITE (9355): n equals a,t,g, or c
  SITE (9356): n equals a,t,g, or c
  SITE (9357): n equals a,t,g, or c
  SITE (9358): n equals a,t,g, or c
  SITE (9359): n equals a,t,g, or c
  SITE (9360): n equals a,t,g, or c
  SITE (9361): n equals a,t,g, or c
  SITE (9362): n equals a,t,g, or c
  SITE (9363): n equals a,t,g, or c
  SITE (9364): n equals a,t,g, or c
  SITE (9365): n equals a,t,g, or c
  SITE (9366): n equals a,t,g, or c
  SITE (9367): n equals a,t,g, or c
  SITE (9368): n equals a,t,g, or c
  SITE (9369): n equals a,t,g, or c
  SITE (9370): n equals a,t,g, or c
  SITE (9371): n equals a,t,g, or c
  SITE (9372): n equals a,t,g, or c
  SITE (9373): n equals a,t,g, or c
  SITE (9374): n equals a,t,g, or c
  SITE (9375): n equals a,t,g, or c
  SITE (9376): n equals a,t,g, or c
  SITE (9377): n equals a,t,g, or c
  SITE (9378): n equals a,t,g, or c
  SITE (9379): n equals a,t,g, or c
  SITE (9380): n equals a,t,g, or c
  SITE (9381): n equals a,t,g, or c
  SITE (9382): n equals a,t,g, or c
  SITE (9383): n equals a,t,g, or c
  SITE (9384): n equals a,t,g, or c
  SITE (9385): n equals a,t,g, or c
  SITE (9386): n equals a,t,g, or c
  SITE (9387): n equals a,t,g, or c
  SITE (9388): n equals a,t,g, or c
  SITE (9389): n equals a,t,g, or c
  SITE (9390): n equals a,t,g, or c
  SITE (9391): n equals a,t,g, or c
  SITE (9392): n equals a,t,g, or c
  SITE (9393): n equals a,t,g, or c
  SITE (9394): n equals a,t,g, or c
  SITE (9395): n equals a,t,g, or c
  SITE (9396): n equals a,t,g, or c
  SITE (9397): n equals a,t,g, or c
  SITE (9398): n equals a,t,g, or c
  SITE (9399): n equals a,t,g, or c
  SITE (9400): n equals a,t,g, or c
  SITE (9401): n equals a,t,g, or c
  SITE (9402): n equals a,t,g, or c
  SITE (9403): n equals a,t,g, or c
  SITE (9404): n equals a,t,g, or c
  SITE (9405): n equals a,t,g, or c
  SITE (9406): n equals a,t,g, or c
  SITE (9407): n equals a,t,g, or c
  SITE (9408): n equals a,t,g, or c
  SITE (9409): n equals a,t,g, or c
  SITE (9410): n equals a,t,g, or c
  SITE (9411): n equals a,t,g, or c
  SITE (9412): n equals a,t,g, or c
  SITE (9413): n equals a,t,g, or c
  SITE (9414): n equals a,t,g, or c
  SITE (9415): n equals a,t,g, or c
  SITE (9416): n equals a,t,g, or c

SEQ ID NO: 11730 - DNA, 997 bp, Homo sapiens
gggtaaattcccagagccctggcactcccgtggagcactcaggaaacgctccttcacccctcaattctgctctcacacaccccgtcacacatagactcacatacaccaagcagagaggagcaaagagaaggaccatgtaagacaatcacggacatggcgttagaaggaaactgagaaacgctctacaagagttcgatgtattacattatttttaatttagatgaaattcacataacacaaaatttaccattttaaagtgtacgtacacttcagtggcttttcatatattcacagtgttgtgcaaccactacccctatctagttcaaaaatattttcagttctcccctcctccagcatctgggaagcatccattcaccttccagctctgtggctttgcaggttctagacatttcatgtaaatgcagtcatataatatgtggctttttgtgtctggcttttttcatttagcataatgttttcaaggtttatccatgttgtaacatgtattcttttaaaaaaaattttaatgtgtaaaatatacatatcataacatttaccttttaatcattcataagtacacaaatcagtggcatgaggtggtcccttcccaatgttgtgctgtcatcaccactgtctgttttcagaactttgtcatcatcatccccaacagaaaccctgtacccattaaacagtaactcccggccagacgcggtggctcacgcctgtaatcccagtaattccagcactttgggaggccgaggtgggcggatcacaaggtcaggagatcgagcccatcctggccaacacggtgaaaccccgtctctactaaaaatacaaaaaattagccgggcatcgtggcgcacgcctgtagtcccagctactcgggaggctgaggcaggagaattgcttgaacccaagaagtggagattgcagtgagccaagatcacgccactgcactccaacctgggtgacagagtaagactgtccaaaaaaaaaa

SEQ ID NO: 11731 - DNA, 5088 bp, Homo sapiens; identical to SEQ ID NO: 7545
  SITE (5): n equals a,t,g, or c
  SITE (6): n equals a,t,g, or c
  SITE (7): n equals a,t,g, or c
  SITE (8): n equals a,t,g, or c
  SITE (9): n equals a,t,g, or c
  SITE (10): n equals a,t,g, or c
  SITE (11): n equals a,t,g, or c
  SITE (12): n equals a,t,g, or c
  SITE (13): n equals a,t,g, or c
  SITE (14): n equals a,t,g, or c
  SITE (15): n equals a,t,g, or c
  SITE (16): n equals a,t,g, or c
  SITE (17): n equals a,t,g, or c
  SITE (18): n equals a,t,g, or c
  SITE (19): n equals a,t,g, or c
  SITE (20): n equals a,t,g, or c
  SITE (21): n equals a,t,g, or c
  SITE (22): n equals a,t,g, or c
  SITE (23): n equals a,t,g, or c
  SITE (24): n equals a,t,g, or c
  SITE (25): n equals a,t,g, or c
  SITE (26): n equals a,t,g, or c
  SITE (27): n equals a,t,g, or c
  SITE (28): n equals a,t,g, or c
  SITE (29): n equals a,t,g, or c
  SITE (30): n equals a,t,g, or c
  SITE (31): n equals a,t,g, or c
  SITE (32): n equals a,t,g, or c
  SITE (33): n equals a,t,g, or c
  SITE (34): n equals a,t,g, or c
  SITE (35): n equals a,t,g, or c
  SITE (36): n equals a,t,g, or c
  SITE (37): n equals a,t,g, or c
  SITE (38): n equals a,t,g, or c
  SITE (39): n equals a,t,g, or c
  SITE (40): n equals a,t,g, or c
  SITE (41): n equals a,t,g, or c
  SITE (42): n equals a,t,g, or c
  SITE (43): n equals a,t,g, or c
  SITE (44): n equals a,t,g, or c
  SITE (45): n equals a,t,g, or c
  SITE (46): n equals a,t,g, or c
  SITE (47): n equals a,t,g, or c
  SITE (48): n equals a,t,g, or c
  SITE (49): n equals a,t,g, or c
  SITE (50): n equals a,t,g, or c
  SITE (51): n equals a,t,g, or c
  SITE (52): n equals a,t,g, or c
  SITE (53): n equals a,t,g, or c
  SITE (54): n equals a,t,g, or c
  SITE (55): n equals a,t,g, or c
  SITE (56): n equals a,t,g, or c
  SITE (57): n equals a,t,g, or c
  SITE (58): n equals a,t,g, or c
  SITE (59): n equals a,t,g, or c
  SITE (60): n equals a,t,g, or c
  SITE (61): n equals a,t,g, or c
  SITE (62): n equals a,t,g, or c
  SITE (63): n equals a,t,g, or c
  SITE (64): n equals a,t,g, or c
  SITE (65): n equals a,t,g, or c
  SITE (66): n equals a,t,g, or c
  SITE (67): n equals a,t,g, or c
  SITE (68): n equals a,t,g, or c
  SITE (69): n equals a,t,g, or c
  SITE (70): n equals a,t,g, or c
  SITE (71): n equals a,t,g, or c
  SITE (72): n equals a,t,g, or c
  SITE (73): n equals a,t,g, or c
  SITE (74): n equals a,t,g, or c
  SITE (75): n equals a,t,g, or c
  SITE (76): n equals a,t,g, or c
  SITE (77): n equals a,t,g, or c
  SITE (78): n equals a,t,g, or c
  SITE (79): n equals a,t,g, or c
  SITE (80): n equals a,t,g, or c
  SITE (81): n equals a,t,g, or c
  SITE (82): n equals a,t,g, or c
  SITE (83): n equals a,t,g, or c
  SITE (84): n equals a,t,g, or c
  SITE (85): n equals a,t,g, or c
  SITE (86): n equals a,t,g, or c
  SITE (87): n equals a,t,g, or c
  SITE (88): n equals a,t,g, or c
  SITE (89): n equals a,t,g, or c
  SITE (90): n equals a,t,g, or c
  SITE (91): n equals a,t,g, or c
  SITE (92): n equals a,t,g, or c
  SITE (93): n equals a,t,g, or c
  SITE (94): n equals a,t,g, or c
  SITE (95): n equals a,t,g, or c
  SITE (96): n equals a,t,g, or c
  SITE (97): n equals a,t,g, or c
  SITE (98): n equals a,t,g, or c
  SITE (99): n equals a,t,g, or c
  SITE (100): n equals a,t,g, or c
  SITE (101): n equals a,t,g, or c
  SITE (102): n equals a,t,g, or c
  SITE (103): n equals a,t,g, or c
  SITE (104): n equals a,t,g, or c
  SITE (105): n equals a,t,g, or c
  SITE (106): n equals a,t,g, or c
  SITE (107): n equals a,t,g, or c
  SITE (108): n equals a,t,g, or c
  SITE (109): n equals a,t,g, or c
  SITE (110): n equals a,t,g, or c
  SITE (111): n equals a,t,g, or c
  SITE (112): n equals a,t,g, or c
  SITE (113): n equals a,t,g, or c
  SITE (114): n equals a,t,g, or c
  SITE (115): n equals a,t,g, or c
  SITE (116): n equals a,t,g, or c
  SITE (117): n equals a,t,g, or c
  SITE (118): n equals a,t,g, or c
  SITE (119): n equals a,t,g, or c
  SITE (120): n equals a,t,g, or c
  SITE (121): n equals a,t,g, or c
  SITE (122): n equals a,t,g, or c
  SITE (123): n equals a,t,g, or c
  SITE (124): n equals a,t,g, or c
  SITE (125): n equals a,t,g, or c
  SITE (126): n equals a,t,g, or c
  SITE (127): n equals a,t,g, or c
  SITE (128): n equals a,t,g, or c
  SITE (129): n equals a,t,g, or c
  SITE (130): n equals a,t,g, or c
  SITE (131): n equals a,t,g, or c
  SITE (132): n equals a,t,g, or c
  SITE (133): n equals a,t,g, or c
  SITE (134): n equals a,t,g, or c
  SITE (135): n equals a,t,g, or c
  SITE (136): n equals a,t,g, or c
  SITE (137): n equals a,t,g, or c
  SITE (138): n equals a,t,g, or c
  SITE (139): n equals a,t,g, or c
  SITE (140): n equals a,t,g, or c
  SITE (141): n equals a,t,g, or c
  SITE (142): n equals a,t,g, or c
  SITE (143): n equals a,t,g, or c
  SITE (144): n equals a,t,g, or c
  SITE (145): n equals a,t,g, or c
  SITE (146): n equals a,t,g, or c
  SITE (147): n equals a,t,g, or c
  SITE (148): n equals a,t,g, or c
  SITE (149): n equals a,t,g, or c
  SITE (150): n equals a,t,g, or c
  SITE (151): n equals a,t,g, or c
  SITE (152): n equals a,t,g, or c
  SITE (153): n equals a,t,g, or c
  SITE (154): n equals a,t,g, or c
  SITE (155): n equals a,t,g, or c
  SITE (156): n equals a,t,g, or c
  SITE (157): n equals a,t,g, or c
  SITE (158): n equals a,t,g, or c
  SITE (159): n equals a,t,g, or c
  SITE (160): n equals a,t,g, or c
  SITE (161): n equals a,t,g, or c
  SITE (162): n equals a,t,g, or c
  SITE (163): n equals a,t,g, or c
  SITE (164): n equals a,t,g, or c
  SITE (165): n equals a,t,g, or c
  SITE (166): n equals a,t,g, or c
  SITE (167): n equals a,t,g, or c
  SITE (168): n equals a,t,g, or c
  SITE (169): n equals a,t,g, or c
  SITE (170): n equals a,t,g, or c
  SITE (171): n equals a,t,g, or c
  SITE (172): n equals a,t,g, or c
  SITE (173): n equals a,t,g, or c
  SITE (174): n equals a,t,g, or c
  SITE (175): n equals a,t,g, or c
  SITE (176): n equals a,t,g, or c
  SITE (177): n equals a,t,g, or c
  SITE (178): n equals a,t,g, or c
  SITE (179): n equals a,t,g, or c
  SITE (180): n equals a,t,g, or c
  SITE (181): n equals a,t,g, or c
  SITE (182): n equals a,t,g, or c
  SITE (183): n equals a,t,g, or c
  SITE (184): n equals a,t,g, or c
  SITE (185): n equals a,t,g, or c
  SITE (186): n equals a,t,g, or c
  SITE (187): n equals a,t,g, or c
  SITE (188): n equals a,t,g, or c
  SITE (189): n equals a,t,g, or c
  SITE (190): n equals a,t,g, or c
  SITE (191): n equals a,t,g, or c
  SITE (192): n equals a,t,g, or c
  SITE (193): n equals a,t,g, or c
  SITE (194): n equals a,t,g, or c
  SITE (195): n equals a,t,g, or c
  SITE (196): n equals a,t,g, or c
  SITE (197): n equals a,t,g, or c
  SITE (198): n equals a,t,g, or c
  SITE (199): n equals a,t,g, or c
  SITE (200): n equals a,t,g, or c
  SITE (201): n equals a,t,g, or c
  SITE (202): n equals a,t,g, or c
  SITE (203): n equals a,t,g, or c
  SITE (204): n equals a,t,g, or c
  SITE (205): n equals a,t,g, or c
  SITE (206): n equals a,t,g, or c
  SITE (207): n equals a,t,g, or c
  SITE (208): n equals a,t,g, or c
  SITE (209): n equals a,t,g, or c
  SITE (210): n equals a,t,g, or c
  SITE (211): n equals a,t,g, or c
  SITE (212): n equals a,t,g, or c
  SITE (213): n equals a,t,g, or c
  SITE (214): n equals a,t,g, or c
  SITE (215): n equals a,t,g, or c
  SITE (216): n equals a,t,g, or c
  SITE (217): n equals a,t,g, or c
  SITE (218): n equals a,t,g, or c
  SITE (219): n equals a,t,g, or c
  SITE (220): n equals a,t,g, or c
  SITE (221): n equals a,t,g, or c
  SITE (222): n equals a,t,g, or c
  SITE (223): n equals a,t,g, or c
  SITE (224): n equals a,t,g, or c
  SITE (225): n equals a,t,g, or c
  SITE (226): n equals a,t,g, or c
  SITE (227): n equals a,t,g, or c
  SITE (228): n equals a,t,g, or c
  SITE (229): n equals a,t,g, or c
  SITE (230): n equals a,t,g, or c
  SITE (231): n equals a,t,g, or c
  SITE (232): n equals a,t,g, or c
  SITE (233): n equals a,t,g, or c
  SITE (234): n equals a,t,g, or c
  SITE (235): n equals a,t,g, or c
  SITE (236): n equals a,t,g, or c
  SITE (237): n equals a,t,g, or c
  SITE (238): n equals a,t,g, or c
  SITE (239): n equals a,t,g, or c
  SITE (240): n equals a,t,g, or c
  SITE (241): n equals a,t,g, or c
  SITE (242): n equals a,t,g, or c
  SITE (243): n equals a,t,g, or c
  SITE (244): n equals a,t,g, or c
  SITE (245): n equals a,t,g, or c
  SITE (246): n equals a,t,g, or c
  SITE (247): n equals a,t,g, or c
  SITE (248): n equals a,t,g, or c
  SITE (249): n equals a,t,g, or c
  SITE (250): n equals a,t,g, or c
  SITE (251): n equals a,t,g, or c
  SITE (252): n equals a,t,g, or c
  SITE (253): n equals a,t,g, or c
  SITE (254): n equals a,t,g, or c
  SITE (255): n equals a,t,g, or c
  SITE (256): n equals a,t,g, or c
  SITE (257): n equals a,t,g, or c
  SITE (258): n equals a,t,g, or c
  SITE (259): n equals a,t,g, or c
  SITE (260): n equals a,t,g, or c
  SITE (261): n equals a,t,g, or c
  SITE (262): n equals a,t,g, or c
  SITE (263): n equals a,t,g, or c
  SITE (264): n equals a,t,g, or c
  SITE (265): n equals a,t,g, or c
  SITE (266): n equals a,t,g, or c
  SITE (267): n equals a,t,g, or c
  SITE (268): n equals a,t,g, or c
  SITE (269): n equals a,t,g, or c
  SITE (270): n equals a,t,g, or c
  SITE (271): n equals a,t,g, or c
  SITE (272): n equals a,t,g, or c
  SITE (273): n equals a,t,g, or c
  SITE (274): n equals a,t,g, or c
  SITE (275): n equals a,t,g, or c
  SITE (276): n equals a,t,g, or c
  SITE (277): n equals a,t,g, or c
  SITE (278): n equals a,t,g, or c
  SITE (279): n equals a,t,g, or c
  SITE (280): n equals a,t,g, or c
  SITE (281): n equals a,t,g, or c
  SITE (282): n equals a,t,g, or c
  SITE (283): n equals a,t,g, or c
  SITE (284): n equals a,t,g, or c
  SITE (285): n equals a,t,g, or c
  SITE (286): n equals a,t,g, or c
  SITE (287): n equals a,t,g, or c
  SITE (288): n equals a,t,g, or c
  SITE (289): n equals a,t,g, or c
  SITE (290): n equals a,t,g, or c
  SITE (291): n equals a,t,g, or c
  SITE (292): n equals a,t,g, or c
  SITE (293): n equals a,t,g, or c
  SITE (294): n equals a,t,g, or c
  SITE (295): n equals a,t,g, or c
  SITE (296): n equals a,t,g, or c
  SITE (297): n equals a,t,g, or c
  SITE (298): n equals a,t,g, or c
  SITE (299): n equals a,t,g, or c
  SITE (300): n equals a,t,g, or c
  SITE (301): n equals a,t,g, or c
  SITE (302): n equals a,t,g, or c
  SITE (303): n equals a,t,g, or c
  SITE (304): n equals a,t,g, or c
  SITE (3943): n equals a,t,g, or c
  SITE (3944): n equals a,t,g, or c
  SITE (3945): n equals a,t,g, or c
  SITE (3946): n equals a,t,g, or c
  SITE (3947): n equals a,t,g, or c
  SITE (3948): n equals a,t,g, or c
  SITE (3949): n equals a,t,g, or c
  SITE (3950): n equals a,t,g, or c
  SITE (3951): n equals a,t,g, or c
  SITE (3952): n equals a,t,g, or c
  SITE (3953): n equals a,t,g, or c
  SITE (3954): n equals a,t,g, or c
  SITE (3955): n equals a,t,g, or c
  SITE (3956): n equals a,t,g, or c
  SITE (3957): n equals a,t,g, or c
  SITE (3958): n equals a,t,g, or c
  SITE (3959): n equals a,t,g, or c
  SITE (3960): n equals a,t,g, or c
  SITE (3961): n equals a,t,g, or c
  SITE (3962): n equals a,t,g, or c
  SITE (3963): n equals a,t,g, or c
  SITE (3964): n equals a,t,g, or c
  SITE (3965): n equals a,t,g, or c
  SITE (3966): n equals a,t,g, or c
  SITE (3967): n equals a,t,g, or c
  SITE (3968): n equals a,t,g, or c
  SITE (3969): n equals a,t,g, or c
  SITE (3970): n equals a,t,g, or c
  SITE (3971): n equals a,t,g, or c
  SITE (3972): n equals a,t,g, or c
  SITE (3973): n equals a,t,g, or c
  SITE (3974): n equals a,t,g, or c
  SITE (3975): n equals a,t,g, or c
  SITE (3976): n equals a,t,g, or c
  SITE (3977): n equals a,t,g, or c
  SITE (3978): n equals a,t,g, or c
  SITE (3979): n equals a,t,g, or c
  SITE (3980): n equals a,t,g, or c
  SITE (3981): n equals a,t,g, or c
  SITE (3982): n equals a,t,g, or c
  SITE (3983): n equals a,t,g, or c
  SITE (3984): n equals a,t,g, or c
  SITE (3985): n equals a,t,g, or c
  SITE (3986): n equals a,t,g, or c
  SITE (3987): n equals a,t,g, or c
  SITE (3988): n equals a,t,g, or c
  SITE (3989): n equals a,t,g, or c
  SITE (3990): n equals a,t,g, or c
  SITE (3991): n equals a,t,g, or c
  SITE (3992): n equals a,t,g, or c
  SITE (3993): n equals a,t,g, or c
  SITE (3994): n equals a,t,g, or c
  SITE (3995): n equals a,t,g, or c
  SITE (3996): n equals a,t,g, or c
  SITE (3997): n equals a,t,g, or c
  SITE (3998): n equals a,t,g, or c
  SITE (3999): n equals a,t,g, or c
  SITE (4000): n equals a,t,g, or c
  SITE (4001): n equals a,t,g, or c
  SITE (4002): n equals a,t,g, or c
  SITE (4003): n equals a,t,g, or c
  SITE (4004): n equals a,t,g, or c
  SITE (4005): n equals a,t,g, or c
  SITE (4006): n equals a,t,g, or c
  SITE (4007): n equals a,t,g, or c
  SITE (4008): n equals a,t,g, or c
  SITE (4009): n equals a,t,g, or c
  SITE (4010): n equals a,t,g, or c
  SITE (4011): n equals a,t,g, or c
  SITE (4012): n equals a,t,g, or c
  SITE (4013): n equals a,t,g, or c
  SITE (4014): n equals a,t,g, or c
  SITE (4015): n equals a,t,g, or c
  SITE (4016): n equals a,t,g, or c
  SITE (4017): n equals a,t,g, or c
  SITE (4018): n equals a,t,g, or c
  SITE (4019): n equals a,t,g, or c
  SITE (4020): n equals a,t,g, or c
  SITE (4021): n equals a,t,g, or c
  SITE (4022): n equals a,t,g, or c
  SITE (4023): n equals a,t,g, or c
  SITE (4024): n equals a,t,g, or c
  SITE (4025): n equals a,t,g, or c
  SITE (4026): n equals a,t,g, or c
  SITE (4027): n equals a,t,g, or c
  SITE (4028): n equals a,t,g, or c
  SITE (4029): n equals a,t,g, or c
  SITE (4030): n equals a,t,g, or c
  SITE (4031): n equals a,t,g, or c
  SITE (4032): n equals a,t,g, or c
  SITE (4033): n equals a,t,g, or c
  SITE (4034): n equals a,t,g, or c
  SITE (4035): n equals a,t,g, or c
  SITE (4036): n equals a,t,g, or c
  SITE (4037): n equals a,t,g, or c
  SITE (4038): n equals a,t,g, or c
  SITE (4039): n equals a,t,g, or c
  SITE (4040): n equals a,t,g, or c
  SITE (4041): n equals a,t,g, or c
  SITE (4042): n equals a,t,g, or c
  SITE (4043): n equals a,t,g, or c
  SITE (4044): n equals a,t,g, or c
  SITE (4045): n equals a,t,g, or c
  SITE (4046): n equals a,t,g, or c
  SITE (4047): n equals a,t,g, or c
  SITE (4048): n equals a,t,g, or c
  SITE (4049): n equals a,t,g, or c
  SITE (4050): n equals a,t,g, or c
  SITE (4051): n equals a,t,g, or c
  SITE (4052): n equals a,t,g, or c
  SITE (4053): n equals a,t,g, or c
  SITE (4054): n equals a,t,g, or c
  SITE (4055): n equals a,t,g, or c
  SITE (4056): n equals a,t,g, or c
  SITE (4057): n equals a,t,g, or c
  SITE (4058): n equals a,t,g, or c
  SITE (4059): n equals a,t,g, or c
  SITE (4060): n equals a,t,g, or c
  SITE (4061): n equals a,t,g, or c
  SITE (4062): n equals a,t,g, or c
  SITE (4063): n equals a,t,g, or c
  SITE (4064): n equals a,t,g, or c
  SITE (4065): n equals a,t,g, or c
  SITE (4066): n equals a,t,g, or c
  SITE (4067): n equals a,t,g, or c
  SITE (4068): n equals a,t,g, or c
  SITE (4069): n equals a,t,g, or c
  SITE (4070): n equals a,t,g, or c
  SITE (4071): n equals a,t,g, or c
  SITE (4072): n equals a,t,g, or c
  SITE (4073): n equals a,t,g, or c
  SITE (4074): n equals a,t,g, or c
  SITE (4075): n equals a,t,g, or c
  SITE (4076): n equals a,t,g, or c
  SITE (4077): n equals a,t,g, or c
  SITE (4078): n equals a,t,g, or c
  SITE (4079): n equals a,t,g, or c
  SITE (4080): n equals a,t,g, or c
  SITE (4081): n equals a,t,g, or c
  SITE (4082): n equals a,t,g, or c
  SITE (4083): n equals a,t,g, or c
  SITE (4084): n equals a,t,g, or c
  SITE (4085): n equals a,t,g, or c
  SITE (4086): n equals a,t,g, or c
  SITE (4087): n equals a,t,g, or c
  SITE (4088): n equals a,t,g, or c
  SITE (4089): n equals a,t,g, or c
  SITE (4090): n equals a,t,g, or c
  SITE (4091): n equals a,t,g, or c
  SITE (4092): n equals a,t,g, or c
  SITE (4093): n equals a,t,g, or c
  SITE (4094): n equals a,t,g, or c
  SITE (4095): n equals a,t,g, or c
  SITE (4096): n equals a,t,g, or c
  SITE (4097): n equals a,t,g, or c
  SITE (4098): n equals a,t,g, or c
  SITE (4099): n equals a,t,g, or c
  SITE (4100): n equals a,t,g, or c
  SITE (4101): n equals a,t,g, or c
  SITE (4102): n equals a,t,g, or c
  SITE (4103): n equals a,t,g, or c
  SITE (4104): n equals a,t,g, or c
  SITE (4105): n equals a,t,g, or c
  SITE (4106): n equals a,t,g, or c
  SITE (4107): n equals a,t,g, or c
  SITE (4108): n equals a,t,g, or c
  SITE (4109): n equals a,t,g, or c
  SITE (4110): n equals a,t,g, or c
  SITE (4111): n equals a,t,g, or c
  SITE (4112): n equals a,t,g, or c
  SITE (4113): n equals a,t,g, or c
  SITE (4114): n equals a,t,g, or c
  SITE (4115): n equals a,t,g, or c
  SITE (4116): n equals a,t,g, or c
  SITE (4117): n equals a,t,g, or c
  SITE (4118): n equals a,t,g, or c
  SITE (4119): n equals a,t,g, or c
  SITE (4120): n equals a,t,g, or c
  SITE (4121): n equals a,t,g, or c
  SITE (4122): n equals a,t,g, or c
  SITE (4123): n equals a,t,g, or c
  SITE (4124): n equals a,t,g, or c
  SITE (4125): n equals a,t,g, or c
  SITE (4126): n equals a,t,g, or c
  SITE (4127): n equals a,t,g, or c
  SITE (4128): n equals a,t,g, or c
  SITE (4129): n equals a,t,g, or c
  SITE (4130): n equals a,t,g, or c
  SITE (4131): n equals a,t,g, or c
  SITE (4132): n equals a,t,g, or c
  SITE (4133): n equals a,t,g, or c
  SITE (4134): n equals a,t,g, or c
  SITE (4135): n equals a,t,g, or c
  SITE (4136): n equals a,t,g, or c
  SITE (4137): n equals a,t,g, or c
  SITE (4138): n equals a,t,g, or c
  SITE (4139): n equals a,t,g, or c
  SITE (4140): n equals a,t,g, or c
  SITE (4141): n equals a,t,g, or c
  SITE (4142): n equals a,t,g, or c
  SITE (4143): n equals a,t,g, or c
  SITE (4144): n equals a,t,g, or c
  SITE (4145): n equals a,t,g, or c
  SITE (4146): n equals a,t,g, or c
  SITE (4147): n equals a,t,g, or c
  SITE (4148): n equals a,t,g, or c
  SITE (4149): n equals a,t,g, or c
  SITE (4150): n equals a,t,g, or c
  SITE (4151): n equals a,t,g, or c
  SITE (4152): n equals a,t,g, or c
  SITE (4153): n equals a,t,g, or c
  SITE (4154): n equals a,t,g, or c
  SITE (4155): n equals a,t,g, or c
  SITE (4156): n equals a,t,g, or c
  SITE (4157): n equals a,t,g, or c
  SITE (4158): n equals a,t,g, or c
  SITE (4159): n equals a,t,g, or c
  SITE (4160): n equals a,t,g, or c
  SITE (4161): n equals a,t,g, or c
  SITE (4162): n equals a,t,g, or c
  SITE (4163): n equals a,t,g, or c
  SITE (4164): n equals a,t,g, or c
  SITE (4165): n equals a,t,g, or c
  SITE (4166): n equals a,t,g, or c
  SITE (4167): n equals a,t,g, or c
  SITE (4168): n equals a,t,g, or c
  SITE (4169): n equals a,t,g, or c
  SITE (4170): n equals a,t,g, or c
  SITE (4171): n equals a,t,g, or c
  SITE (4172): n equals a,t,g, or c
  SITE (4173): n equals a,t,g, or c
  SITE (4174): n equals a,t,g, or c
  SITE (4175): n equals a,t,g, or c
  SITE (4176): n equals a,t,g, or c
  SITE (4177): n equals a,t,g, or c
  SITE (4178): n equals a,t,g, or c
  SITE (4179): n equals a,t,g, or c
  SITE (4180): n equals a,t,g, or c
  SITE (4181): n equals a,t,g, or c
  SITE (4182): n equals a,t,g, or c
  SITE (4183): n equals a,t,g, or c
  SITE (4184): n equals a,t,g, or c
  SITE (4185): n equals a,t,g, or c
  SITE (4186): n equals a,t,g, or c
  SITE (4187): n equals a,t,g, or c
  SITE (4188): n equals a,t,g, or c
  SITE (4189): n equals a,t,g, or c
  SITE (4190): n equals a,t,g, or c
  SITE (4191): n equals a,t,g, or c
  SITE (4192): n equals a,t,g, or c
  SITE (4193): n equals a,t,g, or c
  SITE (4194): n equals a,t,g, or c
  SITE (4195): n equals a,t,g, or c
  SITE (4196): n equals a,t,g, or c
  SITE (4197): n equals a,t,g, or c
  SITE (4198): n equals a,t,g, or c
  SITE (4199): n equals a,t,g, or c
  SITE (4200): n equals a,t,g, or c
  SITE (4201): n equals a,t,g, or c
  SITE (4202): n equals a,t,g, or c
  SITE (4203): n equals a,t,g, or c
  SITE (4204): n equals a,t,g, or c
  SITE (4205): n equals a,t,g, or c
  SITE (4206): n equals a,t,g, or c
  SITE (4207): n equals a,t,g, or c
  SITE (4208): n equals a,t,g, or c
  SITE (4209): n equals a,t,g, or c
  SITE (4210): n equals a,t,g, or c
  SITE (4211): n equals a,t,g, or c
  SITE (4212): n equals a,t,g, or c
  SITE (4213): n equals a,t,g, or c
  SITE (4214): n equals a,t,g, or c
  SITE (4215): n equals a,t,g, or c
  SITE (4216): n equals a,t,g, or c
  SITE (4217): n equals a,t,g, or c
  SITE (4218): n equals a,t,g, or c
  SITE (4219): n equals a,t,g, or c
  SITE (4220): n equals a,t,g, or c
  SITE (4221): n equals a,t,g, or c
  SITE (4222): n equals a,t,g, or c
  SITE (4223): n equals a,t,g, or c
  SITE (4224): n equals a,t,g, or c
  SITE (4225): n equals a,t,g, or c
  SITE (4226): n equals a,t,g, or c
  SITE (4227): n equals a,t,g, or c
  SITE (4228): n equals a,t,g, or c
  SITE (4229): n equals a,t,g, or c
  SITE (4230): n equals a,t,g, or c
  SITE (4231): n equals a,t,g, or c
  SITE (4232): n equals a,t,g, or c
  SITE (4233): n equals a,t,g, or c
  SITE (4234): n equals a,t,g, or c
  SITE (4235): n equals a,t,g, or c
  SITE (4236): n equals a,t,g, or c
  SITE (4237): n equals a,t,g, or c
  SITE (4238): n equals a,t,g, or c
  SITE (4239): n equals a,t,g, or c
  SITE (4240): n equals a,t,g, or c
  SITE (4241): n equals a,t,g, or c
  SITE (4242): n equals a,t,g, or c
  SITE (4243): n equals a,t,g, or c
  SITE (4244): n equals a,t,g, or c
  SITE (4245): n equals a,t,g, or c
  SITE (4246): n equals a,t,g, or c
  SITE (4247): n equals a,t,g, or c
  SITE (4248): n equals a,t,g, or c
  SITE (4249): n equals a,t,g, or c
  SITE (4250): n equals a,t,g, or c
  SITE (4251): n equals a,t,g, or c
  SITE (4252): n equals a,t,g, or c
  SITE (4253): n equals a,t,g, or c
  SITE (4254): n equals a,t,g, or c
  SITE (4255): n equals a,t,g, or c
  SITE (4256): n equals a,t,g, or c
  SITE (4257): n equals a,t,g, or c
  SITE (4258): n equals a,t,g, or c
  SITE (4259): n equals a,t,g, or c
  SITE (4260): n equals a,t,g, or c
  SITE (4261): n equals a,t,g, or c
  SITE (4262): n equals a,t,g, or c
  SITE (4263): n equals a,t,g, or c
  SITE (4264): n equals a,t,g, or c
  SITE (4265): n equals a,t,g, or c
  SITE (4266): n equals a,t,g, or c
  SITE (4267): n equals a,t,g, or c
  SITE (4268): n equals a,t,g, or c
  SITE (4269): n equals a,t,g, or c
  SITE (4270): n equals a,t,g, or c
  SITE (4271): n equals a,t,g, or c
  SITE (4272): n equals a,t,g, or c
  SITE (4273): n equals a,t,g, or c
  SITE (4274): n equals a,t,g, or c
  SITE (4275): n equals a,t,g, or c
  SITE (4276): n equals a,t,g, or c
  SITE (4277): n equals a,t,g, or c
  SITE (4278): n equals a,t,g, or c
  SITE (4279): n equals a,t,g, or c
  SITE (4280): n equals a,t,g, or c
  SITE (4281): n equals a,t,g, or c
  SITE (4282): n equals a,t,g, or c
  SITE (4283): n equals a,t,g, or c
  SITE (4284): n equals a,t,g, or c
  SITE (4285): n equals a,t,g, or c
  SITE (4286): n equals a,t,g, or c
  SITE (4287): n equals a,t,g, or c
  SITE (4288): n equals a,t,g, or c
  SITE (4289): n equals a,t,g, or c
  SITE (4290): n equals a,t,g, or c
  SITE (4291): n equals a,t,g, or c
  SITE (4292): n equals a,t,g, or c
  SITE (4293): n equals a,t,g, or c
  SITE (4294): n equals a,t,g, or c
  SITE (4295): n equals a,t,g, or c
  SITE (4296): n equals a,t,g, or c
  SITE (4297): n equals a,t,g, or c
  SITE (4298): n equals a,t,g, or c
  SITE (4299): n equals a,t,g, or c
  SITE (4300): n equals a,t,g, or c
  SITE (4301): n equals a,t,g, or c
  SITE (4302): n equals a,t,g, or c
  SITE (4303): n equals a,t,g, or c
  SITE (4304): n equals a,t,g, or c
  SITE (4305): n equals a,t,g, or c
  SITE (4306): n equals a,t,g, or c
  SITE (4307): n equals a,t,g, or c
  SITE (4308): n equals a,t,g, or c
  SITE (4309): n equals a,t,g, or c
  SITE (4310): n equals a,t,g, or c
  SITE (4311): n equals a,t,g, or c
  SITE (4312): n equals a,t,g, or c
  SITE (4313): n equals a,t,g, or c
  SITE (4314): n equals a,t,g, or c
  SITE (4315): n equals a,t,g, or c
  SITE (4316): n equals a,t,g, or c
  SITE (4317): n equals a,t,g, or c
  SITE (4318): n equals a,t,g, or c
  SITE (4319): n equals a,t,g, or c
  SITE (4320): n equals a,t,g, or c
  SITE (4321): n equals a,t,g, or c
  SITE (4322): n equals a,t,g, or c
  SITE (4323): n equals a,t,g, or c
  SITE (4324): n equals a,t,g, or c
  SITE (4325): n equals a,t,g, or c
  SITE (4326): n equals a,t,g, or c
  SITE (4327): n equals a,t,g, or c
  SITE (4328): n equals a,t,g, or c
  SITE (4329): n equals a,t,g, or c
  SITE (4330): n equals a,t,g, or c
  SITE (4331): n equals a,t,g, or c
  SITE (4332): n equals a,t,g, or c
  SITE (4333): n equals a,t,g, or c
  SITE (4334): n equals a,t,g, or c
  SITE (4335): n equals a,t,g, or c
  SITE (4336): n equals a,t,g, or c
  SITE (4337): n equals a,t,g, or c
  SITE (4338): n equals a,t,g, or c
  SITE (4339): n equals a,t,g, or c
  SITE (4340): n equals a,t,g, or c
  SITE (4341): n equals a,t,g, or c
  SITE (4342): n equals a,t,g, or c
  SITE (4343): n equals a,t,g, or c
  SITE (4344): n equals a,t,g, or c
  SITE (4345): n equals a,t,g, or c
  SITE (4346): n equals a,t,g, or c
  SITE (4347): n equals a,t,g, or c
  SITE (4348): n equals a,t,g, or c
  SITE (4349): n equals a,t,g, or c
  SITE (4350): n equals a,t,g, or c
  SITE (4351): n equals a,t,g, or c
  SITE (4352): n equals a,t,g, or c
  SITE (4353): n equals a,t,g, or c
  SITE (4354): n equals a,t,g, or c
  SITE (4355): n equals a,t,g, or c
  SITE (4356): n equals a,t,g, or c
  SITE (4357): n equals a,t,g, or c
  SITE (4358): n equals a,t,g, or c
  SITE (4359): n equals a,t,g, or c
  SITE (4360): n equals a,t,g, or c
  SITE (4361): n equals a,t,g, or c
  SITE (4362): n equals a,t,g, or c
  SITE (4363): n equals a,t,g, or c
  SITE (4364): n equals a,t,g, or c
  SITE (4365): n equals a,t,g, or c
  SITE (4366): n equals a,t,g, or c
  SITE (4367): n equals a,t,g, or c
  SITE (4368): n equals a,t,g, or c
  SITE (4369): n equals a,t,g, or c
  SITE (4370): n equals a,t,g, or c
  SITE (4371): n equals a,t,g, or c
  SITE (4372): n equals a,t,g, or c
  SITE (4373): n equals a,t,g, or c
  SITE (4374): n equals a,t,g, or c
  SITE (4375): n equals a,t,g, or c
  SITE (4376): n equals a,t,g, or c
  SITE (4377): n equals a,t,g, or c
  SITE (4378): n equals a,t,g, or c
  SITE (4379): n equals a,t,g, or c
  SITE (4380): n equals a,t,g, or c
  SITE (4381): n equals a,t,g, or c
  SITE (4382): n equals a,t,g, or c
  SITE (4383): n equals a,t,g, or c
  SITE (4384): n equals a,t,g, or c
  SITE (4385): n equals a,t,g, or c
  SITE (4386): n equals a,t,g, or c
  SITE (4387): n equals a,t,g, or c
  SITE (4388): n equals a,t,g, or c
  SITE (4389): n equals a,t,g, or c
  SITE (4390): n equals a,t,g, or c
  SITE (4391): n equals a,t,g, or c
  SITE (4392): n equals a,t,g, or c
  SITE (4393): n equals a,t,g, or c
  SITE (4394): n equals a,t,g, or c
  SITE (4395): n equals a,t,g, or c
  SITE (4396): n equals a,t,g, or c
  SITE (4397): n equals a,t,g, or c
  SITE (4398): n equals a,t,g, or c
  SITE (4399): n equals a,t,g, or c
  SITE (4400): n equals a,t,g, or c
  SITE (4401): n equals a,t,g, or c
  SITE (4402): n equals a,t,g, or c
  SITE (4403): n equals a,t,g, or c
  SITE (4404): n equals a,t,g, or c
  SITE (4405): n equals a,t,g, or c
  SITE (4406): n equals a,t,g, or c
  SITE (4407): n equals a,t,g, or c
  SITE (4408): n equals a,t,g, or c
  SITE (4409): n equals a,t,g, or c
  SITE (4410): n equals a,t,g, or c
  SITE (4411): n equals a,t,g, or c
  SITE (4412): n equals a,t,g, or c
  SITE (4413): n equals a,t,g, or c
  SITE (4414): n equals a,t,g, or c
  SITE (4415): n equals a,t,g, or c
  SITE (4416): n equals a,t,g, or c
  SITE (4417): n equals a,t,g, or c
  SITE (4418): n equals a,t,g, or c
  SITE (4419): n equals a,t,g, or c
  SITE (4420): n equals a,t,g, or c
  SITE (4421): n equals a,t,g, or c
  SITE (4422): n equals a,t,g, or c
  SITE (4423): n equals a,t,g, or c
  SITE (4424): n equals a,t,g, or c
  SITE (4425): n equals a,t,g, or c
  SITE (4426): n equals a,t,g, or c
  SITE (4427): n equals a,t,g, or c
  SITE (4428): n equals a,t,g, or c
  SITE (4429): n equals a,t,g, or c
  SITE (4430): n equals a,t,g, or c
  SITE (4431): n equals a,t,g, or c
  SITE (4432): n equals a,t,g, or c
  SITE (4433): n equals a,t,g, or c
  SITE (4434): n equals a,t,g, or c
  SITE (4435): n equals a,t,g, or c
  SITE (4436): n equals a,t,g, or c
  SITE (4437): n equals a,t,g, or c
  SITE (4438): n equals a,t,g, or c
  SITE (4439): n equals a,t,g, or c
  SITE (4440): n equals a,t,g, or c
  SITE (4441): n equals a,t,g, or c
  SITE (4442): n equals a,t,g, or c
  SITE (4443): n equals a,t,g, or c
  SITE (4444): n equals a,t,g, or c
  SITE (4445): n equals a,t,g, or c
  SITE (4446): n equals a,t,g, or c
  SITE (4447): n equals a,t,g, or c
  SITE (4448): n equals a,t,g, or c
  SITE (4449): n equals a,t,g, or c
  SITE (4450): n equals a,t,g, or c
  SITE (4451): n equals a,t,g, or c
  SITE (4452): n equals a,t,g, or c
  SITE (4453): n equals a,t,g, or c
  SITE (4454): n equals a,t,g, or c
  SITE (4455): n equals a,t,g, or c
  SITE (4456): n equals a,t,g, or c
  SITE (4457): n equals a,t,g, or c
  SITE (4458): n equals a,t,g, or c
  SITE (4459): n equals a,t,g, or c
  SITE (4460): n equals a,t,g, or c
  SITE (4461): n equals a,t,g, or c
  SITE (4462): n equals a,t,g, or c
  SITE (4463): n equals a,t,g, or c
  SITE (4464): n equals a,t,g, or c
  SITE (4465): n equals a,t,g, or c
  SITE (4466): n equals a,t,g, or c
  SITE (4467): n equals a,t,g, or c
  SITE (4468): n equals a,t,g, or c
  SITE (4469): n equals a,t,g, or c
  SITE (4470): n equals a,t,g, or c
  SITE (4471): n equals a,t,g, or c
  SITE (4472): n equals a,t,g, or c
  SITE (4473): n equals a,t,g, or c
  SITE (4474): n equals a,t,g, or c
  SITE (4475): n equals a,t,g, or c
  SITE (4476): n equals a,t,g, or c
  SITE (4477): n equals a,t,g, or c
  SITE (4478): n equals a,t,g, or c
  SITE (4479): n equals a,t,g, or c
  SITE (4480): n equals a,t,g, or c
  SITE (4481): n equals a,t,g, or c
  SITE (4482): n equals a,t,g, or c
  SITE (4483): n equals a,t,g, or c
  SITE (4484): n equals a,t,g, or c
  SITE (4485): n equals a,t,g, or c
  SITE (4486): n equals a,t,g, or c
  SITE (4487): n equals a,t,g, or c
  SITE (4488): n equals a,t,g, or c
  SITE (4489): n equals a,t,g, or c
  SITE (4490): n equals a,t,g, or c
  SITE (4491): n equals a,t,g, or c
  SITE (4492): n equals a,t,g, or c
  SITE (4493): n equals a,t,g, or c
  SITE (4494): n equals a,t,g, or c
  SITE (4495): n equals a,t,g, or c
  SITE (4496): n equals a,t,g, or c
  SITE (4497): n equals a,t,g, or c
  SITE (4498): n equals a,t,g, or c
  SITE (4499): n equals a,t,g, or c
  SITE (4500): n equals a,t,g, or c
  SITE (4501): n equals a,t,g, or c
  SITE (4502): n equals a,t,g, or c
  SITE (4503): n equals a,t,g, or c
  SITE (4504): n equals a,t,g, or c
  SITE (4505): n equals a,t,g, or c
  SITE (4506): n equals a,t,g, or c
  SITE (4507): n equals a,t,g, or c
  SITE (4508): n equals a,t,g, or c
  SITE (4509): n equals a,t,g, or c
  SITE (4510): n equals a,t,g, or c
  SITE (4511): n equals a,t,g, or c
  SITE (4512): n equals a,t,g, or c
  SITE (4513): n equals a,t,g, or c
  SITE (4514): n equals a,t,g, or c
  SITE (4515): n equals a,t,g, or c
  SITE (4516): n equals a,t,g, or c
  SITE (4517): n equals a,t,g, or c
  SITE (4518): n equals a,t,g, or c
  SITE (4519): n equals a,t,g, or c
  SITE (4520): n equals a,t,g, or c
  SITE (4521): n equals a,t,g, or c
  SITE (4522): n equals a,t,g, or c
  SITE (4523): n equals a,t,g, or c
  SITE (4524): n equals a,t,g, or c
  SITE (4525): n equals a,t,g, or c
  SITE (4526): n equals a,t,g, or c
  SITE (4527): n equals a,t,g, or c
  SITE (4528): n equals a,t,g, or c
  SITE (4529): n equals a,t,g, or c
  SITE (4530): n equals a,t,g, or c
  SITE (4531): n equals a,t,g, or c
  SITE (4532): n equals a,t,g, or c
  SITE (4533): n equals a,t,g, or c
  SITE (4534): n equals a,t,g, or c
  SITE (4535): n equals a,t,g, or c
  SITE (4536): n equals a,t,g, or c
  SITE (4537): n equals a,t,g, or c
  SITE (4538): n equals a,t,g, or c
  SITE (4539): n equals a,t,g, or c
  SITE (4540): n equals a,t,g, or c
  SITE (4541): n equals a,t,g, or c
  SITE (4542): n equals a,t,g, or c
  SITE (4543): n equals a,t,g, or c
  SITE (4544): n equals a,t,g, or c
  SITE (4545): n equals a,t,g, or c
  SITE (4546): n equals a,t,g, or c
  SITE (4547): n equals a,t,g, or c
  SITE (4548): n equals a,t,g, or c
  SITE (4549): n equals a,t,g, or c
  SITE (4550): n equals a,t,g, or c
  SITE (4551): n equals a,t,g, or c
  SITE (4552): n equals a,t,g, or c
  SITE (4553): n equals a,t,g, or c
  SITE (4554): n equals a,t,g, or c
  SITE (4555): n equals a,t,g, or c
  SITE (4556): n equals a,t,g, or c
  SITE (4557): n equals a,t,g, or c
  SITE (4558): n equals a,t,g, or c
  SITE (4559): n equals a,t,g, or c
  SITE (4560): n equals a,t,g, or c
  SITE (4561): n equals a,t,g, or c
  SITE (4562): n equals a,t,g, or c
  SITE (4563): n equals a,t,g, or c
  SITE (4564): n equals a,t,g, or c
  SITE (4565): n equals a,t,g, or c
  SITE (4566): n equals a,t,g, or c
  SITE (4567): n equals a,t,g, or c
  SITE (4568): n equals a,t,g, or c
  SITE (4569): n equals a,t,g, or c
  SITE (4570): n equals a,t,g, or c
  SITE (4571): n equals a,t,g, or c
  SITE (4572): n equals a,t,g, or c
  SITE (4573): n equals a,t,g, or c
  SITE (4574): n equals a,t,g, or c
  SITE (4575): n equals a,t,g, or c
  SITE (4576): n equals a,t,g, or c
  SITE (4577): n equals a,t,g, or c
  SITE (4578): n equals a,t,g, or c
  SITE (4579): n equals a,t,g, or c
  SITE (4580): n equals a,t,g, or c
  SITE (4581): n equals a,t,g, or c
  SITE (4582): n equals a,t,g, or c
  SITE (4583): n equals a,t,g, or c
  SITE (4584): n equals a,t,g, or c
  SITE (4585): n equals a,t,g, or c
  SITE (4586): n equals a,t,g, or c
  SITE (4587): n equals a,t,g, or c
  SITE (4588): n equals a,t,g, or c
  SITE (4589): n equals a,t,g, or c
  SITE (4590): n equals a,t,g, or c
  SITE (4591): n equals a,t,g, or c
  SITE (4592): n equals a,t,g, or c
  SITE (4593): n equals a,t,g, or c
  SITE (4594): n equals a,t,g, or c
  SITE (4595): n equals a,t,g, or c
  SITE (4596): n equals a,t,g, or c
  SITE (4597): n equals a,t,g, or c
  SITE (4598): n equals a,t,g, or c
  SITE (4599): n equals a,t,g, or c
  SITE (4600): n equals a,t,g, or c
  SITE (4601): n equals a,t,g, or c
  SITE (4602): n equals a,t,g, or c
  SITE (4603): n equals a,t,g, or c
  SITE (4604): n equals a,t,g, or c
  SITE (4605): n equals a,t,g, or c
  SITE (4606): n equals a,t,g, or c
  SITE (4607): n equals a,t,g, or c
  SITE (4608): n equals a,t,g, or c
  SITE (4609): n equals a,t,g, or c
  SITE (4610): n equals a,t,g, or c
  SITE (4611): n equals a,t,g, or c
  SITE (4612): n equals a,t,g, or c
  SITE (4613): n equals a,t,g, or c
  SITE (4614): n equals a,t,g, or c
  SITE (4615): n equals a,t,g, or c
  SITE (4616): n equals a,t,g, or c
  SITE (4617): n equals a,t,g, or c
  SITE (4618): n equals a,t,g, or c
  SITE (4619): n equals a,t,g, or c
  SITE (4620): n equals a,t,g, or c
  SITE (4621): n equals a,t,g, or c
  SITE (4622): n equals a,t,g, or c
  SITE (4623): n equals a,t,g, or c
  SITE (4624): n equals a,t,g, or c
  SITE (4625): n equals a,t,g, or c
  SITE (4626): n equals a,t,g, or c
  SITE (4627): n equals a,t,g, or c
  SITE (4628): n equals a,t,g, or c
  SITE (4629): n equals a,t,g, or c
  SITE (4630): n equals a,t,g, or c
  SITE (4631): n equals a,t,g, or c
  SITE (4632): n equals a,t,g, or c
  SITE (4633): n equals a,t,g, or c
  SITE (4634): n equals a,t,g, or c
  SITE (4635): n equals a,t,g, or c
  SITE (4636): n equals a,t,g, or c
  SITE (4637): n equals a,t,g, or c
  SITE (4638): n equals a,t,g, or c
  SITE (4639): n equals a,t,g, or c
  SITE (4640): n equals a,t,g, or c
  SITE (4641): n equals a,t,g, or c
  SITE (4642): n equals a,t,g, or c
  SITE (4643): n equals a,t,g, or c
  SITE (4644): n equals a,t,g, or c
  SITE (4645): n equals a,t,g, or c
  SITE (4646): n equals a,t,g, or c
  SITE (4647): n equals a,t,g, or c
  SITE (4648): n equals a,t,g, or c
  SITE (4649): n equals a,t,g, or c
  SITE (4650): n equals a,t,g, or c
  SITE (4651): n equals a,t,g, or c
  SITE (4652): n equals a,t,g, or c
  SITE (4653): n equals a,t,g, or c
  SITE (4654): n equals a,t,g, or c
  SITE (4655): n equals a,t,g, or c
  SITE (4656): n equals a,t,g, or c
  SITE (4657): n equals a,t,g, or c
  SITE (4658): n equals a,t,g, or c
  SITE (4659): n equals a,t,g, or c
  SITE (4660): n equals a,t,g, or c
  SITE (4661): n equals a,t,g, or c
  SITE (4662): n equals a,t,g, or c
  SITE (4663): n equals a,t,g, or c
  SITE (4664): n equals a,t,g, or c
  SITE (4665): n equals a,t,g, or c
  SITE (4666): n equals a,t,g, or c
  SITE (4667): n equals a,t,g, or c
  SITE (4668): n equals a,t,g, or c
  SITE (4669): n equals a,t,g, or c
  SITE (4670): n equals a,t,g, or c
  SITE (4671): n equals a,t,g, or c
  SITE (4672): n equals a,t,g, or c
  SITE (4673): n equals a,t,g, or c
  SITE (4674): n equals a,t,g, or c
  SITE (4675): n equals a,t,g, or c
  SITE (4676): n equals a,t,g, or c
  SITE (4677): n equals a,t,g, or c
  SITE (4678): n equals a,t,g, or c
  SITE (4679): n equals a,t,g, or c
  SITE (4680): n equals a,t,g, or c
  SITE (4681): n equals a,t,g, or c
  SITE (4682): n equals a,t,g, or c
  SITE (4683): n equals a,t,g, or c
  SITE (4684): n equals a,t,g, or c
  SITE (4685): n equals a,t,g, or c
  SITE (4686): n equals a,t,g, or c
  SITE (4687): n equals a,t,g, or c
  SITE (4688): n equals a,t,g, or c
  SITE (4689): n equals a,t,g, or c
  SITE (4690): n equals a,t,g, or c
  SITE (4691): n equals a,t,g, or c
  SITE (4692): n equals a,t,g, or c
  SITE (4693): n equals a,t,g, or c
  SITE (4694): n equals a,t,g, or c
  SITE (4695): n equals a,t,g, or c
  SITE (4696): n equals a,t,g, or c
  SITE (4697): n equals a,t,g, or c
  SITE (4698): n equals a,t,g, or c
  SITE (4699): n equals a,t,g, or c
  SITE (4700): n equals a,t,g, or c
  SITE (4701): n equals a,t,g, or c
  SITE (4702): n equals a,t,g, or c
  SITE (4703): n equals a,t,g, or c
  SITE (4704): n equals a,t,g, or c
  SITE (4705): n equals a,t,g, or c
  SITE (4706): n equals a,t,g, or c
  SITE (4707): n equals a,t,g, or c
  SITE (4708): n equals a,t,g, or c
  SITE (4709): n equals a,t,g, or c
  SITE (4710): n equals a,t,g, or c
  SITE (4711): n equals a,t,g, or c
  SITE (4712): n equals a,t,g, or c
  SITE (4713): n equals a,t,g, or c
  SITE (4714): n equals a,t,g, or c
  SITE (4715): n equals a,t,g, or c
  SITE (4716): n equals a,t,g, or c
  SITE (4717): n equals a,t,g, or c
  SITE (4718): n equals a,t,g, or c
  SITE (4719): n equals a,t,g, or c
  SITE (4720): n equals a,t,g, or c
  SITE (4721): n equals a,t,g, or c
  SITE (4722): n equals a,t,g, or c
  SITE (4723): n equals a,t,g, or c
  SITE (4724): n equals a,t,g, or c
  SITE (4725): n equals a,t,g, or c
  SITE (4726): n equals a,t,g, or c
  SITE (4727): n equals a,t,g, or c
  SITE (4728): n equals a,t,g, or c
  SITE (4729): n equals a,t,g, or c
  SITE (4730): n equals a,t,g, or c
  SITE (4731): n equals a,t,g, or c
  SITE (4732): n equals a,t,g, or c
  SITE (4733): n equals a,t,g, or c
  SITE (4734): n equals a,t,g, or c
  SITE (4735): n equals a,t,g, or c
  SITE (4736): n equals a,t,g, or c
  SITE (4737): n equals a,t,g, or c
  SITE (4738): n equals a,t,g, or c
  SITE (4739): n equals a,t,g, or c
  SITE (4740): n equals a,t,g, or c
  SITE (4741): n equals a,t,g, or c
  SITE (4742): n equals a,t,g, or c
  SITE (4743): n equals a,t,g, or c
  SITE (4744): n equals a,t,g, or c
  SITE (4745): n equals a,t,g, or c
  SITE (4746): n equals a,t,g, or c
  SITE (4747): n equals a,t,g, or c
  SITE (4748): n equals a,t,g, or c
  SITE (4749): n equals a,t,g, or c
  SITE (4750): n equals a,t,g, or c
  SITE (4751): n equals a,t,g, or c
  SITE (4752): n equals a,t,g, or c
  SITE (4753): n equals a,t,g, or c
  SITE (4754): n equals a,t,g, or c
  SITE (4755): n equals a,t,g, or c
  SITE (4756): n equals a,t,g, or c
  SITE (4757): n equals a,t,g, or c
  SITE (4758): n equals a,t,g, or c
  SITE (4759): n equals a,t,g, or c
  SITE (4760): n equals a,t,g, or c
  SITE (4761): n equals a,t,g, or c
  SITE (4762): n equals a,t,g, or c
  SITE (4763): n equals a,t,g, or c
  SITE (4764): n equals a,t,g, or c
  SITE (4765): n equals a,t,g, or c
  SITE (4766): n equals a,t,g, or c
  SITE (4767): n equals a,t,g, or c
  SITE (4768): n equals a,t,g, or c
  SITE (4769): n equals a,t,g, or c
  SITE (4770): n equals a,t,g, or c
  SITE (4771): n equals a,t,g, or c
  SITE (4772): n equals a,t,g, or c
  SITE (4773): n equals a,t,g, or c
  SITE (4774): n equals a,t,g, or c
  SITE (4775): n equals a,t,g, or c
  SITE (4776): n equals a,t,g, or c
  SITE (4777): n equals a,t,g, or c
  SITE (4778): n equals a,t,g, or c
  SITE (4779): n equals a,t,g, or c
  SITE (4780): n equals a,t,g, or c
  SITE (4781): n equals a,t,g, or c
  SITE (4782): n equals a,t,g, or c
  SITE (4783): n equals a,t,g, or c
  SITE (4784): n equals a,t,g, or c
  SITE (4785): n equals a,t,g, or c
  SITE (4786): n equals a,t,g, or c
  SITE (4787): n equals a,t,g, or c
  SITE (4788): n equals a,t,g, or c
  SITE (4789): n equals a,t,g, or c
  SITE (4790): n equals a,t,g, or c
  SITE (4791): n equals a,t,g, or c
  SITE (4792): n equals a,t,g, or c
  SITE (4793): n equals a,t,g, or c
  SITE (4794): n equals a,t,g, or c
  SITE (4795): n equals a,t,g, or c
  SITE (4796): n equals a,t,g, or c
  SITE (4797): n equals a,t,g, or c
  SITE (4798): n equals a,t,g, or c
  SITE (4799): n equals a,t,g, or c
  SITE (4800): n equals a,t,g, or c
  SITE (4801): n equals a,t,g, or c
  SITE (4802): n equals a,t,g, or c
  SITE (4803): n equals a,t,g, or c
  SITE (4804): n equals a,t,g, or c
  SITE (4805): n equals a,t,g, or c
  SITE (4806): n equals a,t,g, or c
  SITE (4807): n equals a,t,g, or c
  SITE (4808): n equals a,t,g, or c
  SITE (4809): n equals a,t,g, or c
  SITE (4810): n equals a,t,g, or c
  SITE (4811): n equals a,t,g, or c
  SITE (4812): n equals a,t,g, or c
  SITE (4813): n equals a,t,g, or c
  SITE (4814): n equals a,t,g, or c
  SITE (4815): n equals a,t,g, or c
  SITE (4816): n equals a,t,g, or c
  SITE (4817): n equals a,t,g, or c
  SITE (4818): n equals a,t,g, or c
  SITE (4819): n equals a,t,g, or c
  SITE (4820): n equals a,t,g, or c
  SITE (4821): n equals a,t,g, or c
  SITE (4822): n equals a,t,g, or c
  SITE (4823): n equals a,t,g, or c
  SITE (4824): n equals a,t,g, or c
  SITE (4825): n equals a,t,g, or c
  SITE (4826): n equals a,t,g, or c
  SITE (4827): n equals a,t,g, or c
  SITE (4828): n equals a,t,g, or c
  SITE (4829): n equals a,t,g, or c
  SITE (4830): n equals a,t,g, or c
  SITE (4831): n equals a,t,g, or c
  SITE (4832): n equals a,t,g, or c
  SITE (4833): n equals a,t,g, or c
  SITE (4834): n equals a,t,g, or c
  SITE (4835): n equals a,t,g, or c
  SITE (4836): n equals a,t,g, or c
  SITE (4837): n equals a,t,g, or c
  SITE (4838): n equals a,t,g, or c
  SITE (4839): n equals a,t,g, or c
  SITE (4840): n equals a,t,g, or c
  SITE (4841): n equals a,t,g, or c
  SITE (4842): n equals a,t,g, or c
  SITE (4843): n equals a,t,g, or c
  SITE (4844): n equals a,t,g, or c
  SITE (4845): n equals a,t,g, or c
  SITE (4846): n equals a,t,g, or c
  SITE (4847): n equals a,t,g, or c
  SITE (4848): n equals a,t,g, or c
  SITE (4849): n equals a,t,g, or c
  SITE (4850): n equals a,t,g, or c
  SITE (4851): n equals a,t,g, or c
  SITE (4852): n equals a,t,g, or c
  SITE (4853): n equals a,t,g, or c
  SITE (4854): n equals a,t,g, or c
  SITE (4855): n equals a,t,g, or c
  SITE (4856): n equals a,t,g, or c
  SITE (4857): n equals a,t,g, or c
  SITE (4858): n equals a,t,g, or c
  SITE (4859): n equals a,t,g, or c
  SITE (4860): n equals a,t,g, or c
  SITE (4861): n equals a,t,g, or c
  SITE (4862): n equals a,t,g, or c
  SITE (4863): n equals a,t,g, or c
  SITE (4864): n equals a,t,g, or c
  SITE (4865): n equals a,t,g, or c
  SITE (4866): n equals a,t,g, or c
  SITE (4867): n equals a,t,g, or c
  SITE (4868): n equals a,t,g, or c
  SITE (4869): n equals a,t,g, or c
  SITE (4870): n equals a,t,g, or c
  SITE (4871): n equals a,t,g, or c
  SITE (4872): n equals a,t,g, or c
  SITE (4873): n equals a,t,g, or c
  SITE (4874): n equals a,t,g, or c
  SITE (4875): n equals a,t,g, or c
  SITE (4876): n equals a,t,g, or c
  SITE (4877): n equals a,t,g, or c
  SITE (4878): n equals a,t,g, or c
  SITE (4879): n equals a,t,g, or c
  SITE (4880): n equals a,t,g, or c
  SITE (4881): n equals a,t,g, or c
  SITE (4882): n equals a,t,g, or c
  SITE (4883): n equals a,t,g, or c
  SITE (4884): n equals a,t,g, or c
  SITE (4885): n equals a,t,g, or c
  SITE (4886): n equals a,t,g, or c
  SITE (4887): n equals a,t,g, or c
  SITE (4888): n equals a,t,g, or c
  SITE (4889): n equals a,t,g, or c
  SITE (4890): n equals a,t,g, or c
  SITE (4891): n equals a,t,g, or c
  SITE (4892): n equals a,t,g, or c

SEQ ID NO: 11732 - DNA, 5775 bp, Homo sapiens; identical to SEQ ID NO: 7562

SEQ ID NO: 11733 - DNA, 738 bp, Homo sapiens; identical to SEQ ID NO: 7563

SEQ ID NO: 11734 - DNA, 430 bp, Homo sapiens
caaaaaaatcactgactccccatgcccttcctccaagcccctgatatcttctattcaactttctgtctctatacgtttgcctattctaggtacctcacgtaggtgaaatcatacaatatgtgtgtggccttttgtgtctggcttctttcactcagcatgatgttttcaagtttcatccacactgtagcatctatcaatactcaatttctttttatggctacataatattctatctacttattatttttattctatgaacactgattgacagcttcatttctggagggccaccagtgtgctacacactttgcaggtccttcacctatattcttgtatttattccatttatttataaactaatggtccccattgtgcaggtgaggaacctgaaagccagagggaatagtgacttttccaaaggtcacattgc

SEQ ID NO: 11735 - DNA, 289 bp, Homo sapiens
ttttttttgttgagttagggtctcactgtattccccaggctggtctgaaactcctgggctcaagcgatcctcctgcctcagcctcccaagtagctgggactacaggtgcacaccactgcacctgcctggctgggggttgcctcgttagggtccccaggcccggaaggtcgcgtgcttgctattgctgccccgcagacccccatggcctgctggagctagggggcgccagaagccttacttctgtgtctctggccgatgaacaagagagcctggatactgctgcagagca

SEQ ID NO: 11736 - DNA, 228 bp, Homo sapiens; identical to SEQ ID NO: 7553

SEQ ID NO: 11737 - DNA, 5141 bp, Homo sapiens
tgtgacaacatctggggtgatggaaagtatgaagaaagtcaagaaggtgaccaacggctccgtggagccccagggcgagtgggaaggcgccgtgtgacagagccgaccctgaggatggcactgtccaaggaaactgttaacttattcatagtcctattggacagcaggagcagctcctacagtgaactattggcaccaccgacagtgacaccagggcacatggctggagcacagtgccgcggaaacctgattttgtactctcttttatggaaacgatctgtggctgtttagaggcagctggatcctctttcaggcgggaatgggagggcgggcacagggaggaggagaggaagagaaaaggaagaattcatttttaatttaggtttctttttttcttcttcatttcggagctctaaggtgtatgcagttgtgaccccatgtgtggggaagtgtagcaaggacggctggtggagggggaaggagggtgcgaggtgtctgtctgatgctttaggaaatgtctactgaggaccctgggacttaagaagaagggcggggagagtgccattgcctgtttgggagacaaaaatgaacgaaaacaggtgactttggaaagcaaagtcaaaacccagtttaggatgtagcacctgccccaggattcctgccctcggctttgccccagacccttattccagatgctgagagtgaccaggacagcagctcctgaggcccagtggtcttctttccaacaggaaaagaaggctgtgatgtcgctgtcaggatcatgccctgtggcacagcacaggtggtgggaggtggttttctgactgagatgttgcctgatggatggaaagaaatgtatttttaagttcaaaaagcattatcctgtggcgttgcctggacatccactccctgacagcccagagcagcactgtctggcttcccttcatgcttgtggctttgttgtgtttgatcagaattttgggggaaatggaaagttttcctcaaggagcagctgggggcagaataggtagtatttaagcaaatacttaagtccaagcaaatcatccccattaaaaagcttttcctgtaggctagtaggatttctaaatagatgaattcaacagacttggtccccatagtccaagagtatgtatgtgaagaaagtgagcatgattcaacagtttcactctcagggattttaggatggcaaaatacttcacagaaactcaatgattaagttcccttccacacttccagagcttgaatgaacacaggtagccacctaaattgagcagtattgcaactcagagagaaaatcatctgaatagtaggacaagctcagaaggtacattgtgactgagggcttaaaaggagaccaaaacatggccccatcagggaagcttcttaatgcttggggggccagctaggtagggttgcttccaaaagctggagcccacccctgcctaggggttgtcagagagccacacctgcaggggaacaggtacctccgagggtgagagtcgtggtctctgggagttgttttctcacctctggcttagaagggtcaggcagaaaccacaggatgtggggtcacactcactgtcccaagtttgggaacctgaaaaagtctccattcagaacatggttgttctccctgtcccatgctatcttatcttcctaaatgactaatgaggaagcgggtgttctttttctgcactttgattcgccatctgggttctgtagggtgctctgaaggtgtgatctgccttctggctgatgtggaggaagagcaagcgccttcccaggccacagctgctcacctctcggcagatattttaggcaagcatccgtgtgtcttcccatcttcaggagaaaggtaaatgcaccctaagtgttcacttctggacctttttcaagttcacttgggactgtgtgacagaagggagttggagggaggatgggaatatttttaacactttgttttcctgtgcagaaacataataccagttttcgcagaaatgtgtctcaatctgtgactaccaaagccctcctcagtccttccctcagagggacacatttgctgtttctcccgcaagcagatgttgtggatgaggcgatagactccttggcaagaacgaaaggtgtgatgaaacctccctgctcggaagggtctccgtggaggtgtcctcatttcacatgctgggttttgcaagcgaggaagccaggcagtggaggaactagagagaggcaggcgtgtgtgtggacaagcgctggagccgcagccctcagactggcacgggaacgccagcgttgggtgttcagattccacgcgtatgtctgggctcactcacagcatggccgagtgtctgcagtgctggtcctgacccttccagagcagcagtggacagatgagataagactgtttcagaaacaaagatggccacagccttcctaacaagcaggtcatctggccatgtctgtattgtaactggtaaaaggcttcaagtcagattgatgatcaagaaaagtcaaaaccccagcccaagattgggaaagcaggtggtggttccaagcttttaaaaaattattgaagctctccatcctgttctgtgagtgtgtcttctctttctccttcacgtcatagccgtgacccaccgttcatctctgctcttgcgtaaagatgaccgatggagtccaaagccaagtggcttcaccagctgacaagccaccctcctgcagcctgagtttcacagtccactgggttcgttgtcatgcggtgtttgaatggttaagcccttgcagtatttcagatcgggcaaaaaatatcggatgcacatagcagaaccattggtggtatttatagctttgctttgtactcctcactgtttctgcctacgcaaaatatccatgtttcctctgagaaatctgttgtggactgaaagcgctgctggctgtgaaatttaataaagtgtgtatgctttgctagaaaattatttcttggacaataggaacagtcattgatctgtaaatcctggctcttaacagtgagtggccaaggacttgatcagcccatttcttggtccctcagtgctttaaaatttaagtagcactgcattttgtaatgttgaatatgactctagtgacttgtaggaggcacttgtgaggagatgcttgcttcagtgtaaaagatgctcatggcctgagtcagttgagttttctttcaagaaaccacttcagagtgaaatatccagggtttccccgccctggacatgtccagcctgcccaggcagcacacagccctgtaagtccacctcgtgtgggtgagatttcctcctgcgtgatgacctcatcgccatctctgctgtctcattccacagcctccctccctcttctctcctcctctgccctcgcccttcccccttccccatcccctccccctcctcctctgccctcgcccttacccctcccccttccccttccgctcctcctccctcctccacctctttctcctcctccttccctcctcctccctcctcttcccttctctgccatctttctccccgtgcctattgatcccacataggctcattctgggtacaccggctaaaggctttggtgcattgcagcgttttctcccagcagctgtgtgaaagatgcattttctaagctaaggagaattttctcaagagtggcatactcatgccaaatattattgctctgggccatataggctggtcttcctccacactaaaatgggtgtcttgttttggtacttaaaacagtctactccaggcatccagtccttacagaccaaggaagagcatagcgatgcctgttggaattgcagatgcattctggccttctcccccgtcctgaaacattttctttgaggaaggctcttagaacattagatagtctgctgaggttgttggcccagctccatacacccagtagaacagtggaacaactcatgcttcatgctgccaagctgctgtacttcaaaggaaacagatctagcacactgctgcacccctgcttccacactccacacttcaccccgctgcttttctctgacccgcccctggccttgtaagactcacgtaagctaagtccaggatgcctgtggcctgcggcttgattcttccctttaggattcagcaagttaatggcttcctcgctatagaagtgagactttgacttgatgcctcttggtatatcaaaaagatattcatccagaaagtaccaaatgttctgaaagacccgctcttcactccagttttccctagggtgtttctggcagggcgtttttaaaaggcatctacctgagttgacgctaatacttgtcaccacctggaacgtagttatcggtcggcaggctgaacatactccagattccccagaggccacttctgtagcccagcgatgcatctgagcctctctgcgtggtttatgcttgaaaaatagataatgcttttagatggttcactgccaggccatgggccccacacatctcaggccctgtgtgagggagcacactgagatggtgcaggagtgaatgggcatggcttggcctcgctacctcggggacctgttggagttctggcagcagggtgtctgcaggtgggacggcgttctgggcagagtcagaatggtcagaatgaaacagaacagccaactcacccacaggacagcttattttgaggcaaggttttggattttggaggaagcagccagatgaggcggtgagcctccagaaggtcagcctttggagcacgtaagatactgttacagggtccagaaatcgtgttcacatgggggctttgactcttcaaacagcttttgcagatcgtaaattgcatttgcctagtcgtgtgacctcaaaagaagtcagacatatttaatccagaaatagtttcgtttgagggagggcttgcaggtctgtaaatagcatttgctttcctggttagagattgggatgcagaaggagttttcagtattttttttaaaacactaatgatcattgaagagtatttatgtaaacatacaacgtataatgggtgggggatccgatcatggtgatgtacggggtgaattctcttgccgtgttgcaaatgtgtaaaataaagattatctggcagaac

SEQ ID NO: 11738 - DNA, 2236 bp, Homo sapiens; identical to SEQ ID NO: 9227
  SITE (996): n equals a,t,g, or c
  SITE (997): n equals a,t,g, or c
  SITE (998): n equals a,t,g, or c
  SITE (999): n equals a,t,g, or c
  SITE (1000): n equals a,t,g, or c
  SITE (1001): n equals a,t,g, or c
  SITE (1002): n equals a,t,g, or c
  SITE (1003): n equals a,t,g, or c
  SITE (1004): n equals a,t,g, or c
  SITE (1005): n equals a,t,g, or c
  SITE (1006): n equals a,t,g, or c
  SITE (1007): n equals a,t,g, or c
  SITE (1008): n equals a,t,g, or c
  SITE (1009): n equals a,t,g, or c
  SITE (1010): n equals a,t,g, or c
  SITE (1011): n equals a,t,g, or c
  SITE (1012): n equals a,t,g, or c
  SITE (1013): n equals a,t,g, or c
  SITE (1014): n equals a,t,g, or c
  SITE (1015): n equals a,t,g, or c
  SITE (1016): n equals a,t,g, or c
  SITE (1017): n equals a,t,g, or c
  SITE (1018): n equals a,t,g, or c
  SITE (1019): n equals a,t,g, or c
  SITE (1020): n equals a,t,g, or c
  SITE (1021): n equals a,t,g, or c
  SITE (1022): n equals a,t,g, or c
  SITE (1023): n equals a,t,g, or c
  SITE (1024): n equals a,t,g, or c
  SITE (1025): n equals a,t,g, or c
  SITE (1026): n equals a,t,g, or c
  SITE (1027): n equals a,t,g, or c
  SITE (1028): n equals a,t,g, or c
  SITE (1029): n equals a,t,g, or c
  SITE (1030): n equals a,t,g, or c
  SITE (1031): n equals a,t,g, or c
  SITE (1032): n equals a,t,g, or c
  SITE (1033): n equals a,t,g, or c
  SITE (1034): n equals a,t,g, or c
  SITE (1035): n equals a,t,g, or c
  SITE (1036): n equals a,t,g, or c
  SITE (1037): n equals a,t,g, or c
  SITE (1038): n equals a,t,g, or c
  SITE (1039): n equals a,t,g, or c
  SITE (1040): n equals a,t,g, or c
  SITE (1041): n equals a,t,g, or c
  SITE (1042): n equals a,t,g, or c
  SITE (1043): n equals a,t,g, or c
  SITE (1044): n equals a,t,g, or c
  SITE (1045): n equals a,t,g, or c
  SITE (1046): n equals a,t,g, or c
  SITE (1047): n equals a,t,g, or c
  SITE (1048): n equals a,t,g, or c
  SITE (1049): n equals a,t,g, or c
  SITE (1050): n equals a,t,g, or c
  SITE (1051): n equals a,t,g, or c
  SITE (1052): n equals a,t,g, or c
  SITE (1053): n equals a,t,g, or c
  SITE (1054): n equals a,t,g, or c
  SITE (1055): n equals a,t,g, or c
  SITE (1056): n equals a,t,g, or c
  SITE (1057): n equals a,t,g, or c
  SITE (1058): n equals a,t,g, or c
  SITE (1059): n equals a,t,g, or c
  SITE (1060): n equals a,t,g, or c
  SITE (1061): n equals a,t,g, or c
  SITE (1062): n equals a,t,g, or c
  SITE (1063): n equals a,t,g, or c
  SITE (1064): n equals a,t,g, or c
  SITE (1065): n equals a,t,g, or c
  SITE (1066): n equals a,t,g, or c
  SITE (1067): n equals a,t,g, or c
  SITE (1068): n equals a,t,g, or c
  SITE (1069): n equals a,t,g, or c
  SITE (1070): n equals a,t,g, or c
  SITE (1071): n equals a,t,g, or c
  SITE (1072): n equals a,t,g, or c
  SITE (1073): n equals a,t,g, or c
  SITE (1074): n equals a,t,g, or c
  SITE (1075): n equals a,t,g, or c
  SITE (1076): n equals a,t,g, or c
  SITE (1077): n equals a,t,g, or c
  SITE (1078): n equals a,t,g, or c
  SITE (1079): n equals a,t,g, or c
  SITE (1080): n equals a,t,g, or c
  SITE (1081): n equals a,t,g, or c
  SITE (1082): n equals a,t,g, or c
  SITE (1083): n equals a,t,g, or c
  SITE (1084): n equals a,t,g, or c
  SITE (1085): n equals a,t,g, or c
  SITE (1086): n equals a,t,g, or c
  SITE (1087): n equals a,t,g, or c
  SITE (1088): n equals a,t,g, or c
  SITE (1089): n equals a,t,g, or c
  SITE (1090): n equals a,t,g, or c
  SITE (1091): n equals a,t,g, or c
  SITE (1092): n equals a,t,g, or c
  SITE (1093): n equals a,t,g, or c
  SITE (1094): n equals a,t,g, or c
  SITE (1095): n equals a,t,g, or c
  SITE (1096): n equals a,t,g, or c
  SITE (1097): n equals a,t,g, or c
  SITE (1098): n equals a,t,g, or c
  SITE (1099): n equals a,t,g, or c
  SITE (1100): n equals a,t,g, or c
  SITE (1101): n equals a,t,g, or c
  SITE (1102): n equals a,t,g, or c
  SITE (1103): n equals a,t,g, or c
  SITE (1104): n equals a,t,g, or c
  SITE (1105): n equals a,t,g, or c
  SITE (1106): n equals a,t,g, or c
  SITE (1107): n equals a,t,g, or c
  SITE (1108): n equals a,t,g, or c
  SITE (1109): n equals a,t,g, or c
  SITE (1110): n equals a,t,g, or c
  SITE (1111): n equals a,t,g, or c
  SITE (1112): n equals a,t,g, or c
  SITE (1113): n equals a,t,g, or c
  SITE (1114): n equals a,t,g, or c
  SITE (1115): n equals a,t,g, or c
  SITE (1116): n equals a,t,g, or c
  SITE (1117): n equals a,t,g, or c
  SITE (1118): n equals a,t,g, or c
  SITE (1119): n equals a,t,g, or c
  SITE (1120): n equals a,t,g, or c
  SITE (1121): n equals a,t,g, or c
  SITE (1122): n equals a,t,g, or c
  SITE (1123): n equals a,t,g, or c
  SITE (1124): n equals a,t,g, or c
  SITE (1125): n equals a,t,g, or c
  SITE (1126): n equals a,t,g, or c
  SITE (1127): n equals a,t,g, or c
  SITE (1128): n equals a,t,g, or c
  SITE (1129): n equals a,t,g, or c
  SITE (1130): n equals a,t,g, or c
  SITE (1131): n equals a,t,g, or c
  SITE (1132): n equals a,t,g, or c
  SITE (1133): n equals a,t,g, or c
  SITE (1134): n equals a,t,g, or c
  SITE (1135): n equals a,t,g, or c
  SITE (1136): n equals a,t,g, or c
  SITE (1137): n equals a,t,g, or c
  SITE (1138): n equals a,t,g, or c
  SITE (1139): n equals a,t,g, or c
  SITE (1140): n equals a,t,g, or c
  SITE (1141): n equals a,t,g, or c
  SITE (1142): n equals a,t,g, or c
  SITE (1143): n equals a,t,g, or c
  SITE (1144): n equals a,t,g, or c
  SITE (1145): n equals a,t,g, or c
  SITE (1146): n equals a,t,g, or c
  SITE (1147): n equals a,t,g, or c
  SITE (1148): n equals a,t,g, or c
  SITE (1149): n equals a,t,g, or c
  SITE (1150): n equals a,t,g, or c
  SITE (1151): n equals a,t,g, or c
  SITE (1152): n equals a,t,g, or c
  SITE (1153): n equals a,t,g, or c
  SITE (1154): n equals a,t,g, or c
  SITE (1155): n equals a,t,g, or c
  SITE (1156): n equals a,t,g, or c
  SITE (1157): n equals a,t,g, or c
  SITE (1158): n equals a,t,g, or c
  SITE (1159): n equals a,t,g, or c
  SITE (1160): n equals a,t,g, or c
  SITE (1161): n equals a,t,g, or c
  SITE (1162): n equals a,t,g, or c
  SITE (1163): n equals a,t,g, or c
  SITE (1164): n equals a,t,g, or c
  SITE (1165): n equals a,t,g, or c
  SITE (1166): n equals a,t,g, or c
  SITE (1167): n equals a,t,g, or c
  SITE (1168): n equals a,t,g, or c
  SITE (1169): n equals a,t,g, or c
  SITE (1170): n equals a,t,g, or c
  SITE (1171): n equals a,t,g, or c
  SITE (1172): n equals a,t,g, or c
  SITE (1173): n equals a,t,g, or c
  SITE (1174): n equals a,t,g, or c
  SITE (1175): n equals a,t,g, or c
  SITE (1176): n equals a,t,g, or c
  SITE (1177): n equals a,t,g, or c
  SITE (1178): n equals a,t,g, or c
  SITE (1179): n equals a,t,g, or c
  SITE (1180): n equals a,t,g, or c
  SITE (1181): n equals a,t,g, or c
  SITE (1182): n equals a,t,g, or c
  SITE (1183): n equals a,t,g, or c
  SITE (1184): n equals a,t,g, or c
  SITE (1185): n equals a,t,g, or c
  SITE (1186): n equals a,t,g, or c
  SITE (1187): n equals a,t,g, or c
  SITE (1188): n equals a,t,g, or c
  SITE (1189): n equals a,t,g, or c
  SITE (1190): n equals a,t,g, or c
  SITE (1191): n equals a,t,g, or c
  SITE (1192): n equals a,t,g, or c
  SITE (1193): n equals a,t,g, or c
  SITE (1194): n equals a,t,g, or c
  SITE (1195): n equals a,t,g, or c
  SITE (1196): n equals a,t,g, or c
  SITE (1197): n equals a,t,g, or c
  SITE (1198): n equals a,t,g, or c
  SITE (1199): n equals a,t,g, or c
  SITE (1200): n equals a,t,g, or c
  SITE (1201): n equals a,t,g, or c
  SITE (1202): n equals a,t,g, or c
  SITE (1203): n equals a,t,g, or c
  SITE (1204): n equals a,t,g, or c
  SITE (1205): n equals a,t,g, or c
  SITE (1206): n equals a,t,g, or c
  SITE (1207): n equals a,t,g, or c
  SITE (1208): n equals a,t,g, or c
  SITE (1209): n equals a,t,g, or c
  SITE (1210): n equals a,t,g, or c
  SITE (1211): n equals a,t,g, or c
  SITE (1212): n equals a,t,g, or c
  SITE (1213): n equals a,t,g, or c
  SITE (1214): n equals a,t,g, or c
  SITE (1215): n equals a,t,g, or c
  SITE (1216): n equals a,t,g, or c
  SITE (1217): n equals a,t,g, or c
  SITE (1218): n equals a,t,g, or c
  SITE (1219): n equals a,t,g, or c
  SITE (1220): n equals a,t,g, or c
  SITE (1221): n equals a,t,g, or c
  SITE (1222): n equals a,t,g, or c
  SITE (1223): n equals a,t,g, or c
  SITE (1224): n equals a,t,g, or c
  SITE (1225): n equals a,t,g, or c
  SITE (1226): n equals a,t,g, or c
  SITE (1227): n equals a,t,g, or c
  SITE (1228): n equals a,t,g, or c
  SITE (1229): n equals a,t,g, or c
  SITE (1230): n equals a,t,g, or c
  SITE (1231): n equals a,t,g, or c
  SITE (1232): n equals a,t,g, or c
  SITE (1233): n equals a,t,g, or c
  SITE (1234): n equals a,t,g, or c
  SITE (1235): n equals a,t,g, or c
  SITE (1236): n equals a,t,g, or c
  SITE (1237): n equals a,t,g, or c
  SITE (1238): n equals a,t,g, or c
  SITE (1239): n equals a,t,g, or c
  SITE (1240): n equals a,t,g, or c
  SITE (1241): n equals a,t,g, or c
  SITE (1242): n equals a,t,g, or c
  SITE (1243): n equals a,t,g, or c
  SITE (1244): n equals a,t,g, or c
  SITE (1245): n equals a,t,g, or c
  SITE (1246): n equals a,t,g, or c
  SITE (1247): n equals a,t,g, or c
  SITE (1248): n equals a,t,g, or c
  SITE (1249): n equals a,t,g, or c
  SITE (1250): n equals a,t,g, or c
  SITE (1251): n equals a,t,g, or c
  SITE (1252): n equals a,t,g, or c
  SITE (1253): n equals a,t,g, or c
  SITE (1254): n equals a,t,g, or c
  SITE (1255): n equals a,t,g, or c
  SITE (1256): n equals a,t,g, or c
  SITE (1257): n equals a,t,g, or c
  SITE (1258): n equals a,t,g, or c
  SITE (1259): n equals a,t,g, or c
  SITE (1260): n equals a,t,g, or c
  SITE (1261): n equals a,t,g, or c
  SITE (1262): n equals a,t,g, or c
  SITE (1263): n equals a,t,g, or c
  SITE (1264): n equals a,t,g, or c
  SITE (1265): n equals a,t,g, or c
  SITE (1266): n equals a,t,g, or c
  SITE (1267): n equals a,t,g, or c
  SITE (1268): n equals a,t,g, or c
  SITE (1269): n equals a,t,g, or c
  SITE (1270): n equals a,t,g, or c
  SITE (1271): n equals a,t,g, or c
  SITE (1272): n equals a,t,g, or c
  SITE (1273): n equals a,t,g, or c
  SITE (1274): n equals a,t,g, or c
  SITE (1275): n equals a,t,g, or c
  SITE (1276): n equals a,t,g, or c
  SITE (1277): n equals a,t,g, or c
  SITE (1278): n equals a,t,g, or c
  SITE (1279): n equals a,t,g, or c
  SITE (1280): n equals a,t,g, or c
  SITE (1281): n equals a,t,g, or c
  SITE (1282): n equals a,t,g, or c
  SITE (1283): n equals a,t,g, or c
  SITE (1284): n equals a,t,g, or c
  SITE (1285): n equals a,t,g, or c
  SITE (1286): n equals a,t,g, or c
  SITE (1287): n equals a,t,g, or c
  SITE (1288): n equals a,t,g, or c
  SITE (1289): n equals a,t,g, or c
  SITE (1290): n equals a,t,g, or c
  SITE (1291): n equals a,t,g, or c
  SITE (1292): n equals a,t,g, or c
  SITE (1293): n equals a,t,g, or c
  SITE (1294): n equals a,t,g, or c
  SITE (1295): n equals a,t,g, or c
  SITE (1296): n equals a,t,g, or c
  SITE (1297): n equals a,t,g, or c
  SITE (1298): n equals a,t,g, or c
  SITE (1299): n equals a,t,g, or c
  SITE (1300): n equals a,t,g, or c
  SITE (1301): n equals a,t,g, or c
  SITE (1302): n equals a,t,g, or c
  SITE (1303): n equals a,t,g, or c
  SITE (1304): n equals a,t,g, or c
  SITE (1305): n equals a,t,g, or c
  SITE (1306): n equals a,t,g, or c
  SITE (1307): n equals a,t,g, or c
  SITE (1308): n equals a,t,g, or c
  SITE (1309): n equals a,t,g, or c
  SITE (1310): n equals a,t,g, or c
  SITE (1311): n equals a,t,g, or c
  SITE (1312): n equals a,t,g, or c
  SITE (1313): n equals a,t,g, or c
  SITE (1314): n equals a,t,g, or c
  SITE (1315): n equals a,t,g, or c
  SITE (1316): n equals a,t,g, or c
  SITE (1317): n equals a,t,g, or c
  SITE (1318): n equals a,t,g, or c
  SITE (1319): n equals a,t,g, or c
  SITE (1320): n equals a,t,g, or c
  SITE (1321): n equals a,t,g, or c
  SITE (1322): n equals a,t,g, or c
  SITE (1323): n equals a,t,g, or c
  SITE (1324): n equals a,t,g, or c
  SITE (1325): n equals a,t,g, or c
  SITE (1326): n equals a,t,g, or c
  SITE (1327): n equals a,t,g, or c
  SITE (1328): n equals a,t,g, or c
  SITE (1329): n equals a,t,g, or c
  SITE (1330): n equals a,t,g, or c
  SITE (1331): n equals a,t,g, or c
  SITE (1332): n equals a,t,g, or c
  SITE (1333): n equals a,t,g, or c
  SITE (1334): n equals a,t,g, or c
  SITE (1335): n equals a,t,g, or c
  SITE (1336): n equals a,t,g, or c
  SITE (1337): n equals a,t,g, or c
  SITE (1338): n equals a,t,g, or c
  SITE (1339): n equals a,t,g, or c
  SITE (1340): n equals a,t,g, or c
  SITE (1341): n equals a,t,g, or c
  SITE (1342): n equals a,t,g, or c
  SITE (1343): n equals a,t,g, or c
  SITE (1344): n equals a,t,g, or c
  SITE (1345): n equals a,t,g, or c
  SITE (1346): n equals a,t,g, or c
  SITE (1347): n equals a,t,g, or c
  SITE (1348): n equals a,t,g, or c
  SITE (1349): n equals a,t,g, or c
  SITE (1350): n equals a,t,g, or c
  SITE (1351): n equals a,t,g, or c
  SITE (1352): n equals a,t,g, or c
  SITE (1353): n equals a,t,g, or c
  SITE (1354): n equals a,t,g, or c
  SITE (1355): n equals a,t,g, or c
  SITE (1356): n equals a,t,g, or c
  SITE (1357): n equals a,t,g, or c
  SITE (1358): n equals a,t,g, or c
  SITE (1359): n equals a,t,g, or c
  SITE (1360): n equals a,t,g, or c
  SITE (1361): n equals a,t,g, or c
  SITE (1362): n equals a,t,g, or c
  SITE (1363): n equals a,t,g, or c
  SITE (1364): n equals a,t,g, or c
  SITE (1365): n equals a,t,g, or c
  SITE (1366): n equals a,t,g, or c
  SITE (1367): n equals a,t,g, or c
  SITE (1368): n equals a,t,g, or c
  SITE (1369): n equals a,t,g, or c
  SITE (1370): n equals a,t,g, or c
  SITE (1371): n equals a,t,g, or c
  SITE (1372): n equals a,t,g, or c
  SITE (1373): n equals a,t,g, or c
  SITE (1374): n equals a,t,g, or c
  SITE (1375): n equals a,t,g, or c
  SITE (1376): n equals a,t,g, or c
  SITE (1377): n equals a,t,g, or c
  SITE (1378): n equals a,t,g, or c
  SITE (1379): n equals a,t,g, or c
  SITE (1380): n equals a,t,g, or c
  SITE (1381): n equals a,t,g, or c
  SITE (1382): n equals a,t,g, or c
  SITE (1383): n equals a,t,g, or c
  SITE (1384): n equals a,t,g, or c
  SITE (1385): n equals a,t,g, or c
  SITE (1386): n equals a,t,g, or c
  SITE (1387): n equals a,t,g, or c
  SITE (1388): n equals a,t,g, or c
  SITE (1389): n equals a,t,g, or c
  SITE (1390): n equals a,t,g, or c
  SITE (1391): n equals a,t,g, or c
  SITE (1392): n equals a,t,g, or c
  SITE (1393): n equals a,t,g, or c
  SITE (1394): n equals a,t,g, or c
  SITE (1395): n equals a,t,g, or c
  SITE (1396): n equals a,t,g, or c
  SITE (1397): n equals a,t,g, or c
  SITE (1398): n equals a,t,g, or c
  SITE (1399): n equals a,t,g, or c
  SITE (1400): n equals a,t,g, or c
  SITE (1401): n equals a,t,g, or c
  SITE (1402): n equals a,t,g, or c
  SITE (1403): n equals a,t,g, or c
  SITE (1404): n equals a,t,g, or c
  SITE (1405): n equals a,t,g, or c
  SITE (1406): n equals a,t,g, or c
  SITE (1407): n equals a,t,g, or c
  SITE (1408): n equals a,t,g, or c
  SITE (1409): n equals a,t,g, or c
  SITE (1410): n equals a,t,g, or c
  SITE (1411): n equals a,t,g, or c
  SITE (1412): n equals a,t,g, or c
  SITE (1413): n equals a,t,g, or c
  SITE (1414): n equals a,t,g, or c
  SITE (1415): n equals a,t,g, or c
  SITE (1416): n equals a,t,g, or c
  SITE (1417): n equals a,t,g, or c
  SITE (1418): n equals a,t,g, or c
  SITE (1419): n equals a,t,g, or c
  SITE (1420): n equals a,t,g, or c
  SITE (1421): n equals a,t,g, or c
  SITE (1422): n equals a,t,g, or c
  SITE (1423): n equals a,t,g, or c
  SITE (1424): n equals a,t,g, or c
  SITE (1425): n equals a,t,g, or c
  SITE (1426): n equals a,t,g, or c
  SITE (1427): n equals a,t,g, or c
  SITE (1428): n equals a,t,g, or c
  SITE (1429): n equals a,t,g, or c
  SITE (1430): n equals a,t,g, or c
  SITE (1431): n equals a,t,g, or c
  SITE (1432): n equals a,t,g, or c
  SITE (1433): n equals a,t,g, or c
  SITE (1434): n equals a,t,g, or c
  SITE (1435): n equals a,t,g, or c
  SITE (1436): n equals a,t,g, or c
  SITE (1437): n equals a,t,g, or c
  SITE (1438): n equals a,t,g, or c
  SITE (1439): n equals a,t,g, or c
  SITE (1440): n equals a,t,g, or c
  SITE (1441): n equals a,t,g, or c
  SITE (1442): n equals a,t,g, or c
  SITE (1443): n equals a,t,g, or c
  SITE (1444): n equals a,t,g, or c
  SITE (1445): n equals a,t,g, or c
  SITE (1446): n equals a,t,g, or c
  SITE (1447): n equals a,t,g, or c
  SITE (1448): n equals a,t,g, or c
  SITE (1449): n equals a,t,g, or c
  SITE (1450): n equals a,t,g, or c
  SITE (1451): n equals a,t,g, or c
  SITE (1452): n equals a,t,g, or c
  SITE (1453): n equals a,t,g, or c
  SITE (1454): n equals a,t,g, or c
  SITE (1455): n equals a,t,g, or c
  SITE (1456): n equals a,t,g, or c
  SITE (1457): n equals a,t,g, or c
  SITE (1458): n equals a,t,g, or c
  SITE (1459): n equals a,t,g, or c
  SITE (1460): n equals a,t,g, or c
  SITE (1461): n equals a,t,g, or c
  SITE (1462): n equals a,t,g, or c
  SITE (1463): n equals a,t,g, or c
  SITE (1464): n equals a,t,g, or c
  SITE (1465): n equals a,t,g, or c
  SITE (1466): n equals a,t,g, or c
  SITE (1467): n equals a,t,g, or c
  SITE (1468): n equals a,t,g, or c
  SITE (1469): n equals a,t,g, or c
  SITE (1470): n equals a,t,g, or c
  SITE (1471): n equals a,t,g, or c
  SITE (1472): n equals a,t,g, or c
  SITE (1473): n equals a,t,g, or c
  SITE (1474): n equals a,t,g, or c
  SITE (1475): n equals a,t,g, or c
  SITE (1476): n equals a,t,g, or c
  SITE (1477): n equals a,t,g, or c
  SITE (1478): n equals a,t,g, or c
  SITE (1479): n equals a,t,g, or c
  SITE (1480): n equals a,t,g, or c
  SITE (1481): n equals a,t,g, or c
  SITE (1482): n equals a,t,g, or c
  SITE (1483): n equals a,t,g, or c
  SITE (1484): n equals a,t,g, or c
  SITE (1485): n equals a,t,g, or c
  SITE (1486): n equals a,t,g, or c
  SITE (1487): n equals a,t,g, or c
  SITE (1488): n equals a,t,g, or c
  SITE (1489): n equals a,t,g, or c
  SITE (1490): n equals a,t,g, or c
  SITE (1491): n equals a,t,g, or c
  SITE (1492): n equals a,t,g, or c
  SITE (1493): n equals a,t,g, or c
  SITE (1494): n equals a,t,g, or c
  SITE (1495): n equals a,t,g, or c
  SITE (1496): n equals a,t,g, or c
  SITE (1497): n equals a,t,g, or c
  SITE (1498): n equals a,t,g, or c
  SITE (1499): n equals a,t,g, or c
  SITE (1500): n equals a,t,g, or c
  SITE (1501): n equals a,t,g, or c
  SITE (1502): n equals a,t,g, or c
  SITE (1503): n equals a,t,g, or c
  SITE (1504): n equals a,t,g, or c
  SITE (1505): n equals a,t,g, or c
  SITE (1506): n equals a,t,g, or c
  SITE (1507): n equals a,t,g, or c
  SITE (1508): n equals a,t,g, or c
  SITE (1509): n equals a,t,g, or c
  SITE (1510): n equals a,t,g, or c
  SITE (1511): n equals a,t,g, or c
  SITE (1512): n equals a,t,g, or c
  SITE (1513): n equals a,t,g, or c
  SITE (1514): n equals a,t,g, or c
  SITE (1515): n equals a,t,g, or c
  SITE (1516): n equals a,t,g, or c
  SITE (1517): n equals a,t,g, or c
  SITE (1518): n equals a,t,g, or c
  SITE (1519): n equals a,t,g, or c
  SITE (1520): n equals a,t,g, or c
  SITE (1521): n equals a,t,g, or c
  SITE (1522): n equals a,t,g, or c
  SITE (1523): n equals a,t,g, or c
  SITE (1524): n equals a,t,g, or c
  SITE (1525): n equals a,t,g, or c
  SITE (1526): n equals a,t,g, or c
  SITE (1527): n equals a,t,g, or c
  SITE (1528): n equals a,t,g, or c
  SITE (1529): n equals a,t,g, or c
  SITE (1530): n equals a,t,g, or c
  SITE (1531): n equals a,t,g, or c
  SITE (1532): n equals a,t,g, or c
  SITE (1533): n equals a,t,g, or c
  SITE (1534): n equals a,t,g, or c
  SITE (1535): n equals a,t,g, or c
  SITE (1536): n equals a,t,g, or c
  SITE (1537): n equals a,t,g, or c
  SITE (1538): n equals a,t,g, or c
  SITE (1539): n equals a,t,g, or c
  SITE (1540): n equals a,t,g, or c
  SITE (1541): n equals a,t,g, or c
  SITE (1542): n equals a,t,g, or c
  SITE (1543): n equals a,t,g, or c
  SITE (1544): n equals a,t,g, or c
  SITE (1545): n equals a,t,g, or c
  SITE (1546): n equals a,t,g, or c
  SITE (1547): n equals a,t,g, or c
  SITE (1548): n equals a,t,g, or c
  SITE (1549): n equals a,t,g, or c
  SITE (1550): n equals a,t,g, or c
  SITE (1551): n equals a,t,g, or c
  SITE (1552): n equals a,t,g, or c
  SITE (1553): n equals a,t,g, or c
  SITE (1554): n equals a,t,g, or c
  SITE (1555): n equals a,t,g, or c
  SITE (1556): n equals a,t,g, or c
  SITE (1557): n equals a,t,g, or c
  SITE (1558): n equals a,t,g, or c
  SITE (1559): n equals a,t,g, or c
  SITE (1560): n equals a,t,g, or c
  SITE (1561): n equals a,t,g, or c
  SITE (1562): n equals a,t,g, or c
  SITE (1563): n equals a,t,g, or c
  SITE (1564): n equals a,t,g, or c
  SITE (1565): n equals a,t,g, or c
  SITE (1566): n equals a,t,g, or c
  SITE (1567): n equals a,t,g, or c
  SITE (1568): n equals a,t,g, or c
  SITE (1569): n equals a,t,g, or c
  SITE (1570): n equals a,t,g, or c
  SITE (1571): n equals a,t,g, or c
  SITE (1572): n equals a,t,g, or c
  SITE (1573): n equals a,t,g, or c
  SITE (1574): n equals a,t,g, or c
  SITE (1575): n equals a,t,g, or c
  SITE (1576): n equals a,t,g, or c
  SITE (1577): n equals a,t,g, or c
  SITE (1578): n equals a,t,g, or c
  SITE (1579): n equals a,t,g, or c
  SITE (1580): n equals a,t,g, or c
  SITE (1581): n equals a,t,g, or c
  SITE (1582): n equals a,t,g, or c
  SITE (1583): n equals a,t,g, or c
  SITE (1584): n equals a,t,g, or c
  SITE (1585): n equals a,t,g, or c
  SITE (1586): n equals a,t,g, or c
  SITE (1587): n equals a,t,g, or c
  SITE (1588): n equals a,t,g, or c
  SITE (1589): n equals a,t,g, or c
  SITE (1590): n equals a,t,g, or c
  SITE (1591): n equals a,t,g, or c
  SITE (1592): n equals a,t,g, or c
  SITE (1593): n equals a,t,g, or c
  SITE (1594): n equals a,t,g, or c
  SITE (1595): n equals a,t,g, or c
  SITE (1596): n equals a,t,g, or c
  SITE (1597): n equals a,t,g, or c
  SITE (1598): n equals a,t,g, or c
  SITE (1599): n equals a,t,g, or c
  SITE (1600): n equals a,t,g, or c
  SITE (1601): n equals a,t,g, or c
  SITE (1602): n equals a,t,g, or c
  SITE (1603): n equals a,t,g, or c
  SITE (1604): n equals a,t,g, or c
  SITE (1605): n equals a,t,g, or c
  SITE (1606): n equals a,t,g, or c
  SITE (1607): n equals a,t,g, or c
  SITE (1608): n equals a,t,g, or c
  SITE (1609): n equals a,t,g, or c
  SITE (1610): n equals a,t,g, or c
  SITE (1611): n equals a,t,g, or c
  SITE (1612): n equals a,t,g, or c
  SITE (1613): n equals a,t,g, or c
  SITE (1614): n equals a,t,g, or c
  SITE (1615): n equals a,t,g, or c
  SITE (1616): n equals a,t,g, or c
  SITE (1617): n equals a,t,g, or c
  SITE (1618): n equals a,t,g, or c
  SITE (1619): n equals a,t,g, or c
  SITE (1620): n equals a,t,g, or c
  SITE (1621): n equals a,t,g, or c
  SITE (1622): n equals a,t,g, or c
  SITE (1623): n equals a,t,g, or c
  SITE (1624): n equals a,t,g, or c
  SITE (1625): n equals a,t,g, or c
  SITE (1626): n equals a,t,g, or c
  SITE (1627): n equals a,t,g, or c
  SITE (1628): n equals a,t,g, or c
  SITE (1629): n equals a,t,g, or c
  SITE (1630): n equals a,t,g, or c
  SITE (1631): n equals a,t,g, or c
  SITE (1632): n equals a,t,g, or c
  SITE (1633): n equals a,t,g, or c
  SITE (1634): n equals a,t,g, or c
  SITE (1635): n equals a,t,g, or c
  SITE (1636): n equals a,t,g, or c
  SITE (1637): n equals a,t,g, or c
  SITE (1638): n equals a,t,g, or c
  SITE (1639): n equals a,t,g, or c
  SITE (1640): n equals a,t,g, or c
  SITE (1641): n equals a,t,g, or c
  SITE (1642): n equals a,t,g, or c
  SITE (1643): n equals a,t,g, or c
  SITE (1644): n equals a,t,g, or c
  SITE (1645): n equals a,t,g, or c
  SITE (1646): n equals a,t,g, or c
  SITE (1647): n equals a,t,g, or c
  SITE (1648): n equals a,t,g, or c
  SITE (1649): n equals a,t,g, or c
  SITE (1650): n equals a,t,g, or c
  SITE (1651): n equals a,t,g, or c
  SITE (1652): n equals a,t,g, or c
  SITE (1653): n equals a,t,g, or c
  SITE (1654): n equals a,t,g, or c
  SITE (1655): n equals a,t,g, or c
  SITE (1656): n equals a,t,g, or c
  SITE (1657): n equals a,t,g, or c
  SITE (1658): n equals a,t,g, or c
  SITE (1659): n equals a,t,g, or c
  SITE (1660): n equals a,t,g, or c
  SITE (1661): n equals a,t,g, or c
  SITE (1662): n equals a,t,g, or c
  SITE (1663): n equals a,t,g, or c
  SITE (1664): n equals a,t,g, or c
  SITE (1665): n equals a,t,g, or c
  SITE (1666): n equals a,t,g, or c
  SITE (1667): n equals a,t,g, or c
  SITE (1668): n equals a,t,g, or c
  SITE (1669): n equals a,t,g, or c
  SITE (1670): n equals a,t,g, or c
  SITE (1671): n equals a,t,g, or c
  SITE (1672): n equals a,t,g, or c
  SITE (1673): n equals a,t,g, or c
  SITE (1674): n equals a,t,g, or c
  SITE (1675): n equals a,t,g, or c
  SITE (1676): n equals a,t,g, or c
  SITE (1677): n equals a,t,g, or c
  SITE (1678): n equals a,t,g, or c
  SITE (1679): n equals a,t,g, or c
  SITE (1680): n equals a,t,g, or c
  SITE (1681): n equals a,t,g, or c
  SITE (1682): n equals a,t,g, or c
  SITE (1683): n equals a,t,g, or c
  SITE (1684): n equals a,t,g, or c
  SITE (1685): n equals a,t,g, or c
  SITE (1686): n equals a,t,g, or c
  SITE (1687): n equals a,t,g, or c
  SITE (1688): n equals a,t,g, or c
  SITE (1689): n equals a,t,g, or c
  SITE (1690): n equals a,t,g, or c
  SITE (1691): n equals a,t,g, or c
  SITE (1692): n equals a,t,g, or c
  SITE (1693): n equals a,t,g, or c
  SITE (1694): n equals a,t,g, or c
  SITE (1695): n equals a,t,g, or c
  SITE (1696): n equals a,t,g, or c
  SITE (1697): n equals a,t,g, or c
  SITE (1698): n equals a,t,g, or c
  SITE (1699): n equals a,t,g, or c
  SITE (1700): n equals a,t,g, or c
  SITE (1701): n equals a,t,g, or c
  SITE (1702): n equals a,t,g, or c
  SITE (1703): n equals a,t,g, or c
  SITE (1704): n equals a,t,g, or c
  SITE (1705): n equals a,t,g, or c
  SITE (1706): n equals a,t,g, or c
  SITE (1707): n equals a,t,g, or c
  SITE (1708): n equals a,t,g, or c
  SITE (1709): n equals a,t,g, or c
  SITE (1710): n equals a,t,g, or c
  SITE (1711): n equals a,t,g, or c
  SITE (1712): n equals a,t,g, or c
  SITE (1713): n equals a,t,g, or c
  SITE (1714): n equals a,t,g, or c
  SITE (1715): n equals a,t,g, or c
  SITE (1716): n equals a,t,g, or c
  SITE (1717): n equals a,t,g, or c
  SITE (1718): n equals a,t,g, or c
  SITE (1719): n equals a,t,g, or c
  SITE (1720): n equals a,t,g, or c
  SITE (1721): n equals a,t,g, or c
  SITE (1722): n equals a,t,g, or c
  SITE (1723): n equals a,t,g, or c
  SITE (1724): n equals a,t,g, or c
  SITE (1725): n equals a,t,g, or c
  SITE (1726): n equals a,t,g, or c
  SITE (1727): n equals a,t,g, or c
  SITE (1728): n equals a,t,g, or c
  SITE (1729): n equals a,t,g, or c
  SITE (1730): n equals a,t,g, or c
  SITE (1731): n equals a,t,g, or c
  SITE (1732): n equals a,t,g, or c
  SITE (1733): n equals a,t,g, or c
  SITE (1734): n equals a,t,g, or c
  SITE (1735): n equals a,t,g, or c
  SITE (1736): n equals a,t,g, or c
  SITE (1737): n equals a,t,g, or c
  SITE (1738): n equals a,t,g, or c
  SITE (1739): n equals a,t,g, or c
  SITE (1740): n equals a,t,g, or c
  SITE (1741): n equals a,t,g, or c
  SITE (1742): n equals a,t,g, or c
  SITE (1743): n equals a,t,g, or c
  SITE (1744): n equals a,t,g, or c
  SITE (1745): n equals a,t,g, or c
  SITE (1746): n equals a,t,g, or c
  SITE (1747): n equals a,t,g, or c
  SITE (1748): n equals a,t,g, or c
  SITE (1749): n equals a,t,g, or c
  SITE (1750): n equals a,t,g, or c
  SITE (1751): n equals a,t,g, or c
  SITE (1752): n equals a,t,g, or c
  SITE (1753): n equals a,t,g, or c
  SITE (1754): n equals a,t,g, or c
  SITE (1755): n equals a,t,g, or c
  SITE (1756): n equals a,t,g, or c
  SITE (1757): n equals a,t,g, or c
  SITE (1758): n equals a,t,g, or c
  SITE (1759): n equals a,t,g, or c
  SITE (1760): n equals a,t,g, or c
  SITE (1761): n equals a,t,g, or c
  SITE (1762): n equals a,t,g, or c
  SITE (1763): n equals a,t,g, or c
  SITE (1764): n equals a,t,g, or c
  SITE (1765): n equals a,t,g, or c
  SITE (1766): n equals a,t,g, or c
  SITE (1767): n equals a,t,g, or c
  SITE (1768): n equals a,t,g, or c
  SITE (1769): n equals a,t,g, or c
  SITE (1770): n equals a,t,g, or c
  SITE (1771): n equals a,t,g, or c
  SITE (1772): n equals a,t,g, or c
  SITE (1773): n equals a,t,g, or c
  SITE (1774): n equals a,t,g, or c
  SITE (1775): n equals a,t,g, or c
  SITE (1776): n equals a,t,g, or c
  SITE (1777): n equals a,t,g, or c
  SITE (1778): n equals a,t,g, or c
  SITE (1779): n equals a,t,g, or c
  SITE (1780): n equals a,t,g, or c
  SITE (1781): n equals a,t,g, or c
  SITE (1782): n equals a,t,g, or c
  SITE (1783): n equals a,t,g, or c
  SITE (1784): n equals a,t,g, or c
  SITE (1785): n equals a,t,g, or c
  SITE (1786): n equals a,t,g, or c
  SITE (1787): n equals a,t,g, or c
  SITE (1788): n equals a,t,g, or c
  SITE (1789): n equals a,t,g, or c
  SITE (1790): n equals a,t,g, or c
  SITE (1791): n equals a,t,g, or c
  SITE (1792): n equals a,t,g, or c
  SITE (1793): n equals a,t,g, or c
  SITE (1794): n equals a,t,g, or c
  SITE (1795): n equals a,t,g, or c
  SITE (1796): n equals a,t,g, or c
  SITE (1797): n equals a,t,g, or c
  SITE (1798): n equals a,t,g, or c
  SITE (1799): n equals a,t,g, or c
  SITE (1800): n equals a,t,g, or c
  SITE (1801): n equals a,t,g, or c
  SITE (1802): n equals a,t,g, or c
  SITE (1803): n equals a,t,g, or c
  SITE (1804): n equals a,t,g, or c
  SITE (1805): n equals a,t,g, or c
  SITE (1806): n equals a,t,g, or c
  SITE (1807): n equals a,t,g, or c
  SITE (1808): n equals a,t,g, or c
  SITE (1809): n equals a,t,g, or c
  SITE (1810): n equals a,t,g, or c
  SITE (1811): n equals a,t,g, or c
  SITE (1812): n equals a,t,g, or c
  SITE (1813): n equals a,t,g, or c
  SITE (1814): n equals a,t,g, or c
  SITE (1815): n equals a,t,g, or c
  SITE (1816): n equals a,t,g, or c
  SITE (1817): n equals a,t,g, or c
  SITE (1818): n equals a,t,g, or c
  SITE (1819): n equals a,t,g, or c
  SITE (1820): n equals a,t,g, or c
  SITE (1821): n equals a,t,g, or c
  SITE (1822): n equals a,t,g, or c
  SITE (1823): n equals a,t,g, or c
  SITE (1824): n equals a,t,g, or c
  SITE (1825): n equals a,t,g, or c
  SITE (1826): n equals a,t,g, or c
  SITE (1827): n equals a,t,g, or c
  SITE (1828): n equals a,t,g, or c
  SITE (1829): n equals a,t,g, or c
  SITE (1830): n equals a,t,g, or c
  SITE (1831): n equals a,t,g, or c
  SITE (1832): n equals a,t,g, or c
  SITE (1833): n equals a,t,g, or c
  SITE (1834): n equals a,t,g, or c
  SITE (1835): n equals a,t,g, or c
  SITE (1836): n equals a,t,g, or c
  SITE (1837): n equals a,t,g, or c
  SITE (1838): n equals a,t,g, or c
  SITE (1839): n equals a,t,g, or c
  SITE (1840): n equals a,t,g, or c
  SITE (1841): n equals a,t,g, or c
  SITE (1842): n equals a,t,g, or c
  SITE (1843): n equals a,t,g, or c
  SITE (1844): n equals a,t,g, or c
  SITE (1845): n equals a,t,g, or c
  SITE (1846): n equals a,t,g, or c
  SITE (1847): n equals a,t,g, or c
  SITE (1848): n equals a,t,g, or c
  SITE (1849): n equals a,t,g, or c
  SITE (1850): n equals a,t,g, or c
  SITE (1851): n equals a,t,g, or c
  SITE (1852): n equals a,t,g, or c
  SITE (1853): n equals a,t,g, or c
  SITE (1854): n equals a,t,g, or c
  SITE (1855): n equals a,t,g, or c
  SITE (1856): n equals a,t,g, or c
  SITE (1857): n equals a,t,g, or c
  SITE (1858): n equals a,t,g, or c
  SITE (1859): n equals a,t,g, or c
  SITE (1860): n equals a,t,g, or c
  SITE (1861): n equals a,t,g, or c
  SITE (1862): n equals a,t,g, or c
  SITE (1863): n equals a,t,g, or c
  SITE (1864): n equals a,t,g, or c
  SITE (1865): n equals a,t,g, or c
  SITE (1866): n equals a,t,g, or c
  SITE (1867): n equals a,t,g, or c
  SITE (1868): n equals a,t,g, or c
  SITE (1869): n equals a,t,g, or c
  SITE (1870): n equals a,t,g, or c
  SITE (1871): n equals a,t,g, or c
  SITE (1872): n equals a,t,g, or c
  SITE (1873): n equals a,t,g, or c
  SITE (1874): n equals a,t,g, or c
  SITE (1875): n equals a,t,g, or c
  SITE (1876): n equals a,t,g, or c
  SITE (1877): n equals a,t,g, or c
  SITE (1878): n equals a,t,g, or c
  SITE (1879): n equals a,t,g, or c
  SITE (1880): n equals a,t,g, or c
  SITE (1881): n equals a,t,g, or c
  SITE (1882): n equals a,t,g, or c
  SITE (1883): n equals a,t,g, or c
  SITE (1884): n equals a,t,g, or c
  SITE (1885): n equals a,t,g, or c
  SITE (1886): n equals a,t,g, or c
  SITE (1887): n equals a,t,g, or c
  SITE (1888): n equals a,t,g, or c
  SITE (1889): n equals a,t,g, or c
  SITE (1890): n equals a,t,g, or c
  SITE (1891): n equals a,t,g, or c
  SITE (1892): n equals a,t,g, or c
  SITE (1893): n equals a,t,g, or c
  SITE (1894): n equals a,t,g, or c
  SITE (1895): n equals a,t,g, or c
  SITE (1896): n equals a,t,g, or c
  SITE (1897): n equals a,t,g, or c
  SITE (1898): n equals a,t,g, or c
  SITE (1899): n equals a,t,g, or c
  SITE (1900): n equals a,t,g, or c
  SITE (1901): n equals a,t,g, or c
  SITE (1902): n equals a,t,g, or c
  SITE (1903): n equals a,t,g, or c
  SITE (1904): n equals a,t,g, or c
  SITE (1905): n equals a,t,g, or c
  SITE (1906): n equals a,t,g, or c
  SITE (1907): n equals a,t,g, or c
  SITE (1908): n equals a,t,g, or c
  SITE (1909): n equals a,t,g, or c
  SITE (1910): n equals a,t,g, or c
  SITE (1911): n equals a,t,g, or c
  SITE (1912): n equals a,t,g, or c
  SITE (1913): n equals a,t,g, or c
  SITE (1914): n equals a,t,g, or c
  SITE (1915): n equals a,t,g, or c
  SITE (1916): n equals a,t,g, or c
  SITE (1917): n equals a,t,g, or c
  SITE (1918): n equals a,t,g, or c
  SITE (1919): n equals a,t,g, or c
  SITE (1920): n equals a,t,g, or c
  SITE (1921): n equals a,t,g, or c
  SITE (1922): n equals a,t,g, or c
  SITE (1923): n equals a,t,g, or c
  SITE (1924): n equals a,t,g, or c
  SITE (1925): n equals a,t,g, or c
  SITE (1926): n equals a,t,g, or c
  SITE (1927): n equals a,t,g, or c
  SITE (1928): n equals a,t,g, or c
  SITE (1929): n equals a,t,g, or c
  SITE (1930): n equals a,t,g, or c
  SITE (1931): n equals a,t,g, or c
  SITE (1932): n equals a,t,g, or c
  SITE (1933): n equals a,t,g, or c
  SITE (1934): n equals a,t,g, or c
  SITE (1935): n equals a,t,g, or c
  SITE (1936): n equals a,t,g, or c
  SITE (1937): n equals a,t,g, or c
  SITE (1938): n equals a,t,g, or c
  SITE (1939): n equals a,t,g, or c
  SITE (1940): n equals a,t,g, or c
  SITE (1941): n equals a,t,g, or c
  SITE (1942): n equals a,t,g, or c
  SITE (1943): n equals a,t,g, or c
  SITE (1944): n equals a,t,g, or c
  SITE (1945): n equals a,t,g, or c
  SITE (1946): n equals a,t,g, or c
  SITE (1947): n equals a,t,g, or c
  SITE (1948): n equals a,t,g, or c
  SITE (1949): n equals a,t,g, or c
  SITE (1950): n equals a,t,g, or c
  SITE (1951): n equals a,t,g, or c
  SITE (1952): n equals a,t,g, or c
  SITE (1953): n equals a,t,g, or c
  SITE (1954): n equals a,t,g, or c
  SITE (1955): n equals a,t,g, or c
  SITE (1956): n equals a,t,g, or c
  SITE (1957): n equals a,t,g, or c
  SITE (1958): n equals a,t,g, or c
  SITE (1959): n equals a,t,g, or c
  SITE (1960): n equals a,t,g, or c
  SITE (1961): n equals a,t,g, or c
  SITE (1962): n equals a,t,g, or c
  SITE (1963): n equals a,t,g, or c
  SITE (1964): n equals a,t,g, or c
  SITE (1965): n equals a,t,g, or c
  SITE (1966): n equals a,t,g, or c
  SITE (1967): n equals a,t,g, or c
  SITE (1968): n equals a,t,g, or c
  SITE (1969): n equals a,t,g, or c
  SITE (1970): n equals a,t,g, or c
  SITE (1971): n equals a,t,g, or c
  SITE (1972): n equals a,t,g, or c
  SITE (1973): n equals a,t,g, or c
  SITE (1974): n equals a,t,g, or c
  SITE (1975): n equals a,t,g, or c
  SITE (1976): n equals a,t,g, or c
  SITE (1977): n equals a,t,g, or c
  SITE (1978): n equals a,t,g, or c
  SITE (1979): n equals a,t,g, or c
  SITE (1980): n equals a,t,g, or c
  SITE (1981): n equals a,t,g, or c
  SITE (1982): n equals a,t,g, or c
  SITE (1983): n equals a,t,g, or c
  SITE (1984): n equals a,t,g, or c
  SITE (1985): n equals a,t,g, or c
  SITE (1986): n equals a,t,g, or c
  SITE (1987): n equals a,t,g, or c
  SITE (1988): n equals a,t,g, or c
  SITE (1989): n equals a,t,g, or c
  SITE (1990): n equals a,t,g, or c
  SITE (1991): n equals a,t,g, or c
  SITE (1992): n equals a,t,g, or c
  SITE (1993): n equals a,t,g, or c
  SITE (1994): n equals a,t,g, or c
  SITE (1995): n equals a,t,g, or c

SEQ ID NO: 11739 - DNA, 102 bp, Homo sapiens; identical to SEQ ID NO: 5404

SEQ ID NO: 11740 - DNA, 109 bp, Homo sapiens; identical to SEQ ID NO: 5415

SEQ ID NO: 11741 - DNA, 108 bp, Homo sapiens; identical to SEQ ID NO: 5529

SEQ ID NO: 11742 - DNA, 115 bp, Homo sapiens; identical to SEQ ID NO: 9229

SEQ ID NO: 11743 - DNA, 7745 bp, Homo sapiens
gatgcttttcatcagatcattcgcgatgaaggaatctcggctttatggaatggcacatttccctcattgctgttggtcttcaatcctgccatccagttcatgttttatgaaggtttaaaacggcagcttttaaagaaacggatgaaggtaatccttgattttgaaagcagtaaaataattctgtctgacaccttcttgttgacttgattgatatggtttgttcttcctttgctttccagctttcttccttggatgtgttcatcattggtgcagtagccaaagcgattgccaccacggtgacctatcccctgcagacggtacagtcaattctgagggtgagtgctggagttctcttcgcatttagtcaaacagcattcgaatacatgtagtctcttgatttaaaacaatgttaataaagcaataaagcagttagttggtataccagaatattccctatctgttttttttcttttctttttttgagacaggatctccctctgtcacccaggttggagtaccgtggtgcaccatgggtctctataccctcgacctcctaggttcaagcagtcctcctgcctcagctgcccaagtagctgagactacatacaccaccttgtccagctaatttaaaatttttttgtgtgaagatggggtctcaccatgttttccaggcttgtctcaaagtcctggactcaagcgatcctcccaccttggccttccaaagtgctgggattataggcatgaaccattgtgcctggcccccattttttcatttgtttgatattctgcttaactaggctggctgtcattggtttagaatgaagtttgcatttgtaatttcttaggtaacataatgtctcagaaaacacagatgtggagacaagttccttaaagacctcaggaaagcataagtttgcttccttctcattcaagttgattggtttggtgccccagcagggattatcctttacaaagtcagaggttaattcctttagttcactcaggaggaatgaatgatttagcttttttgaagcactctcaaacttctgttttttatttcattcagttatttatccattcaaatatttactaagcatccacactgtgggaggacctgggcatgcagtggtaaataaaagtcataatccctgcccttatggagctagtggaagagagaatgaacaggtaaacaagcaaaataaataggtaattacaaattgaaaaaagaactataaaggaaattatttactggagaggggcatggtggggctcttcttagatagcatgattggaggtgggcttctttgagaaggaatatttaaatcaagatgcaaaggagggtaaggccctagtggggcagagtggacgaaagtgcattccaggcagggggagcatgatgtgtgtgttagtccattctcatgctgctctaaaggactgcctgagactgggtaatttataaaggaaagaggtttaattgactcacatttcagcatggctggggggcctcaggaaacttacaatcatggtggaaggggaagcaaacatgtccttcttcacatggcggcagcaaggacaagtgcagggggaactcctcctataaaaccatcagatcggttgggcgcggtggctcacgcctgtaatcccagcactttgggaggccgaggcgggtggatcatgaggtcaggagatcgagaccatcctggctaacaaggtgaaaccccgtctctactaaaaatacaaaaaattagccgggcgcggtggcgggcgcctgtagtcccagctactcgggaggctgaggcaggagaatggcgtgaacccgggaagcggagcttgcagtgagccgagattgcgccactgcagtccgcagtccggcctgggcgacagagcgagactccgtctcaaaaaaaaaaaaaaaaaaaaaaaaaaaaaaaaaaaaaaccatcagatctcatgagacttattcactaccacaagaacagtataggggaaaccacccccatgatttagttatctccacctggccctgcccttgacttgtggggattattacaattcaaggtgagatttggatggggacacagccaaaccatatcaatgtactaagaatttggtgtatcctagggactgaaagaaggcctctatggcagtagagtggctcagggtgagattgcaagagcagcagggaaactgtaggtgaggaatgtagatttttatcctcagcactttaagctgagaatatgtgatgggaagggctttaagctggggaatatgtgctgtgatttacaattgaagaagactgttgtggctattatgtggtgaattggtcagaaagctaagagagaaagccaggggcaatctagtaggaggccatttcagtaatacaggcaagagaggatggtggcctggaccacggtggtggcactggagaggagaggggtaggatgaggacagattcaagatctgttttggagaaaaatttcaaaaggcttgttgctagataaaataggggtggtagtgagaatattccagttcagaaaaattagtaccttctgttaaaagcatttttactaatatattattttaaaattggtacttaacataagggaattcagtagcatccttataaatgtattttaacacttttataatgtaaacacataatctgaagagcttagactgcagatgttctaaatgattcatttctcagaatttcttaaagaagtggaagttattaccatcaatatctaaatcatcatcctgggcatatttttttcttttgaggtagaattttccctatacctctctataaaatgaaaattattatgcttgcttcattgaaaaatttttcttaggccggacatggtggctcatgcctgtaatcccagaacttcgggaggccgaggtgggtggatcatttgaggtcaggaattcgagaccagcctggccaacatggtgaaaccacatctctgctaaaaatacaaaaattagccgggcgtggtggtacatgtctataatcccaactactcgggaggctgaggcaggagaatcacttgaacctgggaggtggaggttgcagtgagccaaaattgtgccattgcactccagcctgggtgacagagtgagaagatgtctcaaaaaaaaaaaaaaaggaaaaatttttcttattttcacttatttgattgaaatatttcactcagttgaaaaatacaggattaatgaaatctatggtactaattggataaatttattaatgtatgctataagatactactccaacataatatcctccccaggtaaaaatgaagattttaaaaaacagcaacagtacttttgttttttttccctctttcctcagtttgggcgtcatagactaaacccagaaaacagaacattgggaagtcttcggaatattctctatcttcttcaccaacgagtaaggtgagctttgtagatgcctcacattccgtgctctccttcagcagccatctctgccagggaggggttgcatttccctctctcacactactgccttggtggtggcaacctccaaaacctttcccttgcttgctgtgcttagacatttcccattttaggagcctagtacagtatgacagcattttgggaaattatggaaaagttcaggttcttattctttgttagttacaaatattcagaactccttcagaaagagaacccttctatacttcagtcaccctgagtgtgctttcatcagtggcatatcctatgatgcctcttagcaatataacatctgcctatagaataggagtactggagaagggagggggcagtggaaaaagtgataatagtgatgatgatgatgataatgatgatggtggtgttggtaagagtagctaacattttcagtggtttgccatgtggcagacactgacctagaggctacacataggtaatctcaatcctttttttttttttttttttttttggagacagagtctcgctctgttgcccgggctggagtgcagtggcgctatctccgctcacggcaagctccgcctcctgggttcacaccattctcctgcctcagcctcccaagtagctgggactacaggcgcctgccaccacgcctggctcattttttgtattttttagtagagatggggtttcactgtgtttgccaggatggtcttgatctcctgacctcgtgatctgcccttctcagcctcccaaagtgctgggattacaggtgtgagccaccgcgcccagccttgtcaatcctaacagtagctctgtgagttaagaactattgtcatttcctgtttcatttaaagaaactgacacttagtgaagtcagataagtcagggacctcctttgaagcaaaagctcttataactttattactgttcctagatacaagatactttgaaaataaatttattattaaaataaaatatgcagccaggcaaagtggctcatgcctgtaatcccaacactttggaaggctgagacaggaggatagcttgaggccaggagttcaagaccagcctgggcaaagtagtgagaccctgtctctacaaaaaatatttacaaaattagccaagcatgtggcacaaacctgtaatcacagctacacacgaggctgaagcaggagattcacttgagcccggcagattgaggctgtactgagctatgatggcaccactgtactccagcctgggctaaagaggcaagaccttgtataaaaaaaataaaaaaaaaaaaagaacattcaagggactaaaagacaaaattaggctgggcgtggtggctcacacctataatcccagcactttaggaggccaaggcaggcagatcgctttagctcaggagtttgatactggcctgggcaacatagtgagaccccgtctctacacaaataaaaaattagctaggcatcctggtgcctgcctgtagtcccagctacccaggaggctgaggtggaaggattgcttgaacccaggaggtcgaggctgcagtgagctgtgattgtgccactgcactctagcctgagcaacagagtgagaccttctatcaaaaaataaaataaaataaaagacaaagaatatgtataaagtaaaaaataaatactcactatatcaagtattgggagggatgttggagcaaccagaacttactttcttatgctgctggtgggaatatagaatggtacagctgctttggaaggcaatttggcattttctttaaaaatttttatataccacacctattataggacccagccatccacttcagggtatttacccaagagaaatgaaggcatatgtctacacaaaagcttgtatacaaatgttaataatggctttgtttttttttttttaattttttaatttttgatttttgtgggtacatagtaggtatatatttttgaggtatgtgagatgttttgatacaggcatgcaaagcataataatcacatcatggaaaatggggtatctatcctctcaaacatttattctttttgttacaaacagtcctattatactcttttagttatttttaaatgtacaattaaattattattgactatagtcacctgttgtgctagcaaatactaggtcttattcaaactatctatttttgtacctattaaccatccccaccttccccccgccactactcttcccagtagtctctggtaaccatccttctacctttatctccatgagttcaattgttttgatttttaggtccctcaaataagtgagaacatgcgatatttgtctttctgtgcctggtttgtttcacttagcagaatgacctccagttccatccatgttgttacaaacaacaaactctcattctttttgatggctgaatagtactgcattttgtataagtaccacattttctttatccatttatctgttgatggacatgtagcttgcttccaaatttaagacattatttgtaagaaccaaaaactagggcctggcacggtggctcacacctgtaatcccagcactttgggaggctgaggcgggcagatcacgaggtcaggggatcgagaccatcctggctaacatggtgaaaccccatctccactaaaaatacaaaaaaaaattagcctggtgtcgtggcgggtgcctctagtcccagctgctagggaggctgaggcaggagaatggcatgaactcgggaggcggagcttgcagtgagccgagatcgcgccactgcactccagcctgggcgacagagcgagactccgtctcaaaaaaaggaaagtactttgacaacagaagtctgtgttgaaatctaaaacctctattgcttgttcttatcaaagtagctatctaggtagcatgttctctgatgcaggagctgacttctgttttttcaaacctctttccctttagacgttttggaataatgggactctacaaaggccttgaagccaaactgctgcagacagtcctcactgctgctctcatgttccttgtttatgagaaactgacagctgccaccttcacagttatggggctgaagcgtgcacaccaacactgagacgccttcccatgaaaaattccgaagatgctcaagagggaggtttcctcctgagtgaagagaagtgattctcccttgactctggctcctgccaccacaaatgttaccctcattggcttgaaaagcatccaagggtgcacagggagtatggccaactggacctgttgtcaccttaattgtcatgctggctggttggattttggggtggcagttggactaatgtgaaaaaaacattgctgaaaacctaaaaatgaaagtttgtgagtgtttattggttttcttaagagaaatggactattttgctctcatgtgtaatgttttctatttaaatctttcttaaatataccagctgttctctttccctgaactctcccccaggttctaggacaaatttaataacatgtaattctcctcaaatacttttgtatgtctcagtgttggtgttttcctccctaaaactaacattagggctgtgccacgggcatgactttatttttgttgggcttttttttccctgcttaaggagaggtgtcttttttggatatgagctatttattttgtgaaatgaaaattgttcacccaaatgattctcttataaactatttgtaaatgtcacttattcattagtgtttgacataatttttagaatatttattttgaatcaatcctttcattacgaaagacttgaagttttgtgtccattcttacaagccctggtcagtcaagtcccaataaatggtcagcacaaaaaagatattcttgaaaattgctctttattaaggtattacgttgagtttgcaaccagatgggaaaaatcacaaaaatgagaaggggagcagatatcttgttgaggtctggatattatctccctttataaacttggtgtaggccgtatattttgaaaataaacatctggttgaggttatttcatttggaaaccttccttagagtcctgttgctcagtgtggtccatcagacggtagtactgccacaagctgagagcttgctgggcacgcaacccagagtttctgaatcctgttccgtattttaacattcccaggtgattcacagccacattaaagttcaggagaccataggacccctgacccatgagaagaagtgattggtttcgattatagacatcaagataaagatttttctcaaaggaaagagattaatgtattaaaacaacctctgaaaaatc

SEQ ID NO: 11744 - DNA, 98 bp, Homo sapiens
ttgagatggagtttcgcccttgttgcccaggctagagtgcaatggcacaatctcggctcaccgcaacctccgcctcccgggttcaagcaattctcctg

SEQ ID NO: 11745 - DNA, 116 bp, Homo sapiens
tttttttttttttggaaatggagtcttgctctgtcacccaggctggagtgcagtggcacaatcttggctcactgcaacctctgcctcccgggttcaagcaattctcctgcctcagc

SEQ ID NO: 11746 - DNA, 6218 bp, Homo sapiens
gaaatgaacaagttagctttttcacaacgggtttgctgccagaacacaggtgtcgtgaaaactacccctaaaagccaaaatgggaaaagaaaagactcatatcaacattgtcgtcattggacacgtagattcgggcaagtccaccacttctggccatctgatctacaaatgcggtggcatcgacaaaagaacaattgaaaaattgcagaaagaggctgctgagatgggaaagggctccttcaagtatgcctgagtcttggataaactgaaagctgagcgtgaacgtggtatcaccattgatatctccttgtggaaatttgagaccagcaagtactatgtgactatcattgatgccccaggacacagagacttcatcaaaaacatgattacagggacatctcaggctggttgtgctgtcctaattgttgctgctggtgttggtgaatttgaagctggtatctccaagaatgggcagacccgagagcatgcccttctggcatatacactgggtgtgaaacaactaattgttgatgttaacaaaatggattccactgagccaccctacagccagaagagatatgaggaaattgttaaggaaatcagcacttacattaagaaaattggctacaaccccaacacagtagcatttgtgccaatttctggttagaatggtgacaacatgctggagccaagtgctaacatgccttggttcaagggatggaaagtcacccataaggatggcaatgccagtggaaccatgctgcttgaggctctggactgcatcctaccaccaactcgtccaactgacaagcccttgcgcctgcctctccaggatgtctacaaaattggtggtattggtactgttcttgttggccgagtggagactggtattctcaaacctggtatggtggtcacctttgctccagtcagcgttacaacagaagtaaaatctgtcgaaatgcaccatgaagctttgaatgaagctcttcctggggacaatatgggcttcaatgtcaagaatgtgtctgtcaaggatgttcatcgtggcaacgttgctggtgacagcaaaaatgacccaccaatggaagcagctggcttcactgctcaggtgattatcctgaaccatccgggccaaataagctctggctatgcacctgtattggattgccacacagctcacattgcatgcaagtttgctgagctgaaggaaaagattgatcgccgttctggtaaaaagctggaagatggccctaaattcttgaagtctggtgatgctgccattgctgatatggttcctggcaagcccatgtgtgttgagagcttctcagactatccacctttgggtcgctttactgttcatgatatgagacagacacttgcggtgggtgtcatcaaagcagtggacaagaaggctgctggagctggcaaggtcaccaagtctgcccagaaagctcagaaggctaaatgaatattatccctaatacctgccaccccactcttaatcagtggtggaagaacggtctcagaactgtttgtttcaattggccatttaagtttagtagtaaaagactggttaatgataataatgcaacataaaaccttcagaaggaaaggagaatgttttgtggaccactttggttttctttttcgcatgcagcagttttaagttattagtttttaaaatcagtactttttaaatggaaacaacttgaccaaaaatttgtcacagaattttgagacccattaaaaaagtttaatgagaaaaaaaaaaaagaaatgaacaagttacttgaaaatataatttataaaaatgatacaaaaataagtagaacacctgaattgtctaattctatttaagaaatttattttatactggaaaaatcttcccgcagggaaatctccaagccaagagagatttactggggatatttctagacagttaaagaagaaataacactaactttacacaaattcctcaagaaatatttttaaaagaagggtaccgtttccaacttattttataagttcctcatagctttgataacagaactgaacaaagatatgacaaaaaaggaaactgacaggccaatagctctcataaagaaagatacacaatcttaaaattatcaaagtaaaaccagtgatctaaaagataatatatcatatccaagtggtttcatttgaaaaatgaagtttgtttacaaatactcaaaaatcaattaatttaaatttctataataaaacaaaaaggaacaaaattacatgataatttcattagattcaggaaaagcatttgatgaaatgcaacacatatttatgctttaaaaaataacttttaggaaataagaaatgcaaaggaactttcttactctgacaaaatctatgtctaaaaagacttaaacaaatattctacttaatggtaaaagactgaaagcaattaccttgagatactgaatgagtcaaggatacaatgtctaaatgtaagtgcaatgagagatgaaaaaaataagagcttaaagataagtaaaaaatctttcattcagaagttacacaatattgaacatagaaattcaaaaataatcttcataagtaaactattagacatattaggtaaaattagtagagtaaatatataaacactatatttctgcatactagctaaaaaagaaaataaattttaatggtactattaataatagtatcagaaacacaatatttataaaaataaattcaactaaattatgtaagacctctacacataaaattacaaagcattgttgggagaaattttaaaagcccgaaataaataaagggatataccatggtcattgattagaagtttcagtgtcgtagagatgttagtccttcctagattgattcagttcaatcctaatcaaattttcagcatgtttttgtgttagaatgtaggaaaattcaacatattaattcttaaatatatatgaaacttcaaaggactaagaaaatcaagacaattttgtttgtttgttttgaggcagggtctcactctgtcgccaaggctggagtgcaatggcgtggtcacggctgaccgtaaccctgacctcccatgctcaggtgatccttttacctcagtctcccaggtggctgggactacaggggcatgctactgtgcctgatttatttttgtattttttgtagagacagggttttactatgttggagaccacactggtctccaactcttgggctcaagcagtctgcctgccttggtctaccaaattgccaagtgtgagccacagtgcccagccccaggacaattttgaagcaaaaaaagatttattataatgttacaacaattaagataatatgatgtataaacacgataatcaattaatccagtgaaacagtactgagtcccaaaaggaatcacatgtttgcagttcactgaaagctggcaaagctgatactacaacccagtaaataaggaacactcttcccaggcacggtggctcatgtctgtaatcacagcactttgggaggccaacgcaggtggatcacctgaagtcaggtgtttgagaccagcctggccaacatggcgaaatcctgtccctactaaaaatacaaaaattagctggccgtggtggtgctgcctgtaatcccagctactcagccagctgaggcaggagaatcacttgaacccagaaggcagaggttgcagtgagctgagatcatgccactgcactccagcctgggcgacagagtgagactccacctcaaaaaaaaaaaaaaaaactctttataataagttgtggtaggtcatatgagattgggtatttatataaaaatatttatctatcttaaccccatgcttatactaccacaaaagtcaatagcagatgatcgcagacacaaatggaaggctaaaatacaaacacttctggaaaataatataagataatattttatgatgttgaggtaggcaaagatttcttaaacagaacataaaaagtgctactcaaaaaggaaaagactgatacattacatttaagtttagaacatccatttattaaatgcactagaagagaagaaaaattcaagtcatagaatgagagaaggtatttccaaaacatatatccaacaaataactcatacctggaatatattttttgaaaactgctacttgtcaataaagcaaatacagacaaaccaatataaaaataagcaaaacatttcaaaaaatgatatgcaaatagcagtaagtatatgacaagatactccactttgacagttatcaaggaaatgaaaattaaaaccactatgaagtacctctatattctcaccagaataactaaaataaaagggactgatttatcaaggatttggaggaactggcgctcccataaactgctggtgggtgtgctaattgacagaaccaccttggaaacaggtaccgtcaactaaagtcaatcacatatatagcttgcaattcagtaattctagttttagggatttactcctgaaaaatagatgcatatgtgcagaatagatatataacagtgttcctagcagcaccattcataatagtcaaaacttgcaaacaattcagagtattcattggcagtagaatcgataaataaattgtggtattggccgggcatggtggctcacacttgtaatctcagcactttgggtaacctaggcgggcagatcacctaaggtcaagagttcaggaccagcccggccaacaccgtgaaactccgtctctaccaaaaatacaaaaaattagcagagcatggtggcgcatgcctgtaatcctagctactcaggaggctgaagtaggagaatcacttgaacctggaaggtggaggttgcagtgagccgagatcatgccactgcactccagcctgggcaacagactctgtctcaaaaaaaatgtggtataatcatacaatcatgtactagaaagcaatgaaaatatatgaaatattgcctcaagttttccttgagtggctgaatttgatttaggttcttgtctcctcctatgtttatcaccctgtgtatgctaccataatagaacctgttagaatagacactttagtagtcactggtccaccagctatattctaggataagctgcaaacaattttttttgtggtcaagagctttatcttatatgactttgtatttatagagtcaaacttagccagtgcccaatgaattattattgaataaatgagtaaccagataaatttttaaaaaagaaatattgcctcatgcactaacatgattaattttaattataatattatgttttacaaacataagattgagcaaagaagtcagaaaccaaaaagagcattgtattatttaattatattaagttcaagaaaccggcaaaactaatctatgtggatgaaagtcagtatggtagtttttttggagcaatgattgggaaagtgtataaggagtgcttctgttgtgatggtcatagattatttcacgatctagatagttttaaataaacatgttcatattgtgacaattcactaagctgatgatttattcagtttaccgtgtgcaaatatttttgaatagatgagtaattaatttatctattaaatagaatagataaatgaatcaattaatatgtaaataaagaattggctcagccaaaaaagagccaattgtaaatattatgataaaatcaagagatgagtgaatttcaagaaagagtggacggttaacagtgcctattgctgaaaagttaaaaggcagtttttttaaggacactgtctgtgataatgaggaggatattgcctctctctggatacgcatcagttttgaggggttccagatttaggatgagatggtctcactctcacactactgattgctggtctaaagggggtgacagtgtttatgataaagaggtttattggtactgttaagtgtttggggtttggatttggggcagggggtttctctgttttttgtggagtttttaaatgaaattaaccaataaaattaacccaatagttcattgttcttttaaatagacacagtcccaaaaaagtctaattaaaacgtatctaggccaggtgtggtggctcaccctgtaaccccagtactttgagaggcagaggcagaagaatcacccaagagttcaagaccagcctgggcaagattgtgagatactctagctacaaaaaaaaaaaaaaaaaaaaaaaatttaaacatta

SEQ ID NO: 11747 - DNA, 1765 bp, Homo sapiens
gctttttcgcaacgggtttgccgccagaacacaggtgtcatgaaaactacccctaaaagccaaaatgggaaaggaaaagactcatatcaacattgtcgtcattggacacgtagattcgggcaagtccaccactactggccatctgatctataaatgcagtagcatcgacaaaagaaccattgaaaaatttgagaaggagactgctgagatgggaaagggctctttcaagtatggctgggtcttggataaactgaaagctgagcgtgaacgtggtatcaccattgatatctccttgtggaaatttgagaccagcaagtactatgtgactatcactgatgctccaggacacagagacttcatcaaaaacatgattacagggacatctcaggctgactgtgctgtcccgattgttgctgctggtgttggtgaatttgaagctggtatctctaagaatgggcagacccgagagcatgcccttctggcttacacactgggtgtgaaacaactaattgttggtgttaacaaaatggattccactgagccaccctacagccagaagagatatgaggaaattgttaaggaagtcagcacttacattaagaaaattggctacaaccccgacacagtagcatttgtgccaatttctggttggaatggtaacaacatgctggagccaagtgctaacatgccttggttcaagggatggaaagtcacccgtaaggatggcaatgccagtggaaccatgctgcttgaggctctggactgcatcctaccaccaactcgtccaactgacaagcccttgcgcctgcctctccaggatgtctacaaaattggtggtattggtagtgttcctgttggccgagtggagactggtattctcaaacccggtatggtggtcacctttgctccagtcaacgttacaacagaagtaaaatctgtcgaaatgcaccatgaagctttgggtgaagctcttcctggggacagtgtgggcttccatgtcaagaatgtgtctgtcaaggatgttcgtcgtggcaacgttgctggtgacagcaaaaatgacccaccaatggaagcagctggcttcactgctcaggtgattatcctgaaccatccaggccaaataagcgctggctatgcccctgtattggattgccacacggctcatattgcatgcaagtttgctgagctgaaggaaaagattgatcgccgttctggtaaaaagctggaagatggccctaaattcttgaagtccggtgatgctgccattgttgatatggttcctggcaagcccatgtgtgctgagagcttctcagactatccacctttgggtcgctttgctgttcgtgatatgagacacacagttgcggtgggtgtcatcaaagcagtggacaagaaggctgctggagctggcaaggtcaccaactctgcccagaaagctcagatggctaaatgaatattatccctaatacctgccaccccactcttaatcagtggtggaagaacggtctcagaactgtttgtttcaattggccatttaagtttagtagtaaaagactggttaatgataacaatgcatcgtaaaaccttcagaaggaaaggagaatgttttgtggaccactttggttttcttttttgcatgtggcagttttaagttattagtttttaaaatcagtactttttaatggaaacaacttgaccaaaaatttgtcacagaattttgagacccattaaaaaagtttaatgagaaaaaaaaagaaaaaaggaa

SEQ ID NO: 11748 - DNA, 2470 bp, Homo sapiens
gagataccatctcacgccagttagaatgacgatcattaaaaagtcaggaaacttttttgtttttttctcaatgggtttgccaccagaacacaggtatcgtgaaaactacccctacctataagccagaacgagaaaggaaaagactcatatcaacactgtgatcatcggacacgtagattcgggcaagtccaccactactggccatctgatctacaaatgcggtggcgtcgacaaaagaaccatcgaaaaatttgagaaggaggctgctgagatgggaaagtgctccttcaagtatgcctgggtcttggataaactgaaagctgagcgtgaacatggtatcaccattgatatctctttgtggaaatttgagaccagcaagtactatgtgactatcattgatgccccaggacacagagacctcatcaaaaacatgattacagggacatctcaggctgactgtgctgtcttgattgttgctgctggttttggtgaatttgaagctggtatctccaagaatgggcagacccgagagcacgcccttctggcttacacactgggtgtgaaacaactaattgttggtgttaacaaaatggattccactgagccaccctacagccataagagatatgaggaaattgttaaggaagtcagcacttacattaagaaaattggccacaacaccgacacagtagcatttgtgccagtttctggttggaatggtgacaacacgctggagccaagtgctaacatgccttggttcaagggatggaaagtcacccgtaaggatggcaatgccagtggaaccacgctgcttgaggctcttgactgcatcctaccaccaactcgtccaactgacaagcccttgtgcctgcctctccaggatgtctacaaaattggtggtattggtactgttcctgttggctgagtggagactggtgttctcaaacctggtatggtggtcacctttgctccagtcaacgttgcaacagaagtaaaatctgttgaaatgcaccatgaagctttgagtgaagttcttcctggggacaatgtgggcttcaatgtcaagaatgtgtctgtcaaggatgttcgtcgtggcaacgttgctggtgacagcaaaaaggacccaccaatggaagcagctggcttcactgctcaggtgattatcctgaaccatccaggccaaataagtgctggctatgcccctgtattggattgccacacggctcacattgcatgcaagtttgctgagctgaaggaaaagactgatcgccattctggtaaaaagctggaagatggccctaaattcttgaagtctggtgatgctgccattgttgatatggttcctggcaagcccgtgtatgttgagagcttctcagactatccacctttgggtcgctttgctgttcatgatatcagacagacagttgcggtgggtgtcatcaaagcagtggacaagaaggctgctggagctggcaaggtcaccaagtctgcccagaaagctcagaaggctaaataaatattatccctactacctgccaccccactgttaatcagtggtggaagaatggtctcagaactgtttgtttcaattggccattgaagtttagtagtaaaagactggttaatgataacaatgcatcataaaaccttcagaaggaaaggagaatgttttgtggaccactttggttttctttctttgcatgtggcagttttaagttattagtttttaaaatcagtactttttactggaaacaacttgaccaaaaatttgtcacagaattttgagacccattaaaaaagtttaatgaaaaaataaaataaaataaaaaattaaaagttaggaaacaacagatgctggagaggatgtggagaaataggaaagcttttacattgttggtgggattgtaaattagttcaaccattgtggaagacagtgtggtggtttctcaaggatctagaaccagaaatatcatttgacccagcaatcccattactgggtatatacccaaaggattataaatcattctactgtaaagacacatgcacacgtatgtttattgcagcactgttcacaatagcaaagacttggaaccaacccaaatgcccattaatgatagactggataaagaagatgtggcacatatacaccatggaatactatgcagacataaaaaaggatgagttcatgtccttttcagggacctggatgaagctggaaaccatcattctcagcaaactaacacaggaacagaaaaccaaacaccacatgttctcactcataagtgggagttgaacaatgagaacacttggacacagggaggggaacatcacacactggggcctgtcgggggtgggggtgctaggggagagagagcattagcagaaatacctaatatagatgacgggttgataggtgcagcaaacctccgtggcacgtgtatacctatgtaacaaacctgcacattctgca

SEQ ID NO: 11749 - DNA, 2276 bp, Homo sapiens
atagcttttcgcaacaggtttgcaacagaacacaggtgtcatggaaactacccctaaaagccaaaatgggaaaggagaagactcatatcaacattgtcgtcaatggacacatagattcgggcaagtccacctctactggccatctgatctacaaatgtggtggcatcaacaaaagaagcattaagaaatttgagaagaaggctgctgagatgggaaagggctccttcaagtaagcctgggtcttggataaactgaaagctgagcgtgaatgtggtatcaccattgatacctccttgtggaaatttgagaccagcaagtactgaatgactatcattaatgcccctaaggaatgagaccaccacttctcctgttgtccttcccagcttctacccaaccttcccttttccctagtttataagacaggagaaaagggagaaagcaaaaagttggaaagaaacaaaagtaagataaatagctagacgactttggtgccaccacctggccctggtggttaaaataataataataatattaacccctgaccaaaactactggtgttatctgtaaattccagacattgtatgagaaagcactgtaaaactttttgttctgttagctgatgtatgtagcccccagtcacgttcctcatgcttacttgatctattatgaccctttcacatggaccccttagagttgtaagcccttaaaagggctaggaatttcttttttggggagtttggctcttaagacgcgagtctgccgacgctcccggccgaataaaaacttcttccttctttaatccggtgtctgaggagttttgtctgtgactcgtcctggtatatcccaggacacagagacttcatcacaaacatctttacagggacatctcaggctgactgtgctgtcctggttgttgctgctggtgttggtgaatttgaagctggtatctccaagaactggcagacctgagagcatgcccttctggcttacacattgggtgtgaaataactaatcactggtgttaacaaaatggattttattgagccaccctacaaccagaagagatatgaggaaatcattaaggaagtcagcactatattaagaaaattggctacaaccctgacacagtagcatttgtgccaatttctggttggaatagtgacaacatgctggagccaagtgctaacatgccttggttcaagggatggaaagtcacccgtaaggatggcaatgccagtggaaccatactgcttgaggctctggactgcatcctaccaccaactcgtccaactgacaagccctgcttctccaggatgtctacaaaattggtggtattggtactgttcctgatggccaagtggagactgttgctctcaaacctggtgtggtgatcacctttgctccagtcaacactacaactgaagtaaaatctgtcaaaatgcaccatgaagctttgagtgaagctttttctggggacaatgtgggcttccatgtcaagaatgtgtctgtcaaggatattcattgtagtaacaatgctggtaactgcaaaaatgacccaccaatggaagcagctggattcactgctcaggtgatctatcctgaaccatccaggccaagtcagtgctggctatgcccctgtactagattgccacatggctcacattgcatgcaagtttgctgagctgaaggaaaagattgatcgctcttctggtaaaaagctggaagacggccctaaattcttgaaatctggtgatgttgccatcattgatatggttcctggtaagcccatgtgtgttgagagcttctcagactatccacctctgggttgctttgctgcttgtgatatgagacagacagttgcactgggtgtcatcaaagcagcggacaagaaggcagctggagctggcaaggtcaccaagtatccccagaaagctcagaaggctaaatgaatattatccctaatacctgccaccctggtattaagcagtggtggaagaatggtcttagaactgtttgtttcagttggctatttaagtttagtagtaaaagactggttaatgataacaatgcatagtaaaactttcagaaggaaaggagaatgttttgtggaccactttggttttctcttttgcatgtggcagttttaatttattagtgtttaaaatcagtgctttttaatggaagcaacttgaccaaaaatttgtcacagaattttgagacccattaaaaaagtttaatgagaaaaaaaaaaaaagaaagtcacataaacagaatcc

SEQ ID NO: 11750 - DNA, 1819 bp, Homo sapiens
aaaagaatcaaaattttgacctttttcgcaacgggtttgccgccagaacacaggtgtcgtgaaaactacccctaaaagccaaaatgggaaaggaaaagactcatatcaacattgtcgtcattggacacgtagattcaggcaagtccaccactactggccatctgatctataaatgcggtggcatcgacaaaagaaccattgaaaaatttgagaaggaggctgctgagatgggaaagggctccttcaagtatgcctgggtcttggataaactgaaagctgagcgtgaacgtggtatcaccattgatatctccttgtggaaatttgagaccagcaagtactatgtgactatcattgatgccccaggacacagggacttcatcaaaaacatgattacagggacatctcaggctgactgtgctgtcctgattgttgctgctggtgttggtgaatttgaagctggtatctccaagaatgggcagacccgagagcatgcccttctggcttacacactgggtgtgaaacaactaattgtcggtgttaacaaaatggattccactgagccaccctacagccagaagagatatgaggaaattgttaaggaatcagcacttacattaagaaaattggctacaaccccgacacagtagcatttgtgccaatttctggttggaatggtgacaacatgctggagccaagtgctaacatgccttggttcaagggatggaaagtcacccgtaaggatggcaatgccagtggaaccacgctgcttgaggctctggactgcatcctaccaccaactcatccaactgacaagcccttgcgcctgcctctccaggatgtctacaaaattggtggtattggtactgttcctgttggccgagtggagactggtgttctcaaacccggtatggtggtcacctttgctccagtcaacgttacaacggaagtaaaatctgtcgaaatgcaccatgaagctttgagtgaagctcttcctggggacaatgtgggcttcaatgtcaagaatgtgtctgtcaaggatgttcgtcgtggcaacgtcgctggtgacagcaaaaatgacccaccaatggaagcagcgggcttcactgctcaggtgattatcctgaaccatccaggccaaataagcaccggctatgcccctgtattggattgccacacggctcacattgcatgcaagtttgctgagctgaaggaaaagattgatcgccgttctggtaaaaagctggaagatggccctaaattcttgaagtctggtgatgctgccattgttgatatggttcctggcaagcccatgtgtgttgagagcttctcagactatccacctttgggtcgctttgctgttcgtgatatgagacagacagttgcggtgggtgtcatcaaagcagtggacaagaaggctgctggagctggcaaggtcaccaagtctgcccagaaagctcagaaggctaaatgaatattatccctaatacctgccaccccactcttaatcagtggtggaagaatggtctcagaactgtttgtttcaattggccatttaagtttagtagtaaaagactggttaatgataacaatgcatcgtaaaaccttcagaaggaaaggagaatgttttgtggaccactttggttttcttttttgcgtgtggcagttttaagttattagtttttaaaatcagtactttttaatggaaacaactggaccaaaaatttgtcacagaattttgagacccattaaaaaagttaaatgagaaaaaaaaaaaaagaatcaaaattttgaacagacacttcaactaaaatacatatgt

SEQ ID NO: 11751 - DNA, 2574 bp, Homo sapiens
aaaataaataaataataataatattttgctttttcgcaacgggtttgccgccagaacacaggtgtcgtgaaaactacccctaaaagccaaaatgggaaaggaaaagactcatgtcaacattgtcgtcattggacacgtagattcgggcaagtccaccactactggccatctgatctataaatgcggtggcatcgacaaaagaaccattgaaaaatttgagaaggaggctgctgagatgggaaagggctccttcaagtatgcctgggtcttggataaactgaaagctgagcgtgaacgtggtatcaccattgatacctccttgtggaaatttgagaccagcaagtactatgtgactatcattgatgccccaggacacagagacttcatcaaaaacatgattacatggacatctcaggctgactgtgctgtcctgattgttgctgctggtgttggtgaatttgaagctggtatctccaagaatgggcagacccgagagcatgcccttctggcttacacactgggtgtgaaacaactaattgtcggtgttaacaaaatggattccactgagccaccctacagccagaagagatatgaggaaattgttaaggaagtcagcacttacattaagaaaattggctacaaccccgacacagtagcatttgtgccaatttctggttggaatggtgacaacatgctggagccaagtgctaacatgccttggttcaagggatggaaagtcacccgtaaggatggcaatgccagtggaaccacgctgcttgaggctctggactgcatcctaccaccaactcgcccaactgacaagcccttgcgcctgcctctccaggatgtctacaaaattggtggtattggtactgttcctgttggccgagtggagactggtgttctcaaacccggtatggtggtcacctttgctccagtcaacgttacaacggaagtaaaatctgtcgaaatgcaccatgaagctttgagtgaagctcttcctggggacaatgtgggcttcaatgtcaagaatgtgtctgtcaaggatgttcgtcgtggcaacgttgctggtgacagcaaaaatgacccaccaatggaagcagctggcttcactgctcaggtgattatcctgaaccatccaggccaaataagcgccggctatgcccctgtattggattgccacacggctcacattgcatgcaagtttgctgagctgaaggaaaagattgatcgccgttctggtaaaaagctggaagatggccctaaattcttgaagtctggtgatgctgccattgttgatatggttcctggcaagcccatgtgtgttgagagcttctcagactatccacctttgggtcgctttgctgttcgtgatatgagacagacagttgcggtgggtgtcatcaaagcagtggacaagaaggctgctggagctggcaaggtcaccaagtctgcccagaaagctcagaaggctaaatgaatattatccctaatacctgccaccccactcttaatcagtggtggaagaacggtctcagaactgtttgtttcaattggccatttaagtttagtagtaaaagactggttaatgataacaatgcatcgtaaaaccttcagaaggaaaggagaatgttttgtggaccactttggttttcttttttgcgtgtggcagttttaagttattaggttttaaaatcagtactttttaatggaaacaacttgaccaaaaatttgtcacagaagtttgagacccattaaaaaagttaaatgagaaaaaataataataataataataataataataataataataataattaataatattttgagaaactgccatactgtttccacagtggctgcaccatttacattcctctttttatgttttacacatctgctgtttggtgaaattttctacagagtagcttttaactctgagcgctgtacttcctttgaccctggacttcacgcccaaacatcagtaaactgtcacagaaggtagtaataatgtgtattcctggaagccatttctacatgggatgatcagtgataactattaaattaaatgactgcaagccacacatgcagtccattcaatccaaactaaatgcattcccaattcaacttcccctcagtcaaattccccaaatgcctgtgactgcttcagtgtctcccaacaccaggggacatgtgatagagggcaggtcccatagaaagagacagcaggctggctgtggtggcttacgcctgtaaccccagaactttgggagacggaggcaggcggatcatctgaggtcaggagttcgagatgagcctggccaacatggtgaaaccccgtctctactaaaaatacaaaaattatccgggtgtgtgtggtggtatgcctgtagttccagctactagggaggctgagtcaggagaatcacttgaactcaggaggtggagtttgcagtgagctgagatggcgccactgcactccagcctgggcaacagagcaagactctgtctcacaaaaaaaaaaaaaaaaaaaaaaaaaaaaaaaaaaaaagaaagaaaagaaaagaaaagaaa

SEQ ID NO: 11752 - DNA, 2480 bp, Homo sapiens
aaaccacaatgagataccatctcacgccagttagaatgacgatcattaaaaagtcaggaaacttttttgtttttttctcaatgggtttgccaccagaacacaggtatcgtgaaaactacccctacctataagccagaacgagaaaggaaaagactcatatcaacactgtgatcatcggacacgtagattcgggcaagtccaccactactggccatctgatctacaaatgcggtggcgtcgacaaaagaaccatcgaaaaatttgagaaggaggctgctgagatgggaaagtgctccttcaagtatgcctgggtcttggataaactgaaagctgagcgtgaacatggtatcaccattgatatctctttgtggcaatttgagaccagcaagtactatgtgactatcattgatgccccaggacacagagacctcatcaaaaacatgattacagggacatctcaggctgactgtgctgtcttgattgttgctgctggttttggtgaatttgaagctggtatctccaagaatgggcagacccgagagcatgcccttctggcttacacactgggtgtgaaacaactaattgttggtgttaacaaaatggattccactgagccaccctacagccataagagatatgaggaaattgttaaggaagtcagcacttacattaagaaaattggccacaacaccgacacagtagcatttgtgccagtttctggttggaatggtgacaacacgctggagccaagtgctaacatgccttggttcaagggatggaaagtcacccgtaaggatggcaatgccagtggaaccacgctgcttgaggctcttgactgcatcctaccaccaactcgtccaactgacaagcccttgtgcctgcctctccaggatgtctacaaaattggtggtattggtactgttcctgttggctgagtggagactggtgttctcaaacctggtatggtggtcacctttgctccagtcaacgttgcaacagaagtaaaatctgttgaaatgcaccatgaagctttgagtgaagttcttcctggggacaatgtgggcttcaatgtcaagaatgtgtctgtcaaggatgttcgtcgtggcaacgttgctggtgacagcaaaaaggacccaccaatggaagcagctggcttcactgctcaggtgattatcctgaaccatccaggccaaataagtgctggctatgcccctgtattggattgccacacggctcacattgcatgcaagtttgctgagctgaaggaaaagactgatcgccattctggtaaaaagctggaagatggccctaaattcttgaagtctggtgatgctgccattgttgatatggttcctggcaagcccgtgtatgttgagagcttctcagactatccacctttgggtcgctttgctgttcatgatatcagacagacagttgcggtgggtgtcatcaaagcagtggacaagaaggctgctggagctggcaaggtcaccaagtctgcccagaaagctcagaaggctaaataaatattatccctactacctgccaccccactgttaatcagtggtggaagaatggtctcagaactgtttgtttcaattggccattgaagtttagtagtaaaagactggttaatgataacaatgcatcataaaaccttcagaaggaaaggagaatgttttgtggaccactttggttttctttctttgcatgtggcagttttaagttattagtttttaaaatcagtactttttactggaaacaacttgaccaaaaatttgtcacagaattttgagacccattaaaaaagtttaatgaaaaaataaaataaaataaaaaattaaaagttaggaaacaacagatgctggagaggatgtggagaaataggaaagcttttacattgttggtgggattgtaaattagttcaaccattgtggaagacagtgtggtggtttctcaaggatctagaaccagaaatatcatttgacccagcaatcccattactgggtatatacccaaaggattataaatcattctactgtaaagacacatgcacacgtatgtttattgcagcactgttcacaatagcaaagacttggaaccaacccaaatgcccattaatgatagactggataaagaagatgtggcacatatacaccatggaatactatgcagacataaaaaaggatgagttcatgtccttttcagggacctggatgaagctggaaaccatcattctcagcaaactaacacaggaacagaaaaccaaacaccacatgttctcactcataagtgggagttgaacaatgagaacacttggacacagggaggggaacatcacacactggggcctgtcgggggtgggggtgctaggggagagagagcattagcagaaatacctaatatagatgacgggttgatgggtgcagcaaacctccgtggcacgtgtatacctatgtaacaaacctgcacattctgca

SEQ ID NO: 11753 - DNA, 1543 bp, Homo sapiens
ataaactgaaagctgagcgtgaacgtggtatcaccattgatatctccttgtggaaatttgagaccagcaagtactatgtgactatcactgatgctccaggacacagagacttcatcaaaaacatgattacagggacatctcaggctgactgtgctgtcccgattgttgctgctggtgttggtgaatttgaagctggtatctctaagaatgggcagacccgagagcatgcccttctggcttacacactgggtgtgaaacaactaattgttggtgttaacaaaatggattccactgagccaccctacagccagaagagatatgaggaaattgttaaggaagtcagcacttacattaagaaaattggctacaaccccgacacagtagcatttgtgccaatttctggttggaatggtaacaacatgctggagccaagtgctaacatgccttggttcaagggatggaaagtcacccgtaaggatggcaatgccagtggaaccatgctgcttgaggctctggactgcatcctaccaccaactcgtccaactgacaagcccttgcgcctgcctctccaggatgtctacaaaattggtggtattggtagtgttcctgttggccgagtggagactggtattcatcaaacccggtatggtggtcacctttgctccagtcaacgttacaacagaagtaaaatctgtcgaaatgcaccatgaagctttgggtgaagactcttcctggggacagtgatgggcgttccagtgtcaagaatagtgtcatgctacaaggaatgttctgtcgatggcaacgattgacatggctgacagcgaaaaatgacccaccaatggaagcagctggcttcactgctcaggtgattatcctgaaccataccaggccaaataagcgcgtggctatgccccatgtaattggattgtccacacggctacatattgcatgcaagtttgctgagctgaaggaaaagattgatcgccgttctggtaaaaagctggaagatggccctaaattcttgaagtccggtgatgctgccattgttgatatggttcctggcaagcccatgtgtgctgagagcttctcagactatccacctttgggtcgctttgctgttcgtgatatgagacacacagttgcggtgggtgtcatcaaagcagtggacaagaaggctgctggagctggcaaggtcaccaactctgcccagaaagctcagatggctaaatgaatattatccctaatacctgccaccccactcttaatcagtggtggaagaacggtctcagaactgtttgtttcaattggccatttaagtttagtagtaaaagactggttaatgataacaatgcatcgtaaaaccttcagaaggaaaggagaatgttttgtggaccactttggttttcttttttgcatgtggcagttttaagttattagtttttaaaatcagtactttttaatggaaacaacttgaccaaaaatttgtcacagaattttgagacccattaaaaaagtttaatgagaaaaaaaaagaaaaaaggaa

SEQ ID NO: 11754 - DNA, 9086 bp, Homo sapiens
ctggcgacctgacgctgcggaggctcgagcggcgtatccataccacccagctgttcgccgcgggaacccgccggcccgcaggtgacccagcgctggaaaaacgccagcgacgtggcctggcgagctggcgcggggcaaggaccacccgcgcccgccttgccgccccagcctccctccctaggaagcagggtgcgccccggtgcgcgcggggcttccccggaccggcgttccagtccctctccggcttccgcccaccccggccccactgagagcagaaatgtgatctctgccctgagaaaatgctcgtggccagtgactacccctaacgcacaataatatggctccgatgggctcaaaggtattggttttttgttttgttttgagacaaggtctcactcggatgcccaggctggagtgcaattgcgtgatcttgactcactgcaacctccgcttcccgggctcaagcgattctcctgcctcagcctcccaagtagctgggattagcaggcatgcgccaccacgcccggctaattttgtattttcagtagacagggtttcaccatgttggccaggctggtctcgaactcctggcctcaaattatacgtccgcctcggcctcccaaggtgctggtattataggcgtgagccaccgcgcccggtccagtgttggttcttaaacgcgagaattgagatctcccttcacctaatgaaagtctcggccactatcgcaacattcagaacacccagtctgtgttgcacaatatgttacttaggtataaatcaaggattcatgtaattttgtcattccttgcgtgatattttaaaaaacattctgtgtaaggtatttataaagcgtttactattaccgcaatcacaggggcttgaggaaaaactttgactgtggcccgggcaccgtggctcacgcctgctaatcccagcactttgggagaccgagccgggtggatcacttgaggtcagcagttcgagaccagcctggccaacatggtgaaacccccgtctcttctaaaaatacaaaaatttgtggggcgcgcttgtagtcccagctacttgggaggctgaggcaggaggaatcgcttgaactcgggaggcagagcttgcagtgagccgagatcgcgccactgcactccagcctgggcaacagagtagaactccgtctcaacagaacgaaatacaaagaaagacagaaaatacaagtggactgtgaaaactgaaaggactagaaaaactacactacaaagatacagaaaccaagaaagcaccatagcgtttgccttcaactgcttcccaacttgttttcctcttccaatttgattgtggtttcctctccagaaggaactccacagtacttagcgttggccacatagtaggttctcaaatacttgttaataaataagtttgttcgagaagctgggcaatgatattctacagctggaagaagaaacataatgatctagtaattagctcattaaaaataaacgttcttctttcctcagaggagcatttcccaaggcctgccttgatagccatccaaaaaggccaagctcatccaatcttgccctagatttatgctaaaatgcagttacaatcgataggatgacagaaaacgacagcacttatttaaatataataggcacttatttaaataggagaagctgtgacttcatagcaagtgttggggttaggaaactgggtggataaacttgctgatgctgtagatcttagcctctacatgagatcatgtggaaaatctgaaagcattttaggttccttatgtttgcaatcaaataactgtacaccttttaatttaaaaagtaccatgaggcacacacacacactcgcaggaactttttggcgtaacaaaactagaattagatctaaagctaactgtaggactgagtctattctaaactgaaagcctggacatctggagtaccagggggagatgacgtgttacgggcttccataaaagcagctggctttgaatggaaggagccaagaggccagcacaggagcggattcgtcgctttcacggccatcgagccgaacctctcgcaagtccgtgagccgttaaggaggcccccagtcccgacccttcgccccaagcccctcggggtccccgggcctggtactccttgccacacgggaggggcgcggaagccggggcggaggaggagccaaccccgggctgggctgagacccgcagaggaagacgctctagggatttgtcccggactagcgagatggcaaggctgaggacgggaggctgattgagaggcgaaggtacaccctaatctcaatacaacctttggagctaagccagcaatggtagagggaagattctgcacgtcccttccaggcggcctccccgtcaccaccccccccaacccgccccgaccggagctgagagtaattcatacaaaaggactcgcccctgccttggggaatcccagggaccgtcgttaaactcccactaacgtagaacccagagatcgctgcgttcccgccccctcacccgcccgctctcgtcatcactgaggtggagaagagcatgcgtgaggctccggtgcccgtcagtgggcagagcgcacatcgcccacagtccccgagaagttggggggaggggtcggcaattgaaccggtgcctagagaaggtggcgcggggtaaactgggaaagtgatgtcgtgtactggctccgcctttttcccgagggtgggggagaaccgtatataagtgcagtagtcgccgtgaacgttctttttcgcaacgggtttgccgccagaacacaggtaagtgccgtgtgtggttcccgcgggcctggcctctttacgggttatggcccttgcgtgccttgaattacttccacgcccctggctgcagtacgtgattcttgatcccgagcttcgggttggaagtgggtgggagagttcgaggccttgcgcttaaggagccccttcgcctcgtgcttgagttgaggcctggcttgggcgctggggccgccgcgtgcgaatctggtggcaccttcgcgcctgtctcgctgctttcgataagtctctagccatttaaaatttttgatgacctgctgcgacgctttttttctggcaagatagtcttgtaaatgcgggccaagatctgcacactggtatttcggtttttggggccgcgggcggcgacggggcccgtgcgtcccagcgcacatgttcggcgaggcggggcctgcgagcgcggccaccgagaatcggacgggggtagtctcaagctggccggcctgctctggtgcctggcctcgcgccgccgtgtatcgccccgccctgggcggcaaggctggcccggtcggcaccagttgcgtgagcggaaagatggccgcttcccggccctgctgcagggagctcaaaatggaggacgcggcgctcgggagagcgggcgggtgagtcacccacacaaaggaaaagggcctttccgtcctcagccgtcgcttcatgtgactccacggagtaccgggcgccgtccaggcacctcgattagttctcgagcttttggagtacgtcgtctttaggttggggggaggggttttatgcgatggagtttccccacactgagtgggtggagactgaagttaggccagcttggcacttgatgtaattctccttggaatttgccctttttgagtttggatcttggttcattctcaagcctcagacagtggttcaaagtttttttcttccatttcaggtgtcgtgaaaactacccctaaaagccaaaatgggaaaggaaaagactcatatcaacattgtcgtcattggacacgtagattcgggcaagtccaccactactggccatctgatctataaatgcggtggcatcgacaaaagaaccattgaaaaatttgagaaggaggctgctgaggtatgtttaataccagaaagggaaagatcaactaaaatgagttttaccagcagaatcattaggtgatttccccagaactagtgagtggtttagatctgaatgctaatagttaagaccttacttatgaaataattttgcttttggtgacttctgtaatcgtattgctagtgagtagatttggatgttaatagttaagatccgacttataaaagtttgatttttggttgcttctgtaacccaaagtgactaaaatcactttggacttggagttgtaaagtggaaactgccaattaagggctggggacaaggaaattgaagctggagtttgtgttttagtaaccaagtaacgactcttaatccttacagatgggaaagggctccttcaagtatgcctgggtcttggataaactgaaagctgagcgtgaacgtggtatcaccattgatatctccttgtggaaatttgagaccagcaagtactatgtgactatcattgatgccccaggacacagagactttatcaaaaacatgattacagggacatctcaggttggtgggattaataattctaggtttctttatcccaaaaggcttgctttgtacactggttttgtcatttggagagttgacagggatatgtctttgctttctttaaaggctgactgtgctgtcctgattgttgctgctggtgttggtgaatttgaagctggtatctccaagaatgggcagacccgagagcatgcccttctggcttacacactgggtgtgaaacaactaattgtcggtgttaacaaaatggattccactgagccaccctacagccagaagagatatgaggaaattgttaaggaagtcagcacttacattaagaaaattggctacaaccccgacacagtagcatttgtgccaatttctggttggaatggtgacaacatgctggagccaagtgctaacgtaagtggctttcaagaccattgttaaaaagctctgggaatggcgatttcatgcttacacaaattggcatgcttgtgtttcagatgccttggttcaagggatggaaagtcacccgtaaggatggcaatgccagtggaaccacgctgcttgaggctctggactgcatcctaccaccaactcgtccaactgacaagcccttgcgcctgcctctccaggatgtctacaaaattggtggtaagttggctgtaaacaaagttgaatttgagttgatagagtactgtctgccttcataggtatttagtatgctgtaaatatttttaggtattggtactgttcctgttggccgagtggagactggtgttctcaaacccggtatggtggtcacctttgctccagtcaacgttacaacggaagtaaaatctgtcgaaatgcaccatgaagctttgagtgaagctcttcctggggacaatgtgggcttcaatgtcaagaatgtgtctgtcaaggatgttcgtcgtggcaacgttgctggtgacagcaaaaatgacccaccaatggaagcagctggcttcactgctcaggtaacaatttaaagtaacattaacttattgcagaggctaaagtcatttgagactttggatttgcactgaatgcaaatcttttttccaaggtgattatcctgaaccatccaggccaaataagcgccggctatgcccctgtattggattgccacacggctcacattgcatgcaagtttgctgagctgaaggaaaagattgatcgccgttctggtaaaaagctggaagatggccctaaattcttgaagtctggtgatgctgccattgttgatatggttcctggcaagcccatgtgtgttgagagcttctcagactatccacctttgggtaaggatgactacttaaatgtaaaaaagttgtgttaaagatgaaaaatacaactgaacagtactttgggtaataattaactttttttttaataggtcgctttgctgttcgtgatatgagacagacagttgcggtgggtgtcatcaaagcagtggacaagaaggctgctggagctggcaaggtcaccaagtctgcccagaaagctcagaaggctaaatgaatattatccctaatacctgccaccccactcttaatcagtggtggaagaacggtctcagaactgtttgtttcaattggccatttaagtttagtagtaaaagactggttaatgataacaatgcatcgtaaaaccttcagaaggaaaggagaatgttttgtggaccactttggttttcttttttgcgtgtggcagttttaagttattagtttttaaaatcagtactttttaatggaaacaacttgaccaaaaatttgtcacagaattttgagacccattaaaaaagttaaatgagaaacctgtgtgttcctttggtcaacaccgagacatttaggtgaaagacatctaattctggttttacgaatctggaaacttcttgaaaatgtaattcttgagttaacacttctgggtggagaatagggttgttttccccccacataattggaaggggaaggaatatcatttaaagctatgggagggttgctttgattacaacactggagagaaatgcagcatgttgctgattgcctgtcactaaaacaggccaaaaactgagtccttgtgttgcatagaaagcttcatgttgctaaaccaatgttaagtgaatctttggaaacaaaatgtttccaaattactgggatgtgcatgttgaaacgtgggttaaaatgactgggcagtgaaagttgactatttgccatgacataagaaataagtgtagtggctagtgtacaccctatgagtggaagggtccattttgaagtcagtggagtaagctttatgccagtttgatggtttcacaagttctattgagtgctattcagaataggaacaaggttctaatagaaaaagatggcaatttgaagtagctataaaattagactaatctacattgcttttctcctgcagagtctaataccttttatgctttgataattagcagtttgtctacttggtcactaggaatgaaactacatggtaataggcttaacaggtgtaatagcccacttactcctgaatctttaagcatttgtgcatttgaaaaatgcttttcgcgatcttcctgctgggattacaggcatgagccactgtgcctgacctcccatatgtaaaagtgtctaaaggtttttttttggttataaaaggaaaatttttgcttaagtttgaaggataggtaaaattaaaggacatgctttctgtttgtgtgatggtttttaaaaattttttttaagatggagttcttgttgcccaggctagaatgcaatggcaaaatctcactgcaatctcctcctcctgggttcaagcaattctcctacttcagcctcccaagtagctgggattacaggcatgtgctaatttggtgtttttaatagagatgaggtttttccatgttggtcaggctggtctcaaactcctgaccttaggtgatcgcctcggcctcctaaagtgctggaattagcagcatgagccaccatgcctggccaggacatgtgttcttaaggacatgctaagcaggagttaaagcagcccaagagataaggcctcttaaagtgactggcaatgtgtattgctcaagattcaaaggtacttgaattggccatagacaagtctgtaatgaagtgttatcgttttccctcatctgagtctgaattagataaaatgccttcccatcagccagtgctctgaggtatcaagtctaaattgaactagagatttttgtccttagtttctttgctatctaatgtttacacaagtaaatagtctaagatttgctggatgacagaaaaaacaggtaaggcctttaatagatggccaatagatgccctgataatgaaagttgacacctgtaagatttaccagtagagaattcttgacatgcaaggaagcaagatttaactgaaaaattgttcccactggaagcaggaatgagtcagtttacttgcatatactgagattgagattaacttcctgtgaaacccagtgtcttagacaactgtggcttgagcaccacctgctggtattcattacaaacttgctcactacaataaatgaattttaagctttaagatgaagtggcatttcttttaacagttactatgttggaattggttacaaattttggagtggatttcaaaagtgagagctaacttcagttgatttcaaggtagtgcttggctttttttgtttagacagggttttactcctgccctggttggagtggaagttaacggctaactgcagtcctgacttctgggcttaagtgatcttccctgaatagcagggaccacaggtttttgccaccacgcctggctaatttttgtattttgccatgttgccaaggctggtcaactcctgggctcaagtgatctgcctgtactgtatctttcccagttaatctgatatttatcttttaaatctcagatgtgccagggcctcggcagtgactcaaggaagaacccatgtgctcttagtgggacacgatttgttcagacctactaacctcaacccagtttcagttctttatagtggagaatgttgacagtttacactgacaggccacattttagcattgtgttatcttcatggttttttttcttttgagatgaagttccaaacttagtaacttaccatttactttttagtgtaattctaaaagatttcattcagctagaactaccctgatatttaactgtcctttttctcttacctaattattggcaattaaacatttttgtcatttactttgggactgtttttagcaggcccatggatctcaaggtttagttttgtgggttctatgggagacaatgacaatgaagataaacgttaatgttgcaataattctaagcaagggatattagaaaatgaagcaggccaggtcatggctcacgcctgtaattccaccattttgggaggctgaggtggggagatcacaaggtcaggagttcagaccagccttgctaatatgctgaaaccccatctctactgaaaatacaaaattagctgggtgtggtggcaggtgctatagttacgaggctgagcaagatcacaccactgcactccagcctgggcgaccagagaaagacttcatctc

SEQ ID NO: 11755 - DNA, 1766 bp, Homo sapiens
gctttttcgcaacgggtttgccgccagaacacaggtgtcatgaaaactacccctaaaagccaaaatgggaaaggaaaagactcatatcaacattgtcgtcattggacacgtagattcgggcaagtccaccactactggccatctgatctataaatgcagtagcatcgacaaaagaaccattgaaaaatttgagaaggagactgctgagatgggaaagggctctttcaagtatggctgggtcttggataaactgaaagctgagcgtgaacgtggtatcaccattgatatctccttgtggaaatttgagaccagcaagtactatgtgactatcactgatgctccaggacacagagacttcatcaaaaacatgattacagggacatctcaggctgactgtgctgtcccgattgttgctgctggtgttggtgaatttgaagctggtatctctaagaatgggcagacccgagagcatgcccttctggcttacacactgggtgtgaaacaactaattgttggtgttaacaaaatggattccactgagccaccctacagccagaagagatatgaggaaattgttaaggaagtcagcacttacattaagaaaattggctacaaccccgacacagtagcatttgtgccaatttctggttggaatggtaacaacatgctggagccaagtgctaacatgccttggttcaagggatggaaagtcacccgtaaggatggcaatgccagtggaaccatgctgcttgaggctctggactgcatcctaccaccaactcgtccaactgacaagcccttgcgcctgcctctccaggatgtctacaaaattggtggtattggtagtgttcctgttggccgagtggagactggtattctcaaacccggtatggtggtcacctttgctccagtcaacgttacaacagaagtaaaatctgtcgaaatgcaccatgaagctttgggtgaagctcttcctggggacagtgtgggcttccatgtcaagaatgtgtctgtcaaggatgttcgtcgtggcaacgttgctggtgacagcaaaaatgacccaccaatggaagcagctggcttcactgctcaggtgattatcctgaaccatccaggccaaataagcgctggctatgcccctgtattggattgccacacggctcatattgcatgcaagtttgctgagctgaaggaaaagattgatcgccgttctggtaaaaagctggaagatggccctaaattcttgaagtccggtgatgctgccattgttgatatggttcctggcaagcccatgtgtgctgagagcttctcagactatccacctttgggtcgctttgctgttcgtgatatgagacacacagttgcggtgggtgtcatcaaagcagtggacaagaaggctgctggagctggcaaggtcaccaactctgcccagaaagctcagatggctaaatgaatattatccctaatacctgccaccccactcttaatcagtggtggaagaacggtctcagaactgtttgtttcaacttggccatttaagtttagtagtaaaagactggttaatgataacaatgcatcgtaaaaccttcagaaggaaaggagaatgttttgtggaccactttggttttcttttttgcatgtggcagttttaagttattagtttttaaaatcagtactttttaatggaaacaacttgaccaaaaatttgtcacagaattttgagacccattaaaaaagtttaatgagaaaaaaaaagaaaaaaggaa

SEQ ID NO: 11756 - DNA, 1273 bp, Homo sapiens
agaatgggcaaacccaagagcatgcccttctggcttacacactgggtgtgaaacaactaattgttggtgttaacaaaatggattctactgagccaccctacagccagaagatatatgaggaaaattgttaaggaagtcagcacttacattaagaaaattggctacaaccctgacacagtagcatttgtgccaatttctggttggaatggtgacaacatgctggagccaagtgctaacatgccttggaaccatgctgcttgaggctctggactgcatcctaccaccaactcgtccaactgacaagcccttgcacctgcctctccaggatgtctacaaaattggtggtattggtagtgttcctgttggccgagtggagactggtgttctcaaacctggtatggtggtcacctttgctccagtcaacgttacaacagaagtaaaatctgtcgaaatgcaccatgaagctttgagtgaagctcttcctggggacaatgtgggcttcaatgtcaagaatgtgtctgtcaaggatgttcgtcatggcaacgttgctggtgacagcaaaaatgacccaccaatggaagcagctggtttcactgctcaggtgattatcctgaaccatccaggccaaataagcactggctatgcccctgtattggattgccacacggctcatattgcatgcaagtttgctgagctgaaggaaaagattgatcaccgttctggtaaaaagctggaagatggccctaaattcttgaagtctgttgatgctgccattgttgatatggttcctggcaagcccatgtgtgttgagagcttctcggactatccatctttgggttgctttgctgttcgtgatatgagacagatagttacagtgggtgtcatcaaagcagtggacaagaagactgctggagctggcaaggtcaccaagtctgcccagaaagctcagaaggctaaatgaatattatccctaatacctgccaccccactcttaatcagtgatggaagaacagtctcagaactctgtttcaattggccatttaagtttagtagtaaaagactggttaatgataacaatgcatcgtaaaaccttcagaaggaaaggagaatgttctgtggaccactttggttttcttttttgcgtgtggcagttttaagttactagcttttaaaatcagccctttttaatggaaacaacttgaccaaaaatttgtcacagaattttgagacccatttaaaaagtttaatgaggaaaaaaaaggttgaaaaattg

SEQ ID NO: 11757 - DNA, 542 bp, Homo sapiens
tttccttatttcataagagtaaggtcataaactagctttataatcagctgagcaaatctccccattactaatggagttaagatgacagcatttctgttagtttgttccatgaaaatcttatagatgagcccaaaatctccaaagttctttatgcactgatggttatccctaagctttgtttctttgacaaatatatatggagtgcccaacatgtgtcctgggaagctaaaacacatttactgacattaatatcctcttgagaaagttctagaaatgttaagcaacaattactttgcattgtgctctctttatataactacttcattctctcaatacccaaatttctttctaaatggagggaggtagagtaaaattttatcctaagatttgagtatatgtgtatatacacaaatatatttgtgtatgtgttattcaaaaggactcagttcacactttgaaaccaaaccactgcaataggtaaaaagtaactttaattctattctgaaaagaacctcttctttaaacataggcataatttaatc

SEQ ID NO: 11758 - DNA, 305 bp, Homo sapiens
aggacatagtttcctcccctcaggatggctagccactgaagaaggaaaaatacttttgcctgcagctaaccaatggaaattacttaaaacccttcaccaaacctttcacttaggcattgatagcacccatcagacggccaaattattatttactggaccaggccttttcaaaactatcaagcagatagtcagggcctgtgaaatgtggcaaagaaataatcccctgcacttcaggccatacatttcaatccctgtatctttaacctccttgttaagtttttctctcccagaattgaaactgtaaa

SEQ ID NO: 11759 - DNA, 292 bp, Homo sapiens
gccaggtgtggtggctcacgcctgtaattccagcactttgggaggctgaggcaggcagatcacgaggtcaggagatcgagaccatcctggctaacacggtgaaaccccgtctctactaaaaatacaaaaaattagccgggcgtggtggcaggcacctgtagtcccagctactggggaggctgaggcaggagaatggcgtgaacccaggaggcggagcttgcagtgagccgaggttgtgcccctgcactccagcctgggtgacaaatcgagactccatctccaaaaaaaaaaa

SEQ ID NO: 11760 - DNA, 125 bp, Homo sapiens
acgcacctgtaatcccagatactcgggaggctgaggcacgagaatcacttgaacccaggaagcagaggttgcagtgacccaagatcatgccactgcactccagcctgggcaacagagcaagactc

SEQ ID NO: 11761 - DNA, 86 bp, Homo sapiens
agcctcctgagtagctgggattacaggtgcatgccaccatgcctggctaatttttgtatttttagtagagatggcgtttcaccatg

SEQ ID NO: 11762 - DNA, 6921 bp, Homo sapiens
tttttttttttttttttttttttttttagtagagatggggtttcactatgctggccaggctggtcttgaactcctggcctccagtgatccgccttcctcagcctcccaaagtgctgggattacaggcgtaagccattacgctccggtgcaaagaaaacatttttgaaagccctccttgtcttcagttagtagaggatcaatatccccccacccaagccccatcacagaagggcctccccagacagtattaagtattcaaggccccagacagaagtcaggtgtgggggttgtggggttgccagagtgtcaggccccccaccgcacgagatttggccctgtcaatcagccagtagccccttttttgccttgggacacctcagcagacaggacagctgtgtgatgttccccacgtctacaatcaggaagcaggggcggggcttcagctggatgctggggcaactgagggcggggactggcaagtccttagtgcttgagctgggaccataggtggcagggcacggtggcaccggccaccccctaacttccacaccgcttgcccctgctgcccagggaggatgtgagcctgtgtggacctagttgagaactcactctgtgacttccgggatctggatgcagcggctggggtcggcagggcccactgcagggaaacggttaaaatgcgctgggcttcgtttttcccggaagccctcattacctggtattaccttaggtgtggattcctttattcgcctgctgtctgtctctgccaatcaaatgtgagctccgtgagggcggaggggggcggtcctctcggcttcatcatccgagcccagcacaggatcgggcacatcgcggggagcatttggtaaatggatgtctgaatggctgctgtgaagtgaccggtcttagttcaggctactagaacaaaaatgtcatagactcgggggcttaaacaacagaaatttgtttctcacagttctggaggctgggaagtcccaggtcaaggtgcgggcagatacagggtctggcgaaggtcctcttcctggctggcaggcgaccgccttcttgctgtgacctcacacagcagagtggagtgagcacgcactcttgtctcctctatgagggcactaatcccgccacgagggctccacactcgtgacctcatcacctcccaaggcagcaactcctaataccagctcagggagttagagttttaacatatagtctggagagtgggtggggacaacacttgctgcaattcagccacccaggctgcgctgcgacatttacaccatgtgcccccagtgacggtcagtacctcaaagaggacccccagcctggaaatgggtggtctctggccccataggaggggtaaagaatgaagcggggaggcctgatttatagtgagtgagctccagtaacttaagagaagaaaacctgacctgcttatgccagaaaatgttatgactcggccctgcgcagtggctcacgcctgtaatgccagcattttgggaggctgaggcaggtggatcatggggtcaggagttcgagaccagtctggccaacatggtgaaaccccgtgtctaataaaaatacaaaaattagccaggtgaggtggcatcgtcctgcagtcccaactacttgggaggctgaggcaggataattgcttgaacctgggaggtggaggttgcagtgagccgagatcatgccactgtcctccagcctaggcaacagagcaagactccgtctcaaaaagaaaaagaaaaaaaaaaagaaaatgttatgacccaaaaataaattctggaaatgctctggaaattcaaggactccctgatctgtattcatctcctaaggtgactgtgagaaatcgccacacactgggtgactgaaaacacaacacaaatgtgattttcagagttctggaggccagcagtccggtagcaaggtgacagtaagatccaattccgccccccccccccccactcacgtcacaggaaattaaacatttaagctgaaaaaatgttcaaaccaagcagggcagtgcccatgcacagaagtgaggcccaacgggcgaagcggactcatcctccctcctcatgccaacagcagctcaaagcttctcaatggcaaaacttctaccaggtcctgtctaaggccaagattcctcctaaaacccaaaccatccccgagggggccagctcctcggtcccttcagcaggagggtccctgagtctggaaagaggagctcagctccaaggggtggtggtggaagatgcacccttctgtgtcttgtgccaggggtccccacctgtgggcagcaagccacccaggtgccaaggcaagagaccgagggcacaagctgttccagtataataaaatatataaaataacaagagttatactacatatagatcatagatatatgtaagtaccactaatcatcagtttgtagtaattactctttattcaactattataataatcctcgctctacaatcataacctaggaaaagccaggccatacagagataggagctgaagggacatggtgagaagtgaccagaagacaagagcatgagccctctgtcacacccagacagggccaccagagggctccttggtctagcggtaatgccagcgtctgggaagacgcccgtagccaagcggaccgtgttctagcagtagcatcagtgccaaggaaaagcaccggctacttagcagaccgggaaagggagtctccctttccctgggggagtttagagaagactctactccaccacctcttgttgagggcctgacccgcccacagttatccggaggcctaaccgtctccctgtgatgctgtgcttcagcggtcatgctcctggtccgctttcatgttccatcctgtacacctggctctgccttctagatagcagtagcaaaattagtgaaagcactaaaagtctctgatatgcagaaataatggtgtaagctgtctcctccctctctttctctccaccttggctgccaaatagggaagggccccctgtccagtggacacgtgacccacgttaccttacctatcattggaggtggctcacactccttaccctgcccgcttgtcttgtatccaataaataacagcacaggctggcattcggggccactaccagtctccacgtctcagtggtagtggtcccccaggcccagctgtcttttcttttatctctctgtcttgtgtctttatttctacgatctctcgtctccgcacaaggggagaaaaacccacagaccctgtagggctggtccctacatccaccctttccctgagcaacaaacgctggttgcagcacccaagcgtccttcaggagctccgaatctctcccgtgtggaagtggcacatagaggctgccccccacccccagtgtgcccaatccgcccataggaggtggctagagctgtagtgcccttctgtccagtgggatgaaatctgccaccccacagcagggcaagatgcgagaagcatgctgcgttagtctgttttctgctgttataacagaatatcccagactgggtaattcctacaggaaaaacatttgtttcttgtagttctggaagctgagaagttcaaggacacggtggcagcatctgctaagggtctttgcattcttgctgtgccataacatggtggagggcacatatgcaagagggcaggagagagagagccggagagagcttgcctctataacaaagagataagcaactcactcccacaacagcgacattaatccatgcatgagggcagagccaacattaatttattcatgagggcagacaaattaagtttccaacacatgaaatttgggggacattttcaaaccatagcatatgccctgaatccaggcagagaaagtgtcccctcagtgcacaaatattgtcacagctgcctgctctgaatgctgcaaggttttggagaacgttaaagctacttcttttttttttttttttttttttttgagatggagtctcactctgtcactcaggctggagtgcagtggcatgatctctgcacactgcaacctctgcctcctgggatcaagcgagactcctgcctcagcctcccgagtagctgagattacaggcatgtgctaccacatgtggctaatttttgtatttttagtagagatggggtttcactatgttggccaggctggtctcgaactcctgacctcaagtgatccacccgccttagcctcccaaagtgctgggattacaggcatgagccaccgctcccagccaaagctactttttaactgggttcctgatctttcttggcctgtctctgctcccagccttgccttactgctcctgcctctgacctcccgctttggatctcaggcaggaccaagtctaatctcaaaaagcttggtctgatgccctggggttggtcccttgtcttcccctcacactcagcccctcctcacttcctgtgcactaagggacactccttgtctgacaagccttgatttagtgtccctatgaccatgccctgacccggggctcgattgaaggctcaaataagacaagtggcctcattcagttgttcaataaatacttcctgagcacctgctctgtgctcagccccatgcaaagcagtggtgacagtgggaagacagtggtgaataagacagacatggtccctgtcttcagaaagttgccactcaggtggagaagtaaaaaagaaaaaaaataatagtgcttccggctccatgatgcagtgggtttggggccccgggcagcgaggatggcaccaaactagtgttttggggtcagggaggatttaccaggcaaattgaagtctaaggcaacaacctaaaggagaggagtagttagccaggtggtgggccagggatgctggggagtcactggaggcagggacagactgcgatctcattctggaaagatcactcttgcttcagtaaggaggaaaaatacagcagacaaactagagggtcactggattgcagggtgggctcactaaggttccaggtggcttggaatcagctttccaaattcagaaactcaatctcaatacccggaggtgggagtgccatatttagcaaattaaaaaatcacctagctaaatatgaatctcagataacacatatttagtataaatatgccccaaatattgcatgaattcaaatttaactgtgttcaatattttattggccaactctaccaacagtgaccaagtcttcatgactgtcttatgtgcaccaaactcacagggatctgatgtaaatacaccaatttattgatttacaattgcaggcaaggttaaaatatacatgttattcagtttctcctttctggaaaatgaaacaatcagaagactggtgaacatggaatgaggacaaaaggacacaaggaagtttgaaaggaaatttcatctcaaggcatggtaaattctggagaatcatcctggcctccctacagagaatcctctttggtggcagaaagtgcaggtcccccctggagagggcaggtcagggaccaccgggtcctcgtgtgcagctccctgtggaaacacgtggttcttctagctcaaccatcatctgctggtggttgatttcccactgtactctcaggaggtgttctttcaaagctttggggctcctgacccagccttccaattacaatacaatatatttcacattgaggttacactttagaatgtattcagtgggctgaattcacgtagctatttattctgccttcttaaacccaaggagagcaatcaggtactcttctgattaagaaatcacaggctgggcacggtggctcacgcctgtaatctcagcattttgggaggccgaggtgggcagatcatgatgtcaggagatcgagaccatcctggccaacatggtgaaaccccatctctactaaaaatacaaaaattagctgggcgtggtggcgcatgcctataatcccagctacccgggagtttgaggcaggagaatcgcttgtaccagggagtcggaggttgcagtgagccgagattgtgctactgcattccagcctggtgacagagtgaggctccgtctcaaaacaaacaaacaacaaaaagaaatgactttaggcaacatagtgagaccccgtcgccacacacacacaaatacaaaattagtcgggtatggtggtgcacgcctgtagtcccaactactcaggaggctgaggcaggaggatcacttgagcccaggagttcggggctgcagtgagccatgatcacaccactacactccagcctgggtgacagagggagatcgtgtctttcaaaaaaaaaaatcacttcagaaacggggtacccatacccaaggggtcacttgctcttactaatttctagctgtaatgcaagtggcatgatcatagctcactgcagcctccaactccagggctcaaaggatcctcctgcctcagccttttgagtagttgggactactgtggcatgcaccaccatggccggctaattttgtattttttggtagaaatggggtcttcccctgttgcccaggctggcctccaactgctgggctcaactgatcctcccgcctcagcctcccaaagtgctgggattacaggcgtgagccactgtgctgggccatgattctcatctcccaatattctcaaacccagtcccttcatctcttgactggattatgcagtctcggagctggtttatctgaactcactttctccccctttgatctgttctccacacaacagccagagaggtctttcaaatgcatgaatgggatcactgctccgcataaaacccttcaaggggccaggcgcggtggctcacgcctgtaatcccaggacttggggaggccgaagcaggcggatcacttcaggtcaggagttcaagaccagcctggc

SEQ ID NO: 11763 - DNA, 305 bp, Homo sapiens
aggacatagtttcctcccctcaggatggctagccactgaagaaggaaaaatacttttgcctgcagctaaccaatggaaattacttaaaacccttcaccaaacctttcacttaggcattgatagcacccatcagacggccaaattattatttactggaccaggccttttcaaaactatcaagcagatagtcagggcctgtgaaatgtggcaaagaaataatcccctgcacttcaggccatacatttcaatccctgtatctttaacctccttgttaagtttgtctctcccagaattgaaactgtaaa

SEQ ID NO: 11764 - DNA, 184 bp, Homo sapiens
gcagtggctcacgcctgtaatcccagcactttgggaggccgaggtgggcggatcacaaggtcaggagatcgagaccatcctggctaaaacggtgaagcccccgtttctactaaaaataaaaattagccgggcatggtggtgggcgcctgtagtcccagctactcgggaggctgaggcaggagaa

SEQ ID NO: 11765 - DNA, 24413 bp, Homo sapiens
ccggctcgcggcgcgtggaggctgctcccagccgcgcgcgagtcagactcgggtgggggtcccggcggcggtagcggcggcggcggtgcgagcatgtcgtggctcttcggcattaacaagggccccaagggtgaaggcgcggggccgccgccgcctttgccgcccgcgcagcccggggccgagggcggcggggaccgcgggttgggagaccggccggcgcccaaggacaaatggagcaacttcgaccccaccggcctggagcgcgccgccaaggcggcgcgcgagctggagcactcgcgtgagtgcggcggggcggggcggggcgggcgggcgggcgggacgggccggggaagcgggagccctggcccttgccgctcctcgctgctgtcggcagccacttcccgggcgagactgcgcccccggagcacccccggccggagccgtctcgcgtgccgggaggatcggactctttccgtcacccgtttgcacctctgcagctgtcaggagcgggtcaggtgcgaaaagcggtgcggaggtggcgctcataggttacaggggtcagggtctggggctggccgtggtcttcagttaccgccgagcgtgcgggatccttctgcgcttgccgcctccacgtggcacaggccaaggcgtggccagatgggtagatgggtttgttgggtggttgctagcagtttccacgtaacaagggaagcgtatttgagagttacttgattctaacgagactagcagatttgcacttcttgttggaagacgttagcatttgcacggcgaggtctgtgaagccacaggccaggccgtgctgctcagcttgagtaaacccctgacccaaggccctcagggtgtgagcactgactgcaccttccctaagctcgggtctcttcccccagccttcctttcccctgtggctttaacgatttgtagcacgatgcagttcaaatggctaggagtctggaacgtagaaggtgctgaattcattgaaagaatacagtggttctcaactcttgtttaagccggggttctttctatttatttatatattgagacacagtatcgccctgtcgccgaggctggagtgcagtggtgcgatttcggctccctgcaacctccgcctccgattctcctgccgcagcctctcgagtagctgggattacagccgcgcagcaccacgcccggctaattttttttgtatctttagtagagacgggtttcaccatgttggccagggtgctctccaactcctgacctcgtgatccgcccgccttgtcctcctgaagtgttgggattacaggcctgagccacagcgcccagacagaagggattccttttttttttttttttttttttttgagatgagtctcgctctgtcgcccaggctggagtgcagtgacgtgatctccactcactgcaagctccgcctcccgtgttcacaccattctcctgcctcagcctcccgaatagctgggagtacaggcgcccgccaccacgcccggctaattttgtagagatggggtttcaccgtgttagccaggatggtctcgatctcctgacctcgtgattaattttttgtatttttagtagagacggggtttcactgtattagccagggtggtctcgatctcctgacctcgtggtccacccgcctcggcctcccaaagtgctgggattacaggcgtgagccaccgcatgccacctttttttttttaagatgatgtcttgctctttggccaggctggagtgcaatggcgccatcttgtctcactgcaaaccgcaacgccctggttcaaagaattctgctgcctcagcctcccaagtagctgggattacaggcacgcgccaccacgcccagctaatttttgtatttttagtagagacgtggtttcaccaccttggccagggtggtcttgaccacctgaccccgtgatccacccgcctcgacctcccaaagtgatgagattacagtcctgagccaccgcaccctgccagcaggggttcctttttagaaagaagatcatttagggaatccctggtgtgaagcagatataaacagagtttccctgtttaaggagggatggcctggtggtacttgtggttccatcctgtgcccttccccggggtgctggggaacatcctgagctgaggtttctggccccggctgggtctcataaccccagagggacattcaggtttgggcccaggcccaggctaacatggatagtcctagctgggcaccaccgacagtgcgtgttctgttttgaagagatggggtcttgctttgtcgcccagtctggccttgacctcctgggtaaaagccgtccaaccgtctcagcctcctgaggagaggggactgcaggcttgctcggtaatttttcttttttcttttctttttttctttttttttttgacggagtctcgctgtcgcccaggctggagtgcagtggcgtgatcacggctcactgcaagctccgcctcctgggtacacgccattctcctgcctcagcctcccgagtagctgggactacaagtgcccgccgccacgcccggctaattttttgtattttttttagagaccggttttcaccatgttagccagaatggtctcgatctcctgaccccgtgatccacccgcctcggccacccaaagtgctgggattacagacgtgagccaccgcgcccggctttgctccgtaatttttctgtgtgtttttgagactgagtctggctctgccgcccaggctggaatgcagtggcatcatctctgctcactgcaacctttgcctttggggttcaagcgattctcctgcctcagcctcccgagtagctgggatcacaggcgcccgccagcacacctggctaatttttgtgtttttttactagagacggggtttcaccatgttgtttaggctggtcttgaattctggcctcaggtgattcgcccacctcggcctcccaaagcgctgggatgacaggcgtgagccgctgctcatggccttcctcggtaattttaacgatcaggttaggatgggaatcaagggctggacttcagggcacctcggaggacagcggatgttggtgactgactttcttgctgcaggcttatttggagggttcctttgtgtcctagttcctgggggttttcacccgctaacttcacttagagattgaaacttctcccacttccagaagctgaatcgtagtgatcagcctgcggccccctgcagtggtacaggcctggttgagcagcctcaggccgcctccccatagtgcagacctgtgcctctgagttgctccagtcctggcggccccggagctcctgacccgcagtccgctctgccggcgttgccagtgccttggtctgccctctctgtggtggagcggggcccggggcagggtctccaggtgcaccgtggggagccctccatcaggcttttgtttctgtggattgtgttccaggtgtgggctctttcattttgatcccttctctccttcctggcctcactgctggcgggtgagagaggtttctccggagttgactgccccctttccccgggtgccccctgccctgcccctctgcctggtagcccctctgcaagcccggcccctcccgacgctcctggcttcctccgtgcccctttcctggcagcggggtcgccgagattcgcccgttgctttgtccttgctgctctccaggcaaacgggcggctcctcctcaccgactgcctcctctgtcccttgaggctatagccccatgccgcctcgttcccagagtctgccctgacccctcctccggcctgtccttggaagtcacagcagtacattatcccagaactgtctgtgagcaccagcgctcgccctgcactccacagagggggtgcctggaggagagcctcgtgccctgtgggtgtgaattcacgcgctgggacgcacgtccctggcacagggtcacaccaaagtggtgaatgattgttctcattctaataaccgagaggccacacgggcacctgacctgctctttcccctctcctcctccccagagtcactgggggtaggaactgtcaatgagccattttcaggggagggagtggcctcagcttaatccagccaaaggtcccctcgggaggaaacaggcagagctcctcaccgtgacacccacgttcctgtcactgctctgtggcaggaccctgggggactgacacaccctcagtcccctcggggtcagagtgagagtggttgagagcccggggtcgcttcagcccttggcttcccgagtttagcagccaaacccgttgacctggcactgtcttccctgagaggcaggtcccggtctcatctgtgctctgttcactggggcccccgaggttagctaccaaggcgcttcctgaaatgtgacgctgatgcccgtcagcccagttcgtgcctaaccacaggcccaagcagacccaccccaacaccaaagtgtcgctgcctctgtctaaatgcaacgagtgctccccacggcacttccccctgcgtcagtcacctccaaaaattacacctgagctgagaacagacgctgggctctagttagtgacgtgtttgctgcagttgactctgaaggcttaaaaaagtgagacgggctgcgggaggaagagagacgggaacaacgcaccaacccaggagcatcgggggtccctgcctactttacacgtctttctgtgttagaataatttttttttttttgagacggactcttgctgtctcccccgctggagtgcattgcttcgatctctgctcactgcaagctctgcctcccaggttcacgccattctcctgcctcagcctcctgagtagctaggactacaagtgcccgccgccacgcccggctaattttttgtatttttagtagagacggggtttcactgtgttaaccaggatggtcttgatctcctgacctcatgatccacccgcctcagcctcccaaagtgctgggattacaggcgtgagccaccacgccctgctagaataatttttttttagagacggagttgcgctctgttgccccggctggagtgcggtggtgcgatctcggctcgctgcaagctctgcctcccaggttccagcaattctccagccttggcctccccagtagctgagatcacaggcgtgcaccaccacacccagcttttttttgtgtttttagtggagacaggatttcgccatgttggccaggttggagattttatttttcttaagtctcactctgtccagctggagtgcagcagtgtgatctgggtgactgtagcctctgcctccggggttcaagccatcctcccacctgagcctcagagttgctgggattacaggcgtgaaccaccgcttcccactaggtttttgtatttttagtagaggttgggtttcaccatgttggccaggctttggtatccgtgtatcctacacctgctctccgtgccacatgcgcccgcaggttacgccaaggaggccctgaatctggcgcagatgcaggagcagacgctgcagttggagcaacagtccaagctcaaagtgagtggggccggtgtgggcgaggaggccggggcgcacatggggttcaggcgtggagattggtggggctgctactggtgggtagggccaggggcgtgtacatgggcagcagtggggccagggccgagcttgggcgcctcatttcacagagggaaacaaggggaggtgagagacgctgccgcagagccgcccgagagggagggtcagtgttggtgagggcgtctggtcgtcctgagggagggccggtgttggtgagggcatctggtcgtcctgagggagggggtcttcttcacattctcacctcatttcttttcactcagcaggattttttattttattttattttattttattttattttattttatttattttgaaacggagtctcactcttgcctaggctggagtgcaatggcgcaatctcggctcactgcaacctccgcctcccgggttcaagcgattcatctgcctcagcctctggagtagctgggattacaggcacgcgccaccacgcctggctaatgttgtattttagtagagacggggtttctccatgttggtcaggctggtctctaactcccgacctcaggtgatccacccgcctcggcctctcaaactgctgggattacaggcacgcgccaccacgcctggcctattttattttattttgagacagagtgtcactctgtcccccagtctggcgtgcaatggtttgatctcggctcactgcaacctccacctcccgggttcaacctcctgcctcagccttccgagcagctgggactacaggagcctgccaccacatctggcgaatttttgtatttttagtagagaagggggttcagcatgttgtccaggttggtcttgaactcctgacctcaggtgatccagccactttggcctcacaaagtgctgggattataggcaagagcgatggcgcccggcccactcagcaggattcctagaatgggcacgagctctgccctcatcacagtccaaaagtgagcacctgcctggagctgcccagaaacagccttgtggggtggggttggtgtctgacctccctccccgggggccttcgcaggcttctctgctggtgcttctgtgcctgtgggtctggattcctccagggcctgatcctgggtgcagatgcagctggaagccctgaacctgctgcacacactagtctgggcacggagtctctgccgtgccggagctgtgcagacacaggagcggctgtcaggcagtgccagccctgagcaagtgccagctggtgagtgctgtgctctgcaggagtatgaggccgccgtggagcagctcaagagcgagcagatccgggcgcaggctgaggagaggaggaagaccctgagcgaggagacccggcagcaccaggccgtaagagcgcaagaggccgcgagggaggccgcccggctgcggggagcggcctggggcaggactgggagctgggtgtggtcccggggcactctggagtcagccattagagctgccctcggaacggccttgcacaaacgcctaagacctgtaaggtccctcactgctgagccggacgggaggtccccgcgcctccccacgtttgtgtgaggctgatggcgcgtcggagtccccggcgctccgcccagtcggcccagactgcagctcccggctgagatgtgtctttgccgccctcttctcccccagagggcccagtatcaagacaagctggcccggcagcgctacgaggaccaactgaagcagcaggtgagctcagcctcccctgcgaggcgcctgcgtccctgagaacgtaggtggctttgtgggaccagtcagtgggtcagaggccacggggcaagaacgatggggttgctgacggtgggtgctagagcaggggaaactactcggacagacacgcaccagcacacgtgtacaggcacacatgcagatgtgtgcacacatgtacacggagacacaggcacctgcccacacagacacacactcctcgcacacacactcccggcagacaggcacacacacccctgcacacatgggcacacacacacccctgcacacacgggcccacacactcccctgcacacatggggaaacatgggcccacacacacacacccctgtgcgcacacacccctacacaggggcatggacagacacccgcaaacacacccccacacaacacgggcacgcacacacacaccccgccacaacacaggcacacatacccctgcacacaggcctgcacatacacccccacacaggggcatgctcacacagcccgcacacacacaggtatgcagacacacccaaacacacatgggtcctcaggcacacactcccgcatggggcatgcacgcacctcccacacacacccgatcacacataggcatgcacacccctctgcacacatgggggcttacacacccccccgcacacgtgggcccgctcacacagcccacacacataccccttcacacaggcacacaccgccccgcacacacgggcctgcacacacacccccacacgggcatgcacacgcccacacacacgggcgcgcacacacccggacatgcacaaacacccacctgcacacacgggcacaccccaccacacacacacacaggcatggacacacgcacaccccctcacacataggcacacatacacaacccaggcacacacccccttgcacagacgggcacgcacacagtcccacacatgggcacacgcgcacaccgccgcaaacacacacacgggcacgtgtacgcacccccactcacagtgtgcctcatacatacgggcacgcacctgcacacgagggcacacccccaccccccacccccacacacccccgcacccatgggcacacacacattactgcacgtgagggcatgcacacacacgccctgcacacccccacacacagaccccttgtgtgggttccacagcagcggctctccaggcacgacaagcctccttgtctcccacccgggcgcccagctggcagtctgggaggttctgcttgggagggctggtcagtggcggcgggcgggtctctgggtctatgagaaaagcttgggtgacatctgttccctggtccttagggaccgtcaccttcagtcctgagctcgcaggcggggttcacatgttgcctgttgtgggcattgtagctttaacgtttaattggcggaagacagaagcttccttaagcccagcctgaatcagggcagtggtgttgggaggtcggcccgcggtggcccttgtcagggaagccacagtgggggctgtttctgccactggggagtttgggaccctgaacccatcccctcagtgactgccgtcccagccgatgtcacccgtgtctgtgtcagggtgcggcgtctgcaggtccccaggtgcccaggacgcttggagttctgtggtcctggggcggacgcaacctctggattggtgttgagcatttttctggttttaaaggcttttctctttttctgcggcttcttctcagcaacttctcaatgaggagaatttacggaagcaggaggagtccgtgcagaagcaggaagccatgcggcgaggtaggctgtctgctctcctggctggggcggaggtggcgggggctgcttgtggatccggcgtgcactctgagcctgagttctgccgcccggcccctcatagctaccagtgcagtgggcgaggcctgctggggctctgcggggtggggctccctctcggaagacacctctgtctgcgagtggacgccaggatctgttcagggagggcaggagctgcttcacttcatgggaagtacaggggccttttttttttttttgagacggagtctcgctctgtcacccaggcaggagtgcaatagcacgatctcagctcactgcaacctctgcctcccaggtttaagcaattctcctgcctcagcctcccgagtagctgggattataggctcccgccaccacgcccagctaatttttttgtatcttcagtagagaaagggtttcactgtgttggccaggctggtcttgaacttcttgatctcattatccgcctgccttggccttccacagtgctgggattacaggcgtgagcctctgcgttctgcctagaacatgggtctttactgtcctggtttcagtggggatcacaggtatttggtgccatgtggcatttgttggcgagtgctccaggcaaacgtctgtcaccactcttcaccgtgggtgggcttgtggcgaggtgtgtgcgtttaatgttcagtagccaggcacgtggcacgtcacgcgtgtctgagttctgacagctgtgtttctgtgtgaggggggcttccttcagaactccgcgttctggttttttgcttcaaagagctcgtcctgagaagttgcctaggcctctgggtcggatttctgccctaatccatgggcagggccggcctgtggcgctgtccctaccaaggtctgtgtgtgtctgtggcacgggcctgtccatggactgggcttgtccgtggagtgggtcggtccatggccttagcctgttggtggcgtgggccggtccacggcatgggcctgtctgtggcgtgggccggtccgtggtgcgggcctgtccgtggccttagcctgttggtggcgtgggccggtccgtggcatgggcctgtctgtggcgttggtctgtccgtggcgtgggccggtccgtggcgtgggccggtccacagtgtgggtggaggtggacgtgctgcactgcatggtgctgagctgccctgcctctctggggcagccaccgtggagcgggagatggagctgcggcacaagaatgagatgctgcgagtggagaccgaggcccgggcgcgcgccaaggccgagcgggagaatgcagacatcatccgcgagcagatccgcctgaaggcgtccgagcaccgtcagaccgtcttggagtccatcaggtgagcactgcccaggcccgggccggccacagatggagccccgcaggtgtgagtcgctggtcccagggcgctctccagctcttccaggcctggccgccataggctgactccttggtgggggcactgcccctctgtcctggcaaggccgtgccgccatgtcagggcctcaccctcaacctgctctcgctgcgtggtacggatcttcgtgtccttcctggtcacaccactgctttccccgcaggacggctggcaccttgtttggggaaggattccgtgcctttgtgacagaccgggacaaagtgacagccacggtaaacatattcataaaacagggctggcaggtggctgagaggcagcatgtgggggcctcctggagccccaggtcctgtccctgccggctctgcacagccctgtagctctcccagcacagagcaaacccacgttgtacctgctgggctcggctgctcctccctccttgagctgggagaaaaaaatgcagttgccagcctgggccacacggtgagaccccatctctacgaagaataaaacattagctgggtgtgatggtggcgcctgtggtcctgctactcgagaggctgaggtaggaggatcacttaagcccaggaggtttgggctgcagtgagccaacattgcaccactgcactccattcttggcgagagaataagaccttgtctcaagaaaaaaatggccaggcggtagtggctcaggcctgtaatcccagcattttcggaggcggaggtgggcggatcacgaggtccggagatcgagatcatcctggtaagagtgaaaccctgtctctactaaaaaaaagaaaaaaaaagaaaagaattagctgggtgtggtgacatgtgcctgtaatctcgggaggctgaggcaggagaatcacttgaacccgggtggtggaggttgcaatgagtcgagatcccgccactgcaccccaagaccagcatgaccaacatggtgaaaccccatctctgctaaaaatacaaaaattagcaggccaaggtggcgtgcgcctggaatcccagctgcttgggaggctgaggtaggaaaattggttgaacccaggaggcggaagttgcagtgagctgaaaccgcacaattgcactccaacctgtggaagaagagcgaaactctgtctcaaaaaaacaaacaaaataaataagccaggcctggtggctcactggtgtaatcccagcactttgggaggccaagacgggtggatcacttgaggtcagaagttcatgaccagcctggccaacatggtgaaaacccatctctactaaaaatacaaaaattggccgggcctcgtggcacaggtctgtattagctgagtgtggtgacctgagcctgtaatcccagtcactcgggaggctgaggcaggagaactgcttgaacctggaaggcggaggttgcagtgagccaagatggcaccattgcactccagcctggccacagaacaaaaccctttctctaaaaacaaagtcaagggcgcattaagcagctccttcatgtcctcaggtgacaccgtctcaccaacatggcaacaccacctgcaacattcaccgtcacgctgaccaggccaccggcaggtgctgcagtcacagcagtgggcgccggcaccacggcagagcaagtgcccactcagtgccgggcacctactgtgtgctgggcggggtggggggacggaggacacagccatgtgcgacctggggcgccaccacagcaggccagagcctgggcacaaaagagcgaggctttaaacgagagaagaatctgaacttcaaactctcagggttttattccgaataacgaaagtttttgcgaaatggagtcgggttcgctttctgggtctttgatttttttttttttgagacagagtctcactttcaagtgtgctgctcaagtgcagtggcgcgatctcgactcactgtcagcttcgcctcttgggttcacaccattctcctgtctcagcctccggagtagctgggactacaggtgtctgtcgccacgcccggctaatttttttgtatttttagtagagagagggtttcatcctgttagccaagatggtttcgatctcctgacctcgtgatccgcccgcgtgggcctcccaaagtgctgggattacgggcgtgagccaccgtgctcagccacagccagctaattttttcatgtttttagtagagacgaggtttttccaggttggttaggctggtcttgaactccaacctctggtgatacgccggccttggcctcccaaagtgctgggattacagacctggccagcctaaacgatttttaaaacaagttagagattttgggttagtcttgttttccaggaataaagtaccatttttagtggccaaggatgtaccagagggtgtggccctgtgacatccagctgggtctgcccagggccccgctcagcgaccgaggctttctaggatttatgctgccagttgcagagaaaatggccctgagtgagggcgttatgactgccccacctgcctcctgtaaccgcgtggctgtgggattcggggctgggaattcgggttcctgtggggccagcacacggccctgtgcttctccctcaggcggagagagggtgggggcagccccgtgcgtctcctgctctaggagggagggacggtgggggccggtgcgccagtgcggtgtctctgctgcaggtggctgggctgacgctgctggctgtcggggtctactcagccaagaatgcgacagccgtcactggccgcttcatcgaggctcggctggggaagccgtccctagtgagggagacgtcccgcatcacggtgctggaggcgctgcggcaccccatccaggtagcggcgcaggcctggccctccctgagtgcagttcctggctgagtcccttctgccccacgagcacagcccacgcacaccctcccgtcccttccctttccccggataacaggcacccgcacgctgcttcacgggtgggttttcctgtctggcgctgtaccttaggggtctgcatcagtgagacccttcccctgtctgcctcggtgtcccttgctcagggctcttgatggggcctgggagcacatcggggtccttgcaagacccgggacttgggtgtgcggccgtctgtcggggaagctgctacaggccatggcgtctggtggcctccctggggagccgcgccgcttgccagcccctgaggtgcctgctctccacaggtcactgggtaggtggttaagaaaataaaagccaataaggaaccggaaaatgcccctaatcccagcaatagcctcctggtctcccggcggggcagggttccagctccgggccggtcctggctgtgctttggggcagctccgtttctgtgtgttaccgagcatgtgtgtgcgttggtggctgttccgtggctgtggcaggtgacccaatggtgcttccccttcccctccggcaggtcagccggcggctcctcagtcgaccccaggacgtgctggagggtgttgtgcttagtgtaagtcggtgtgcctgggaccggggaggtgcagggaggggaccccggagctgggctgggctgtggcccttgctagcgctcgtggtggcgcccaggagcttttgggtcctgagatgcaactgcttggactgtgccggggatagataggctgcccacgagctgggcggcttcctgaggagcagagtccgcacccgggcattcccgcagcccctgtcaccgaggcttccgtgggtgcagagtgtctcccccaaacccccgtcttccccggcagcccagcctggaagcacgggtgcgcgacatcgccatagcaaccaggaacaccaagaagaaccggggcctgtacaggcacatcctgctgtatgggccaccaggcaccgggaagacgctgtttgccaaggtgagagcgcctggctgaacaggtgggccaggggccgctggggtctcacctgcctgcaggtgtctgggggcctcagccgcctggggaatggaccccccttaggcctttgcctaccctcgtgtaggctcagggtgctggtgtgggcagcagcgcctcccatcttccaggcgggggacgtctcctgtctggcaggctgtggcttccagacagggacacccggcaggggctccacactccaggtggagtgtgcaggctttgcagaggcagagggaacatctgttctgtctcccctcactcttcttgtccagaaactcgccctgcactcaggcatggactacgccatcatgacaggcggggacgtggcccccatggggcgggaaggcgtgaccgccatgcacaagctctttgactgggccaataccagccggcgcgggtgagacgtccccacagcatgcaccaggcccttggctgcggcccagcaggctgccttctgggaagggggtccaggtgtctcttggggaccctgtctttctgcagctctgtccttgtggccacgcaggaggcccaatggagggtccctcggagggaaagtcccctgagtgtggaccctggtggacacgaggtccccagcgtgtggaggctgccagtgggatacttggctcagggcagaagggaggtgggtgggtgcagggggagaggggtcttcacagctgcaggggaggctcctccacagccgccctccccccaacacgcctgcaggtgggcgtgggcactggttgccttttctagaaccatttgaaagttagctgaagacagcatggcacactcccttcaataggtcccacagtgaccccgcgcagggcacagcccgggcacccttgtggcctcggctgtcctcgttggaaccacgatcctcatggttggcaccctcccctctggcctttgacctttcactttagaagacctgtccctgcgccaggcgtggtggctcacggctgtaatcccagactttcggaggcggaggcaggcagatacgaggccaggagattgagaccatcctggctaacttggtgaaaccccgtctctactaaaaatacaaaaaattagccaggcatggtggtgggcacctgtagtcccagctactcaggaggctgaggcaggagaatggcgtgaacccgggaggcagagcctgcagtgagccgagattgcgccactgcactccagcctgggagacagagcgagactctgtctcaaaaaaaaaaaaaaagaccctgctccttgcgtggactcttgagcactgcactgggtcgctgtgtgggtgaaacctgcagggcggaggctgttgccccatgtgtggttggctggtgtgtgggtgaaacctgcagggcagagtctgttgccccctgtgtagttggtttcccactgccttctgaggctgagacgtggtcagctgcccagaggccaggctgatcggcttctgtcgagtccaggacttagggctcctgatggggcagagcctgaccccgtggggatctgcctgcctggcctgctcctgccgcggccggacgctgctgtgggctgctcctggcgtcactctcgccttgcttggcctctctctcgttcacagcctcctgctcttcatggatgaagcagacgccttccttcggaagcgagccactgtgagtgtcactaagcctctgtctggccacaggagggtggtcgggtgggcgcggctgtcatcctgggccaggctgcagcccttaagctggcttgcagtggcgcaatcttggctcgctgcaacctctgcctcctgggttcaagctgctctcctgcctcagccccctgagtagctgggattacaggtgtttgccaccacacctagttaagttttttgtatttttagtagagatggggtttcaccatgttggtcaagttggtcaagaactcctgatctcaaatgatctgcccacctggcctcccaaaatgctgggattacatgcgtgatccaccacgcccagccatacagttattattttaatacagggtgtctgtcgcccaggctggagtgcaggggcgacatctccagctcaagcagtcctcctgcctcagcctcccgagaagctgggattgcagaggcacactaacacgcccggctaatttttttgtaacgttagtagagatggagtttcccacattgtccaggcagggctcaaacttctgaactaaagaaattcaccggccttggcctggcacagtggctcacgtgtgtaatcccagcactttgggaggccaaggcaggtggatgacgaggtcaggagttcaagaccagcttggtcaatatggtgaaaccccgtctatagtaaaaatacaaaaattagccgggcgtcgtggggcacgcatgtaatcccagctgctcaggatgctgatgcaggagaatcgcttgaacccaggaggcagaggttgcagtgagctgagatcgtgccactgcactccagactgagagacagaacaagacttcgtctcaaaaaaaaaagcgagagatttgatcgccttgaccttctgaagtgctaggattaaagatgtgagccctcagtcaggctttttttttaaatgtattttttattttttagcaattctcatgcctcagcctcccaagtggcttgagattacaggtgtgccaccatgcatggctaatttttgtatttctagtacagatggggtctcaccatgttggccaggctggtctcaaactccctacctcaggtgatccgcctgcctcagcctcccaaaatgctgggttacatgcttgagccaccgcccctggccctggtcaggattttgagtttagatccatgaaagtgtcgccacgtccctgctccctgcaggagggaggcctgtgggactttctgctctggctgtttacaaggctttgcttctggtgcctaaggctggaaccttctctctgcaggaggagataagcaaggacctcagagccacactgaacgccttcctgtaccacatgggccaacacagcaacaagtgagggagcccctcgggtcctgagcccccgggcagggctgtgcagccgtcgcccttggttcccactgagggtccctggctcacagtgctgggcaccagctgtggcctcagtgtgcccacctcagatgtcccctgggaacggcccagctcgggacagcacggggtgtcattgaggaacatgcaggggcctcccgggcagagctggggtcagtcctgtcttcacggccctgtgcgccgccgccccagcttgcaggtccctctgcccctagatttctgcggtcctgtgcctgcaagggaggtggtctgattgctgccgcccagaggtccccagtagggtgaccggccctatgtccaggctccctcttccctcccaaatcccttaattttgagttttcttggtctcctgggcccctccagccccagtcacgtgtcacacggaggatcaagtcctgctggtcggccgtggctgactcttcaggcacgttgggctcctgggtcagctgctgccgttcgacgctccctggagccctgactcaggtccttcccagagaggcaaggctggggccctgctgagcctctgctgaacccgggcccccgaggtcctgcttctggctcgcatggccataatcttgacagggactctgggtcccgcatccctgctcccagcacagcggggctcaggtagcaggagggagtggtgttcccggcactgcctatcaggctgggcgagggtcagcggggaagtaccacacagggcaagaacagaggcccgagaagccgggcggggggcagctgggcgtggtggggcaggcaggcgggtgaccagggctgtggctgcgttctccccatgtttcctgtgctcacaagctgccgctttagattctcccaaaaagtctccccgagggggctgaggagcccccgttgccctcggggcatctcagctggcagccccagcgtttccttccccatccctgtcctacagattcatgctggtcctggccagcaatctgcctgagcagttcgactgtgccatcaacagccgcattgacgtgatggtccacttcgacctgccgcagcaggaggagcgggagcgcctggtgagactgcattttgacaactgtgttcttaagccggccacagaaggaaaacggtgagtgtcccgcctcacccggcccccaatccaggcaccatatggcatgggtgtaggccagctgcctgtcttccggcctccacctcatggtgtggggtccgcggccttggctgcctcacttgggaactccttccccaggcgcctgaagctggcccagtttgactacgggaggaagtgctcggaggtcgctcggctgacggagggcatgtcgggccgggagatcgctcagctggccgtgtcctggcaggtgagtcaggctccggcacgtccacccagacgggaccccagctgctgtggagatgctcagttgcgccaggcctgtcccagcaccggtgtcatgtgggagcttctgttgaggggttttcagtgcacagacgtgacacagggccccctgcctcagtcgggccactccacgcagcagcgtgcacctgctcgtgccctcaggagggtggggccatgttggttgctgacagtcacacggggctctctggaagccagtccagcatcccaggtgcccgggctctgctgggtgtggtgggaggtttctggctctcatcttggccaacaggcacctcctagagggaatggtcgtcaggacaggccccgtgtgagttgggtggtgggggtggagggacgttgtgtttcctggaccaggtcccttggcttggtcctgtttgacgggttcagacacacggtgggactggcctccgattgtcccacagttagttgttcctcggaggcacccctcctgctgctccttggatactccagggccgaggagccgagactcactggagtgtgggcatggccatccagagagctctgatcaggccgggcgcggtggctcacgcctgcaatcccagcactttgggaggctgaggcaggcatatcacggggtcagattgagaccatcctggccaatatgtcgaaaccccgtctctactaaaaatacaaaaattagctgagtttggtggtgcatgcctgttatcccagccacacgggaggctgaggcagaagaattgcttgacccggggagttggaggttgcaatgagccaagatcgcaccaccgcactccagcctggccaaagattgagactccatctcaaaataaaagaaagctttggtctttgggggttgctgaaaaagcaaaaccaggtctgtggggtagaaggcgccctggccacacacaggcattgccgcctctggggtccgcagagtctgtgtgacaacctggtcactcgatctagcagcgtatttgaatgaatgagtgacagcttaatgaagtagccaagtaccttgatttgaacgtaggagccggggtatgtagggagctgtattagtcagtacaggctgggttatgccgctgtgacaaagagtcccagatctcaaaccccgtccttgtgggtcagctgaggtctctgttccaggccgtccccacttggaaccaggtctgtttccacaactcagaaagtggaggctgggtatggtggtggctgacgcttgtattcccagcatttggggaggccaagtcagtcagattatttgaagccaggggttcaggaccagcctggaaagcaaggtgagaccccatctctacaaaaaatgaaaaaattggccggacctagtggcacatgcctgtaatgccagctgcttgggaggctgaggtgggagggtcacttgagtccaggaggcggaggctgcagtgagctgtgattgtgccactgcactccagcctgggttacagagcaagaccctgtcttaaaaactgagaataatttggaacaagcccggtggctcactcctgtaatcccagcatgttgggaggccaaggagagaagatcacttgaggtcaggagttcaagaccaccctggccaacatgatgaaccccacctctacaaaaaatacgaaaattagctgggtgtggtggtgggtgcctgtaatcccagctactcaggaggctgaggcaggagaattgcttgaacccacgaggcagaggatgcggtgagctgagatcatgccactgcactgtagcctgagggacagagtgagactgtctcaaaaataataataagaagaataataatttgggctgggcacagtggcacatgcctgtaatcccagcactttgggaggccgaggtgttggatcacttgaggtcaggagttcgaggccagcctggccagtgtgccgagaccccacctctactaaaaatacaaaaattaactggacggggccgggtgtggtgacttatgcctctaatcccagcactttgggaggccgaggtgggcggatcacggggtcaggagttcaagaccagcctggacaacatggtgaaaccccatctctactaaaaaataaaaaaattatccaggcgtggtggctggcgcctgtagtcccagctactcaggaggctgaggcaggaggatcgcttgaacccgggaggtggaggttgcagtgagctgagatggtgccactgcactccatcctgggtgtcagagcgatactccatctccaaaaaaaaaaaaaagaaagaaattaacctggtgtggtagcaggcacctgtaatcccagctgctcgggaggctgagtcaggagaattgctggaactcaggaggcagaggttgcagtgagctaagatcacgccacagcactccagtctgggcgacagagcgaaactgtctcaaaatataaatgataacagtaataatttggcttggcacggtggctcttacatgtagcattttctacacataagattatgtcacctgagaacaggtgattttacctctcccttttcagtttggatgacttttctttttcttgtcccatatctctggccagagcttccagcgatatgtggaatagaagtggtcagaattcttgcttggttctttctcagaggaagctttcagtttttcaccactgagtatgttagctgtggacttgtgatcgctggccttctttgtgtttagggcatgttcttcaatcctggtttgttaattttttttgtttcttttcttttcttttggtggggggaccagtctcgcttttgccgcccaggctggagtgcagtagagacagggtttcaccatgttggccaggctggtctcgaactcctgacgtcaggtgacctgcccacctcagcctcccaaagtgctgggattacaggtgtgagccactgcaaccgaccagttgaattttttttttttaatcataaaagtgtgttgaattttgtcaaatgcttttcctgcatgagatgagagggtcatgtggtttccttcctccactctgctaatattgattgattttcatatattgaactatccttgcattccaggaatgaatcctgcttggttagggtgtagagtcctttaactatactgctaaattcgttttgctggcattttgttgaggactttcccagtgaggctcatcagggatattggcctgccatttctcttgtggtgtgtttgtctggctttaatatgagggtaatgctggcttcctaggatgagtgaggaaatgttcttcaatttgtccaagagtttgaggagtggtactgattcttcttaatgttttgtgaattcacatgtgaagaaatcaggtccaggtcttctctttgaccttttatagcttgaagatcttaggttcccagaaaaattgcaagggtagcacagagagctcccgggcccggggccttcccacatggtgaacatcatgtgtcactgttggacccacccgcgaccaggttttgccccagaatcccacccaggaggccacgtgacatttagctgtcacttctggtgggctcctgccaggtcccgtgcttcctggaggggtggccctgtgagcatctgcgtagcccctctcctctgctgggccctgggtgacgtgcagccactcgggtggaccctgagggtccctgcacctgtttgccctctcttgggtgggctcaagaccaaaaatgatgttgagcagtcctgggcccctgagccacagtggcggtgcggctccggtcagtgtctcctgcgctcccgggcccccgacccacagtggcggtccggctctggtcagtgtctcctgcgctcccgggcccccgacccacagtggcggtccggctccggtcggtgtctccccacacagtggctcttggcgaggggtgggcgctggcagaggggacgggcaccacgtggtcatccccatgacaggttctgtcatggtgacagtgttgtgggaggatggtgtgctgctgcccctgcaccccgtgagatgaatcctgcctctgggaggtacagctgggacggggcgagggacccactcagctgtccaggaagggtcccctgccctgtgcttcctccaggtgtcctggtgcactcctgagcacggcacctagtgggggtccccacaccctcaccctgacccatgggtgcctccccttggggactccacgcccttcgctggcactgagatggagagcgacctgtccgtggcagaagggctgctgcacctgaggtgcctaaggcgacaccaagggccacagccccagtagctccagcctccgtgtgctcaatgccaagccctgtgcccaggaggacagggaaatggaggcagaggtggccttgatgtcccaaggtgggcagtggctgcctctgccctggaggcctgtgagggtcagggtctgagggtctgaggtgcactatgacccgggggcactgcctggccacggctgagactcgcagagggtctgcagttcccacctgcctctcggaagctgccctgggtcagccgtcagtggtgctccgccttgggttttctattatcagaaagtcattgagcaacagcagtgctgaggacgcaggcagggctgtgggcactgcaggggccgctcccagtgtccacacgcgtgctgggctctgccaaggtgtgggaagcctgtgtttcaccctgaggttgtcctggtgcccctggtttggcccctccccacctcggggccctggcgtgcattaagggtggcgggttcccatagcggcctccctcagctccctctctcttcactaggccacggcatatgcctccaaggacggggtcctcactgaggccatgatggacgcctgtgtgcaagatgctgtccagcagtaccgacagaagatgcgctggctgaaggcggaggggcctgggcgcggggtcgagcaccccctatccggagtccaaggcgagaccctcacctcatggagcctggccacggacccctcctacccctgccttgccggcccctgcacatttaggatatgctcctggatggggactgggctgtgcccagggcctctgtcccccaggatgtcttgtggtggcggtcggccgttctgccccccagggcaccccctgttgtaggcactggctagggaggggcaggcctccttcctgcccctcgagacactcttgggagatgcattttccgtctggctcacagggggagggtgaggctttgtaccccagcccctgcccaggccactgtgagggtgggtgctggctgagcccctggggcagaaggagtggggcaggcggggtctttgttctcggctcccacagcagagccaggtgagggggggcctgccaggactagacagaagtggggcggcctgaaccctgcttccagccatggccaggggccacggaacccggcaggggtgtctgaggccgccctgtcagctggccggtccaagcctgtggctggagctggtgtgtgtttatctaataaagtcccacaggtgcctcacc

SEQ ID NO: 11766 - DNA, 24533 bp, Homo sapiens
ccggctgcggcgcgtggagctgctcccagccgcgctcgagtcagactcgggtgggggtcccggcggcggtagcggcggcggcggtgcgagcatgtcgtggctcttcggcgttaacaagggccccaagggtgaaggcgcggggccgccgccgcctttgccgcccgcgcagcccgggccgagggcggggggaccgcggcttgggagaccgccggcgcccaaggacaaatggagcaacttcgacccccacacaaaaaataggaccaaggcggcgcgcgagctggagcactcgcgtgagtgcggcggggcggggcgggcgggcgggcgggacgggccggggaagcgggagccctggccttgccgctcctcgctgctgtcggcagccacttcccgggcgagactgcgcccccggagcaccccccgccggagccgtctcgcgtgccgggaggatcggactctttccgtcacccgtttgcacctctgcagctgtcaggagcgggtcaggtgcgaaaagcggtgcggaggtggcgctcataggttacaggggtcagggtctggggctggccgtggtcttcagttaccgccgagcgtgcgggatccttctgcgcttgccgcctccacgtggcacaggccaaggcgtggccagatgggtagatgggtttgttgggtggttgctagcagtttccacgtaacaagggaagcgtatttgagagttacttgattctaacgagactagcagatttgcacttcttgttggaagacgttagcatttgcacggcgaggtctgtgaagcacaggccaggccgtgctgctcagcttgagtaaacccctgacccaaggccctcagggtgtgagcactgactgcaccttccctaagctcgggtctcttcccccagccttcctttcccctgtggctttaacgatttgtagcacgatgcagttcaaatggctaggagtctggaacgtagaaggtgctgaattcattgaaagaatacagtggttctcaactcttgtttaagccggggttctttctatttatttatatattgagacacagtatcgccctgtcgccgaggctggagtgcagtggtgcgatttcggctccctgcaacctccgcctccgattctcctgccgcagcctctcgagtagctgggattacagccgcgcagcaccacgcccggctaattttttttgtatctttagtagagacgggtttcaccatgttggccagggtgctctccaactcctgacctcgtgatccgcccgccttgtcctcctgaagtgctgggattacaggcctgagccacagcgcccagacagaagggattccttttttttttttttttttttttttttgagatgagtctcgctctgtcgcccaggctggagtgcagtgacgtgatctccactcactgcaagctccgcctcccgtgttcacaccattctcctgcctcagcctcccgaatagctgggagtacaggcgcccgccaccacgcccggctaattttgtagagatggggtttcaccgtgttagccaggatggtctcgatctcctgacctcgtgattaattttttgtatttttagtagagacggggtttcactgtattagccagggtggtctcgatctcctgacctcgtggtccacccgcctcggcctcccaaagtgctgggattacaggcgtgagccaccgcatgccacctttttttttttaagatgatgtcttgctctttggccaggctggagtgcaatggcgccatcttgtctcactgcaaaccgcaacgccctggttcaaagaattctgctgcctcagcctcccaagtagctgggattacaggcacgcgccaccacgcccagctaatttttgtatttttagtagagacgtggtttcaccaccttggccagggtggtcttgaccacctgaccccgtgatccacccgcctcgacctcccaaagtgatgagattacagtcctgagccaccgcaccttgccagcaggggttcctttttagaaagaagatcatttagggaatccctggtgtgaagcagatataaacagagtttccctgtttaaggagggatggcctggtggtacttgtggttccatcctgtgcccttccccggggtgctggggaacatcctgagctgaggtttctggccccggctgggtctcataaccccagagggacattcaggtttgggcccaggcccaggctaacatggatagtcctagctgggcaccaccgacagtgcgtgttctgttttgaagagatggggtcttgctttgtcgcccagtctggccttgacctcctgggtaaaagccgtccaaccgtctcagcctcctgaggagaggggactgcaggcttgctcggtaatttttcttttttcttttctttttttcttttttttttgacggagtctcgctgtcgcccaggctggagtgcagtggcgtgatcacggctcactgcaagctccacctcctgggtacacgccattctcctgcctcagcctcccgagtagctgggactacaagtgcccgccgccacgcccagctaattttttgtattttttttagagaccggttttcaccatgttagccagaatggtctcgatctcctgaccccgtgatccacccgcctcggccacccaaagtgctgggattacagacgtgagccaccgcgcccggctttgctccgtaatttttctgtgtgtttttgagactgagtctggctctgccgcccaggctggaatgcagtggcatcatctctgctcactgcaacctttgcctttggggttcaagcgattctcctgcctcagcctcccgagtagctgggatcacaggcgcccgccagcacacctggctaatttttgtgtttttttactagagacggggtttcaccatgttgtttaggctggtcttgaattctggcctcaggtgattcgcccacctcggcctcccaaagcgctgggatgacaggcgtgagccgctgctcatggccttcctcggtaattttaacgatcaggttaggatgggaatcaagggctggacttcagggcacctcggaggacagcggatgttggtgactgactttcttgctgcaggcttatttggagggttcctttgtgtcctagttcctgggggttttcacccgctaacttcacttagagattgaaacttctcccacttccagaagctgaatcgtagtgatcagcctgcggccccctgcagtggtacaggcctggttgagcagcctcaggccgcctccccatagtgcagacctgtgcctctgagttgctccagtcctggcggccccggagctcctgacccgcagtccgctctgccggcgttgccagtgccttggtctgccctctctgtggtggagcggggcccggggcagggtctccaggtgcaccgtggggagccctccatcaggcttttgtttcctgtggattgtgttccaggtgtgggctctttcattttgatcccttctctccttcctggcctcactgctggcgggtgagagaggtttctccggagttgactgccccctttccccgggtgccccctgccctgcccctctgcctggtagcccctctgcaagcccggcccctcccgacgctcctggcttcctccgtgcccctttcctggcagcggggtcgccgagattcgcccgttgctttgtccttgctgctctccaggcaaacgggcggctcctcctcaccgactgcctcctctgtcccttgaggctatagccccatgccgcctcgttcccagagtctgccctgacccctcctccggcctgtccttggaagtcacagcagtacattatcccagaactgtctgtgagcaccagcgctcgccctgcactccacagagggggtgcctggaggagagcctcgtgccctgtgggtgtgaattcacgcgctgggacgcacgtccctggcacagggtcacaccaaagtggtgaatgattgttctcattctaataaccgagaggccacacgggcacctgacctgctctttcccctctcctcctccccagagtcactgggggtgggaactgtcaatgagccattttcaggggagggagtggcctcagcttaatccagccaaaggtcccctcgggaggaaacaggcagagctcctcaccgtgacacccacgttcctgtcactgctctgtggcaggaccctgggggactgacacaccctcagtcccctcggggtcagagtgagagtggttgagagcccggggtcgcttcagcccttggcttcccgagcttagcagccaaacccgttgacctggcactgtcttccctgagaggcaggtcccggtctcatctgtgctctgttcactggggcccccgaggttagctaccaaggcgcttcctgaaatgtgacgctgatgcccgtcagcccagttcgtgcctaaccacaggcccaagcagacccaccccaacaccaaagcgtcgctgcctctgtctaaatgcaacgagtgctccccacggcacttccccctgcgtcagtcacctccaaaaattacacctgagctgagaacagacgctgggctctagttagtgacgtgtttgctgcagttgactctgaaggcttaaaaaagtgagacgggctgcgggaggaagagagacgggaacaacgcaccaacccaggagcatcgggggtccctgcctactttacacgtctttctgtgttagaataatttttttttttttgagacggactcttgctgtctcccccgctggagtgcattgcttcgatctctgctcactgcaagctctgcctcccaggttcacgccattctcctgcctcagcctcctgagtagctaggactacaagtgcccgccgccacgcccggctaattttttgtatttttagtagagacggggtttcactgtgttaaccaggatggtcttgatctcctgacctcatgatccacccgcctcagcctcccaaagtgctgggattacaggcgtgagccaccacgccctgctagaataatttttttttagagacggagttgcgctctgttgccccggctggagtgcggtggtgcgatctcggctcgctgcaagctctgcctcccaggttccagcaattctccagccttggcctccccagtagctgagatcacaggcgtgcaccaccacacccagcttttttttgtgtttttagtggagacaggatttcgccatgttggccaggttggagattttatttttcttaagtctcactctgtccagctggagtgcagcagtgtgatctgggtgactgtagcctctgcctccggggttcaagccatcctcccacctgagcctcagagttgctgggattacaggcgtgaaccaccgcttcccactaggtttttgtatttttagtagaggttgggtttcaccatgttggccaggctttggtatccgtgtatcctacacctgctctccgtgccacatgcgcccgcaggttacgccaaggaggccctgaatctggcgcagatgcaggagcagacgctgcagttggagcaacagtccaagctcaaagtgagtggggccggtgtgggcgaggaggccggggcgcacatggggttcaggcgtggagattggtggggctgctactggtgggtagggccaggggcgtgtacatgggcagcagtggggccagggccgagcttgggcgcctcatttcacagagggaaacaaggggaggtgagagacgctgccacagagccgcccgagagggagggtcagtgttggtgagggcgtctggtcgtcctgagggagggccggtgttggtgagggcatctggtcgtcctgagggagggggtcttcttcacattctcacctcatttcttttcactcagcaggattttttattttattttattttattttattttattttattttattttattttatttattttgaaacggagtctcactcttgcctaggctggagtgcaatggcgcaatctcggctcactgcaacctccgcctcccgggttcaagcgattcatctgcctcagcctctggagtagctgggattacaggcacgcgccaccacgcctggctaatgttgtattttagtagagacggggtttctccatgttggtcaggctggtctctaactcccgacctcaggtgatccacccgcctcggcctctcaaactgttgggattacaggcatgtgccaccacgcctggctaatgttgtattttagtagagacggggtttctccatgttggtcaggctggtctctaactcccgacctcaggtgatccacccgcctcggcctctcaaactgctgggattacaggcacgcgccaccacgcctggcctattttattttattttgagacagagtgtcactctgtcccccagtctggcgtgcaatggtttgatctcggctcactgcaacctccacctcccgggttcaacctcctgcctcagccttccgagcagctgggactacaggagcctgccaccacatctggcgaatttttgtatttttagtagagaagggggttcagcatgttgtccaggttggtcttgaactcctgacctcaggtgatccagccactttggcctcacaaagtgctgggattataggcaagagcgatggcgcccggcccactcagcaggattcctagaatgggcacgagctctgccctcatcacagtccaaaagtgagcacctgcctggagctgcccagaaacagccttgtggggtggggttggtgtctgaccttcctccccgggggccttcgcaggcttctctgctggtgcttctgtgcctgtgggtctggattcctccagggcctgatcctgggtgcagatgcagctggaagccctgaacctgctgcacacactagtctgggcacggagtctctgccgtgccggagctgtgcagacacaggagcggctgtcaggcagtgccagccctgagcaagtgccagctggtgagtgctgtgctctgcaggagtatgaggccgccgtggagcagctcaagagcgagcagatccgggcgcaggctgaggagaggaggaagaccctgagcgaggagacccggcagcaccaggccgtaagagcgcaagaggccgcgagggaggcgcccggctgcggggagcggcctggggcaggactgggagctgggtgtggtcccggggcactctggagtcagccattagagctgccctcggaacggccttgcacaaacgcctaagacctgtaaggtccctcactgctgagccggacgggaggtccccgcgcctccccacgtttgtgtgaggctgatggcgcgtcggagtccccggcgctccgcccagtcggcccagactgcagctcccggctgagatgtgtctttgccgccctcttctccccagagggcccagtatcaagacaagctggcccggcagcgctacgaggaccaactgaagcagcaggtgagctcagcctcccctgcgaggcgcctgcgtccctgagaacgtaggtggctttgtgggaccagtcagtgggtcagaggccacggggcaagaacgctggggttgctgacggtgggtgctagagcaggggaaactactcggacagacacgcaccagcacacgtgtacaggcacacatgcagatgtgtgcacacatgtacacggagacacaggcacctgcccacacggacacacactcctcgcacacacactcccggcagacaggcacacacacccctgcacacatgggcacacacacacccctgcacacacgggcccacacactcccctgcacacatggggaaacatgggcccacacacacacacccctgtgcgcacacacccctacacaggggcatggacagacacccgcaaacacacccccacacaacacgggcacgcacacacacaccccgccacaacacaggcacacatacccctgcacacaggcctgcacatacacccccacacaggggcatgctcacgcagcccgcacacacacaggtatgcagacacacccaaacacacatgggtccgcaggcacacactcccgcatggggcatgcacgcaccccccacacacacccgatcacacataggcatgcacacccctctgcacacatgggggcttacacacccccccgcacacgtgggcccgctcacacagcccacacacataccccttcacacaggcacacaccgccccgcacacacgggcctgcacacacacccccacacgggcatgcacacgcccacacacacgggcgcgcacacacccggacatgcacaaacacccacctgcacacacgggcacaccccaccacacacacacacaggcatggacacacgcacaccccctcacacataggcacacatacacaacccaggcacacacccccttgcacagacgggcacgcacacagtcccacacatgggcacacgcgcacacccccgcaaacacacacacgggcacgtgtacgcacccccactcacagtgtgcctcatacatacgggcacgcacctgcacacgagggcacacccccaccccccacccccacacacccccgcacccatgggcacacacacattactgcacgtgagggcatgcacacacacgccctgcacacccccacacacagaccccttgtgtgggttccacagcagcggctctccaggcacgacaagcctccttgtctcccacccgggcgcccagctggcagtctgggaggttctgcttgggagggctggtcagtggcggcgggcgggtctctgggtctatgagaaaagcttgggtgacatctgttccctggtccttagggaccgtcaccttcagtcctgagctcgcaggcggggttcacatgttgcctgttgtgggcattgtagctttaacgtttaattggcggaagacagaagcttccttaagcccagcctgaatcagggcagtggtgttgggaggtcggcccgcggtggcccttgtcagggaagccacagtgggggctgtttctgccactggggagtttgggaccctgaacccatcccctcagtgactgccgtcccagccgatgtcacccgtgtctgtgtcagggtgcggcgtctgcaggtccccaggtgcccaggacgcttggagttctgtggtcctggggcggacgcaacctctggattggtgttgagcatttttctggttttaaaggcttttctctttttctgcggcttcttctcagcaacttctcaatgaggagaatttacggaagcaggaggagtccgtgcagaagcaggaagccatgcggcgaggtaggctgtctgctctcctggctggggcggaggtggcgggggctgcttgtggacccggcgtgcactctgagcctgagttctgccgcccggcccctcatagctaccagtgcagtgggcgaggcctgctggggctccgcggggtggggctgcctctcggaagacacctctgtctgcgagtggacgccaggatctgttcagggagggcaggagctgcttcacttcatgggaagtacaggggcctttgttttttttttgagacggagtctcgctctgtcacccaggcaggagtgcaatagcacgatctcagctcactgcaacctctgcctcccaggtttaagcaattctcctgcctcagcctcccgagtagctgggattataggctcccgccaccacgcccagctaatttttttgtatcttcagtagagaaagggtttcactgtgttggccaggctggtcttgaacttcttgatctcattatccgcctgccttggccttccacagtgctgggattacaggcgtgagcctctgcgttctgcctagaacatgggtctttactgtcctggtttcagtggggatcacaggtatttggtgccatgtggcatttgttggcgagtgctccaggcaaacgtctgtcaccactcttcactgtgggtgggcttgtggcgaggtgtgtgcgtttaatgttcagtagccaggcacgtggcacgtcacgcgtgtctgagttctgacagctgtgtttctgtgtgaggggggcttccttcagaactccgcgttctggttttttgcttcaaagagctcgtcctgagaagttgcctaggcctctgggtcggatttctgccctaatccatgggcagggccggcctgtggcgctgtccctaccaaggtctgtgtgtgtctgtggcacgggcctgtccatggactgggcttgtccgtggagtgggtcggtccatggccttagcctgttggtggcgtgggccggtccacggcatgggcctgtctgtggcgtgggccggtccgtggtgtgggcctgtccgtggccttagcctgttggtggcgtgggccggtccgtggcatgggcctgtctgtggcgttggtctgtccgtggcgtgggccggtccgtggcgtgggccggtccacagtgtgggtggaggtggacgtgctgcactgcatggtgctgagctgccctacctctctggggcagccaccgtggagcgggagatggagctgcggcacaagaatgagatgctgcgagtggagaccgaggcccgggcgcgcgccaaggccgagcgggagaatgcagacatcatccgcgagcagatccgcctgaaggcgtccgagcaccgtcagaccgtcttggagtccatcaggtgagcactgccgaggcccgggccggccacagatggagccccgcaggtgtgagtcgctggtcccagggcgctctccagctcttccaggcctggccgccgtaggctgactccttggtgggggcactgcctcctgtcctggcaaggccgtgccgccatgtcagggcctcaccctcaacctgctctcgctgcgtggtacggatcttcgtgtccttcctggtcacaccactgctttccccgcaggacggctggcaccttgtttggggaaggattccgtgcctttgtgacagaccgggacaaagtgacagccacggtaaacatactcataaaacagggctggcaggtggctgagaggcagcatgtgggggcctcctggagccccaggtcctgtccctgccggctctgcacagccctgtagctctcccagcacagagcaaacccacgttgtacctgctgggctcggctgctcctccctccttgagctgggagaaaaaaatgcagttgccagcctgggccacacggtgagaccccatctctacgaagaataaaacattagctgggtgtgatggtggcgcctgtggtcctgctactcgagaggctgaggtaggaggatcacttaagcccaggaggtttgggctgcagtgagccaacattgcaccactgcactccattcttggcgagagaataagaccttgtctcaagaaaaaaatggccaggcggtagtggctcaggcctgtaatcccagcattttcggaggcggaggtgggcggatcacgaggtccggagatcgagatcatcctggtaagagtgaaaccctgtctctactaaaaaaaagaaaaaaaaagaaaaaaattagctgggtgtggtgacatgtgcctgtaatctcgggaggctgaggcaggagaatcacttgaacccgggtggtggaggttgcaatgagtcgagatcccgccactgcaccccaagaccagcatgaccaacatggtgaaaccccatctctgctaaaaatacaaaaattagcaggccaaggtggcgtgcgcctggaatcccagctgcttgggaggctgaggtaggaaaattggttgaacccaggaggcggaagttgcagtgagctgaaaccgcacaattgcactccaacctgtggaagaagagcgaaactctgtctcaaaaaaacaaacaaaataaataagccaggcctggtggctcactggtgtaatcccagcactttgggaggccaagacgggtggatcacttgaggtcagaagttcatgaccagcctggccaacatggtgaaaacccatctctactaaaaatacaaaaattggccgggcctcgtggcacaggtctgtattagctgagtgtggtgacctgagcctgtaatcccagtcactcgggaggctgaggcaggagaactgcttgaacctggaaggcggaggttgcagtgagccaagatggcaccattgcactccagcctggccacagaacaaaaccctttctctaaaaacaaagtcaagggcgcattaagcagctccttcatgttctcaggtgacaccgtctcaccaacatggcaacaccacctgcaacattcaccgtcacactgaccaggccaccggcaggtgctgcagtcacagcagtgggcgccggcaccacggcagagcaagtgcccactcagtgccgggcacctactgtgtgctgggcggggtggggggacggaggacacagccatgtgcgacctggggcgccaccacagcaggccagagcctgggcacaaaagagcgaggctttaaacgagagaagaatctgaacttcaaactctcagggttttattccgaataacgaaagtttttgcgaaatggagtcgggttcgctttctgggtctttgatttttttttttttgagacagagtctcactttcaagtgtgctgctcaagtgcagtggcgcgatctcgactcactgtcagcttcgcctcttgggttcacaccattctcctgtctcagcctccggagtagctgggactacaggtgtctgtcgccacgcccggctaatttttttgtatttttagtagagagagggtttcatcctgttagccaagatggtttcgatctcctgacctcgtgaatccgccgcgtgggcctcccaaagtgctgggattacgggcgtgagccaccgtgctcagccacagccagctaattttttcatgtttttagtagagacgaggtttttccaggttggttaggctggtcttgaactccaacctctggtgatacgccggccttggcctcccaaagtgctgggattacagacctggccagcctaaacgatttttaaaacaagttagagattttgggttagtcttgttttccaggaataaagtaccatttttagtggccaaggatgtaccagagggtgtggccctgtgacatccagctgggtctgcccagggccccgctcagcgaccgaggctttctaggatttatgctgccagttgcagagaaaatggccctgagtgagggcgttatgactgccccacctgcctcctgtaaccgcgtggctgtgggattcggggctgggaattcgggttcctgtggggccagcacacggccctgtgcttctccctcaggcggagagagggtgggggcagccccgtgcgtctcctgctctaggagggagggacggtgggggccggtgcgccagtgcggtgtctctgctgcaggtggctgggctgacgctgctggctgtcggggtctactcagccaagaatgcgacagccgtcactggccgcttcatcgaggctcggctggggaagccgtccctagtgagggagacgtcccgcatcacggtgctggaggcgctgcggcaccccatccaggtagcggcgcaggcctggccctccctgagtgcagttcctggctgagtcccttctgccccacgagcacagcccacgcacaccctcccgtcccttccctttccccggataacaggcacccgcacgctgcttcacgggtgggttttcctgtctggcgctgtaccttaggggtctgcatcagtgagacccttcccctgtctgcctcggtgtcccttgctcagggctcttgatggggcctgggagcacatcggggtccttgcaagacccgggacttgggtgtgcggccgtctgtcggggaagctgctacaggccatggcgtctggtggcctccctggggagccgcgccgcttgccagcccctgaggtgcctgctctccacaggtcactgggtaggtggttaagaaaataaaagccaataaggaaccggaaaatgccccaatcccagcaatagcctcctggtctcccggcggggcagggttccagctccgggccggtcctggctgtgctttggggcagctccgtttctgtgtgttaccgagcatgtgtgtgcgttggtggctgttccgtggctgtggcaggtgacccaatggtgcttccccttcccctccggcaggtcagccggcggctcctcagtcgaccccaggacgtgctggagggtgttgtgcttagtgtaagtcggtgtgcctgggaccggggaggtgcagggaggggaccccggagctgggctgggctgtggcccttgctagcgctcgtggtggcgcccaggagcttttgggtcctgagatgcaactgcttggactgtgccggggatagataggctgcccacgagctgggcggcttcctgaggagcagagtccgcacccgggcattcccgcagcccctgtcaccgaggcttccgtgggtgcagagtgtctcccccaaacccccgtcttccccggcagcccagcctggaagcacgggtgcgcgacatcgccatagcaacaaggaacaccaagaagaaccggggcctgtacaggcacatcctgctgtatgggccaccaggcaccgggaagacgctgtttgccaaggtgagagcgcctggctgaacaggtgggccaggggccgctggggtctcacctgcctgcaggtgtctgggggcctcagccgcctggggaatggaccccccttaggcctttgcctaccctcgtgtaggctcagggtgctggtgtgggcagcagcgcctcccatcttccaggcgggggacgtctcctgtctggcaggctgtggcttccagacagggacacccggcaggggctccacactccaggtggagtgtgcaggctttgcagaggcagagggaacatctgttctgtctcccctcactcttcttgtccagaaactcgccctgcactcaggcatggactacgccatcatgacaggcggggacgtggcccccatggggcaggaaggcgtgaccgccatgcacaagctctttgactgggccaataccagccggcgcgggtgagacgtccccacagcatgcaccaggcccttggctgcggcccagcaggctgccttctgggaagggggtccaggtgtctcttggggaccctgtctttctgcagctctgtccttgtggccacgcaggaggcccaatggagggtccctcggagggaaagtcccctgagtgtggaccctggtggacacgaggtccccagcgtgtggaggctgccagtgggatacttggctcagggcagaagggaggtgggtgggtgcagggggagaggggtcttcacagctgcaggggaggctcctccacagccgccctccccccaacacgcctgcaggtgggcgtgggcactggttgccttttctagaaccatttgaaagttagctgaagacagcatggcacactcccttcaataggtcccacagtgaccccgcgcagggcacagcccgggcacccttgtggcctcggctgtcctcgttggaaccacgatcctcatggttggcaccctcccctctggcctttgacctttcactttagaagacctgtccctgcgccaggcgtggtggctcacggctgtaatcccagactttcggaggcggaggcaggcagatacgaggccaggagattgagaccatcctggctaacttggtgaaaccccgtctctactaaaaatacaaaaaattagccaggcatggtggtgggcacctgtagtcccagctactcaggaggctgaggcaggagaatggcgtgaacccgggaggcagagcctgcagtgagccgagattgcgccactgcactccagcctgggagacagagcgagactctgtctcaaaaaaaaaaaaaaagaccctgctccttgcgtggactcttgagcactgcactgggtcgctgtgtgggtgaaacctgcagggcggaggctgttgccccatgtgtggttggctggtgtgtgggtgaaacctgcagggcagagtctgttgccccctgtgtagttggtttcccactgccttctgaggctgagacgtggtcagctgcccagaggccaggctgatcggcttctgtcgagtccaggacttagggctcctgatggggcagagcctgaccccgtggggatctgcctgcctggcctgctcctgccgcggccggacgctgctgtgggctgctcctggcgtcactctcgccttgcttggcctctctctcgttcacagcctcctgctcttcatggatgaagcggacgccttccttcggaagcgagccactgtgagtgtcactaagcctctgtctggccacaggagggtggtcgggtgggcgcggctgtcatcctgggccaggctgcagcccttaagctggcttgcagtggcgcaatcttggctcgctgcaacctctgcctcctgggttcaagctgctctcctgcctcagccccctgagtagctgggattacaggtgtttgccaccacacctagttaagttttttgtatttttagtagagatggggtttcaccatgttggtcaagttggtcaagaactcctgatctcaaatgatctgcccacctggcctcccaaaatgctgggattacatgcgtgatccaccacgcccagccatacagttattattttaatacagggtgtctgtcgcccaggctggagtgcaggggcgacatctccagctcaagcagtcctcctgcctcagcctcccgagaagctgggattgcagaggcacactaacacgcccggctaatttttttgtaacgttagtagagatggagtttcccacattgtccaggcagggctcaaacttctgaactaaagaaattcaccggccttggcctggcacagtggctcacgtgtgtaatcccagcactttgggaggccaaggcaggtggatgacgaggtcaggagttcaagaccagcttggtcaatatggtgaaaccccgtctatagtaaaaatacaaaaattagccgggcgtcgtggggcacgcatgtaatcccagctgctcgggatgctgatgcaggagaatcgcttgaacccaggaggcagaggttgcagtgagctgagatcgtgccactgcactccagactgagagacagaacaagacttcgtctcaaaaaaaaaaagcgagagatttgatcgccttgaccttctgaagtgctaggattaaagatgtgagccctcagtcaggctttttttttaaatgtattttttattttttagcaattctcatgcctcagcctcccaagtggcttgagattacaggtgtgccaccatgcatggctaatttttgtatttctagtacagatggggtctcaccatgttggccaggctggtctcaaactccctacctcaggtgatccgcctgcctcagcctcccaaaatgctgggttacatgcttgagccaccgcccctggccctggtcaggattttgagtttagatccatgaaagtgtcgccacgtccctgctccctgcaggagggaggcctgtgggactttctgctctggctgtttacaaggctttgcttctggtgcctaaggctggaaccttctctctgcaggaggagataagcaaggacctcagagccacactgaacgccttcctgtaccacatgggccaacacagcaacaagtgagggagcccctcgggtcctgagcccccgggcagggctgtgcagccgtcgcccttggttcccactgagggtccctggctcacagtgctgggcaccagctgtggcctcagtgtgcccacctcagatgtcccctgggaacggcccagctcgggacagcacggggtgtcattgaggaacatgcaggggcctcccgggcagagctggggtcagtcctgtcttcacggccctgtgcgccgccgccccagcttgcaggtccctctgcccctagatttctgcggtcctgtgcctgcaagggaggtggtctgattgctgccgcccagaggtccccagtagggtgaccggccctatgtccaggctccctcttccctcccaaatcccttaattttgagttttcttggtctcctgggcccctccagccccagtcacgtgtcacacggaggatcaagtcctgctggtcggccgtggctgactcttcaggcacgttgggctcctgggtcagctgctgccgttcgacgctccctggagccctgactcaggtccttcccagagaggcaaggctggggccctgctgagcctctgctgaacccgggcccccgaggtcctgcttctggctcgcatggccataatcttgacagggactctgggtccgcatccctgctcccagcacagcgggctcaggtagcaggagggagtggtgttcccggcactgcctatcaggctgggcgacggtcagcggggaagtaccacacggggcgagaacagaggcccgagaagccgggcggggggcagctgggcgtggtggggcaggcaggcgggtgaccagggctgtggcgcgttctccccatgtttcctgtgctcacaagctgccgctttagattctcccaaaaagtctccccgagggggctgaggagccgttttgccctcggcgatctcagctggcagccccagcgtttccttccccatccctgtcctacagattcatgctggtcctggccagcaatctgcctgagcagttcgactgtgccatcaacagccgcatcgacgtgatggtccacttcgacctgccgcagcaggaggagcgggacgcctggtgagactgcattttgacaactgtgttcttaagccggccacagaaggaaaacggtgagtgtcccgcctcacccggcccccaatccaggcaccatatggcatgggtgtaggccagctgcctgtcttccggcctccacctcatggtgtggggtccgcggccttggctgcctcacttgggaactccttccccaggcgcctgaagctggcccagtttgactacgggaggaagtgctcggaggtcgctcggctgacggagggcatgtcgggccgggagatcgctcagctggccgtgtcctggcaggtgagtcaggctccggcacgtccacccagacgggaccccagctgctgtggagatgctcagttgcgccaggcctgtcccagcaccggtgtcatgtgggagcttctgttgaggggttttcagtgcacagacgtgacacagggccccctgcctcagtcgggccactccacgcagcagcgtgcacctgctcgtgccctcaggagggtggggccatgttggttgctgacagtcacacggggctctctggaagccagtccagcatcccaggtgcccgggctctgctgggtgtggtgggaggtttctggctctcatcttggccaacaggcacctcctagagggaatggtcgtcaggacaggccccgtgtgagttgggtggtgggggtggagggacgttgtgtttcctggaccaggtcccttggcttggtcctgtttgacgggttcagacacacggtgggactggcctccgattgtcccacagttagttgttcctcggaggcacccctcctgctgctccttggatactccagggccgaggagccgagactcactggagtgtgggcatggccatccagagagctctgatcaggccgggcgcggtggctcacgcctgcaatcccagcactttgggaggctgaggcaggcatatcacggggtcagattgagaccatcctggccaatatgtcgaaaccccgtctctactaaaaatacaaaaattagctgagtttggtggtgcatgcctgttatcccagccacacgggaggctgaggcagaagaattgcttgacccggggagttggaggttgcaatgagccaagatcgcaccaccgcactccagcctggccaaagattgagactccatctcaaaataaaagaaagctttggtctttgggggttgctgaaaaagcaaaaccaggtctgtggggtagaaggcgccctggccacacacaggcattgccgcctctggggtccgcagagtctgtgtgacaacctggtcactcgatctagcagcgtatttgaatgaatgagtgacagcttaatgaagtagccaagtaccttgatttgaacgtaggagccggggtatgtagggagctgtattagtcagtacaggctgggttatgccgctgtgacaaagagtcccagatctcaaaccccgtccttgtgggtcagctgaggtctctgttccaggccgtccccacttggaaccaggtctgtttccacaactcagaaagtggaggctgggtatggtggtggctgacgcttgtattcccagcatttggggaggccaagtcagtcagattatttgaagccaggggttcaggaccagcctggaaagcaaggtgagaccccatctctacaaaaaatgaaaaaattggccggacctagtggcacatgcctgtaatgccagctgcttgggaggctgaggtgggagggtcacttgagtccaggaggcggaggctgcagtgagctgtgattgtgccactgcactccagcctgggttacagagcaagaccctgtcttaaaaactgagaataatttggaacaagcccggtggctcactcctgtaatcccagcatgttgggaggccaaggagagaagatcacttgaggtcaggagttcaagaccagcctggccaacatgatgaaccccacctctacaaaaaatacgaaaattagctgggtgtggtggtgggtgcctgtaatcccagctactcaggaggctgaggcaggagaattgcttgaacccacgaggcagaggatgcggtgagctgagatcatgccactgcactgtagcctgagggacagagtgagactgtctcaaaaataataataagaagaataataatttgggctgggcacagtggcacatgcctgtaatcccagcactttgggaggccgaggtgttggatcacttgaggtcaggagttcgaggccagcctggccagtgtgccgagacccccacctctactaaaaatacaaaaattaactggacggggccgggtgtggtgacttatgcctctaatcccagcactttgggaggccgaggtgggcggatcacggggtcaggagttcaagaccagcctggacaacatggtgaaaccccatctctactaaaaaataaaaaaattatccaggcgtggtggctggcgcctgtagtcccagctactcaggaggctgaggcaggagaatcgcttgaacccgggaggtggaggttgcagtgagctgagatggtgccactgcactccatcctgggtgtcagagcgatactccatctccaaaaaaaaaaaaaaagaaagaaattaacctggtgtggtagcaggcacctgtaatcccagctgctcgggaggctgagtcaggagaattgctggaactcaggaggcagaggttgcagtgagctaagatcacgccacagcactccagtctgggcgacagagcgaaactgtctcaaaatataaatgataacagtaataatttggcttggcacggtggctcttacatgtagcattttctacacataagattatgtcacctgagaacaggtgattttacctctcccttttcagtttggatgacttttctttttcttgtcccatatctctggccagagcttccagcgatatgtggaatagaagtggtcagaattcttgcttggttctttctcagaggaagctttcagtttttcaccactgagtatgttagctgtggacttgtgatcgctggccttctttgtgtttagggcatgttcttcaatcctggtttgttaattttttttgtttcttttcttttcttttggtggggggaccagtctcgcttttgccgcccaggctggagtgcagtagagacagggtttcaccatgttggccaggctggtctcgaactcctgacgtcaggtgacctgcccacctcagcctcccaaagtgctgggattacaggtgtgagccactgcaaccgaccagttgaattttttttttttaatcataaaagtgtgttgaattttgtcaaatgcttttcctgcatgagatgagagggtcatgtggtttccttcctccactctgctaatattgattgattttcatatattgaactatccttgcattccaggaatgaatcctgcttggttagggtgtagagtcctttaactatactgctaaattcgttttgctggcattttgttgaggactttcccagtgaggctcatcagggatattggcctgccatttctcttgtggtgtgtttgtctggctttaatatgagggtaatgctggcttcctaggatgagtgaggaaatgttcttcaatttgtccaagagtttgaggagtggtactgattcttcttaatgttttgtgaattcacatgtgaagaaatcaggtccaggtcttctctttgaccttttatagcttgaagatcttaggttcccagaaaaattgcaagggtagcacagagagctcccgggcccggggccttcccacatggtgaacatcatgtgtcactgttggacccacccgcgaccaggttttgccccagaatcccacccaggaggccacgtgacatttagctgtcacttctggtgggctcctgccaggtcccgtgcttcctggaggggtggccctgtgagcatctgcgtagcccctctcctctgctgggccctgggtgacgtgcagccactcgggtggaccctgagggtccctgcacctgtttgccctctcttgggtgggctcaagaccaaaaatgatgttgagcagtcctgggcccctgagccacagtggcggtgcggctccggtcagtgtctcctgcgctcccgggcccccgacccacagtggcggtccggctctggtcagtgtctcctgcgctcccgggcccccgacccacagtggcggtccggctccggtcggtgtctccccacacagtggctcttggcgaggggtgggcgctggcagaggggacgggcaccacgtggtcatccccatgacaggttctgtcatggtgacagtgttgtgggaggatggtgtgctgctgcccctgcaccccgtgagatgaatcctgcctctgggaggtacagctgggacggggcgagggacccactcagctgtccaggaagggtcccctgccctgtgcttcctccaggtgtcctggtgcactcctgagcacggcacctagtgggggtccccacaccctcaccctgacccatgggtgcctccccttggggactccacgcccttcgctggcactgagatggagagcgacctgtccgtggcagaagggctgctgcacctgaggtgcctaaggcgacaccaagggccacagccccagtagctccagcctccgtgtgctcaatgccaagccctgtgcccaggaggacagggaaatggaggcagaggtggccttgatgtcccaaggtgggcagtggctgcctctgccctggaggcctgtgagggtcagggtctgagggtctgaggtgcactatgacccgggggcactgcctggccacggctgagactcgcagagggtctgcagttcccacctgcctctcggaagctgccctgggtcagccgtcagtggtgctccgccttgggttttctattatcagaaagtcattgagcaacagcagtgctgaggacgcaggcagggctgtgggcactgcagggccgctgccagtgtccacatgcgtgctggctctgccaaggtgtgggaagcctgtgtttcaccctgaggttgtcctggtgcccctggtttggcccctccccacctcggggccctggcgtgcattaagggtggcgggttcccatagcggcctccctcagctccctctctcttcactaggccacggcatatgcctccaaggacggggtcctcactgaggccatgatggacgcctgtgtgcaagatgctgtccagcagtaccgacagaagatgcgctggctgaaggcggaggggcctgggcgcggggtcgagcaccccctatccggagtccaaggcgagaccctcacctcatggagcctggccacggacccctcctacccctgccttgccggcccctgcacatttaggatatgctcctggatggggactgggctgtgcagggacctctgtcccccaggatgtcttgtggtggcggtcggccgttctgccccccagggcaccccctgttgtaggcactggctagggaggggcaggcctccttcctgcccctcgagacactcttgggagatgcattttccgtctggctcacagggggagggtgaggctttgtaccccagcccctgcccaggccactgtgagggtgggtgctggctgagcccctgggcgagaaggagtggggcaggcggggtctttgttctcggctcccacagcagagccaggtgagggggggcctgccaggactagacagaagtggggcggcctgaaccctgcttccagccatggccaggggccacggaacccggcaggggtgtctgaggccgccctgtcagctggccggtccaagcctgtggctggagctggtgtgtgtttatctaataaagtcccacaggtgcctcacc

SEQ ID NO: 11767 - DNA, 490 bp, Homo sapiens
atgtcaactactgactagaactggtggaaaaggttgtttactgaaactgcgaggaaggtagactttaaaatgcaggacaaagactgaacatactgatatactgattctttgaagggaagtttagaactcattgtatctaacattattcaggcttaaaacagtttccaatccagtgggaaaagtcactccatatattccgtgaagtcaaccagttccatcaaggagaaagtcagggccgctgggagcgcgtggaccgtgggctccggggcggcgcctgcccgggcaccccggccccgtccacgccccgcaagaggagctcgctggccccgccacgcgggaaggggtcgccccggggtcttgggcgggagggccgtgcgggctgcggagacaccgaggaggggaggcgcctctcctgagctcttggcgcagcgaccccagggcgccgactcatcgcggaagggctcggcttgcccgggcgccggtgccgcct

SEQ ID NO: 11768 - DNA, 318 bp, Homo sapiens
aactggtggaaaaagttgtttattgcaactgcgaggaagttagactttaaaatgcagaacaaagactgaacatactgacataccggttctttgaagggaaatttagaattcattgtatataacattattcaggcttaaaatagtttccaatccagtgggacgagtcactccatataattctgtgaagtcaaccattcctatcaaggagagagtcggggccgccgcgagcgcgtgaaccgtgggctccggggtggtgccgacgcggctgcgggccgggactgacgttgcgccgggttcgagtactcccctccggagttt

SEQ ID NO: 11769 - DNA, 4938 bp, Homo sapiens
tttttttttttttttgagatggagtctcactctgttgcccaggctggagtacagtggcgtgatctcagctcactgcaacctccgcctcccgggttcaagcgattctcctgcctcagcctcacacgtagctgggattacaggtgcgtatcaccatgtccagctaatttttgtgttttagtagagatgggagtctcactatgttggccagactggtctcgaactcctgacctcaagtgatccgcctgccttggcctcccaaagtgctgggattataggcatgagcccccgtgcctggctaaacccaaatttttattaaaatgcaaatataaattctaggttaacccatattttttttctctgagcagaaaatagcagatttcaatgggttacattttgactcttaaatataataatgccattttgcctcagaagagagatttttaaaaattacctttgtggaactacatattttggaaggaaaggaaagcaagatgctgaggaggaaagtgggatttctgatctttattcttccccgggaaagaccttgtcactaaatatcaacaataatttccgcattacattaggaagagttggaatagcagcacagtctcctgcagtctcaatgcaaggtttttcacaactcatgttcactgagaactaacggctgtttacactcttgggtaacacaaatgcattcatgaaaaccagacggctacataaatgtctcaggaggcaggagaatgggctattttgaaaattagccctgactcaaaactggctgtagaaaatcattctctcctcacctaattcatagatgtgccagaagggcccgacccccagagcccctctgggatcagagcaagtttcaatgaacatttgtataacaactagaaaaggaagctgcaaatatttatgaataaactgcagcaagtattctctcctgctatggagtctcaccataaaattagggagcttgatattacagggtgacaacaacccctcccagttttccctgaacagaaatgttgcccgggagcaagattttccatcgtaaaactgacagaatggggcaaatcaggacacttgattgccctaaccttgacagtaaggcctgtccatttctgattacaagtattttgagcctactgagttagcattacttagttacaaagctgctcttctgctgtagaaaatggggatgtcctgggatcctaaattttggcattggggctaggagtggggaaaactattaggagtgggagacaggggaaagtattggtcagtatttcaggagaagaaagaggccatgctacgtttaaaaaattaaaattaaaatatttatttaaatataattagtccataaactgccctagtgccctggccatcccctccctctccctctctttcaactcttagtgtcaggctacactttttcctggaagcctgacttccaattcaactaagtatcatacgcaaatgttggtggaggtaccttacagagatgatcttaaggtttccccatccctggacttcccagcatacactcatctgacattgactagggaacagtttagcaggaagatggattcaaagctcttgggttaagaattcttccccttacttgttctttatcaggcaatgacctagcccactgtcatcttgcacttgcctatccgtcaaatgggacaataaagatatccttggggtcagggtgctagtgaaagccagggtccacctttacactttttgatgctctgagtaggtactgcatgccacagaaacattaaaactcagaaactaatatcctatgcagtcttggagattgaatttgttcctatgaaggttcccatttctcaccatgtgagttatggttggggaaggacctgaaactgggagtggactgtgaaaggctgcactggagaagaggacttacagtgtcagtgagttgtgttctctctgttcctctttagagataggctggaggcatgtatagcttggcttccataatgcagataaaaaaatatttttccctaagtgttttccttgccttagtgtcttcttgctgtttctgcctggacttggagagattacaactatcgaattgagaataccagaagcaacacaagttgtaacttagagacacagagcttacgtggctgcaaatactttgtagtgtaagcgctgacatacctcagttttggagccaaagagtcacttttggtcacttctagaggtgtgatcttaggcaatttgctcaacctctctatgcttcggtttcctcatctgaaagatgaagatcataaaagtaaccatcccacagggttatcatgagaatcaataaaagaatctatgtggagtgcattgcataggaccagctccacaatgctctatatttcattatgttcccttgcacttacaaaagatgacggactgttcgtgatggcacagatacagactatcacattcaggacttaggtccatggctctcaaccctagagagcatttataaaactactaaggccttagccttacctcagaccagttaaattacaattactggagaacagggcctaggcctcaatatatttcttaagctccacaggtgattctcaagagcaaccaagattgagaactgctgatgcattggactctgttggttgtgtctttaggacctaatagcaatcatcagttgtgtgcttggtccgcaggggattctgctaagactgtcaggccatacagggtgtgggcctagttctgggagaatggttttcaatttgactcacacctggggctggtaaatcttcagtgggtgcatcacagagtagggcaacaaggctccctgagagttgagagaagggagtgggagcaaataggaggtaacccccctattccttaattttaaaaatgaaaaatcagagagctaagagtttggagttctaaggtaaagtccaaactggggcacatactcccacttgggtaaaaagaaggaaccaacctgcaaatcagaccaaaaccgcagatgcgcagctgggaaactagacacgaactcatcatatccaacactgaaagatagctcagatttctcttgcatggccttcaaagcaggagatggttctcgagcctcctatgaactagagcgcaatctcttaagaatgattatacaggtcagctgtggtggttcacacctgtaatcccagaactttgggaagttgatgcgggaggatcttttgagctcaggaattcgaggctgcagtgagctaggatcatgccactgcattccagtctgggtgacagaggaagaccctgtctctaaaaaaaaaaaaaaaaagagagagagagaaagaaaaagaattatcatatagctttggggagctggtttagcttctttagattaatgacagatatttggacttgcactaagctatcacctgcatattaaagcagtgggatttatttgtccttctctgagcttctgtttccccaactttaaaataggaatagtaatacctaccccttactttcctcaaagggaatttgtgatgataaacagaaataatgttccacataaaactcagtttgagctcctacaaagaaaaaggcatgacttaaatcaagataatattattgtcctggaggaaggtgctggaacaagttattatttttattcttatcaaagaactgtctttctgggcaaagcacaaagtttccccaggagagatttctctcaagtattatccagtaaatcccaacattccatttcttctaatgagccacacattaaaacttgctgccaaggtctataaggcaccccacagtagtaagatggtcaaaaaaaaagtttatgttaaccccaaaatgagttccaatctaccccctaacatgttcaataatggttccagtgccgtgacccactttggatgccttgctgtggtgagctgtgtatgcatttcacacatctgtgcttgctattgttctccaggccactgacactcttctacaaggctagtttaacaaccctatggggttttttattattggaaataacattgagtctatagcctccccagctgaatcttaaatacttctttcttttccataatggactgtcccagtattattaaactgtaaccctttttttgggaatacctttcacatctcttcaaaatttgcttttttttctacttaagctcactatttcttttaaactaactgttctttccatagactcttattagcatttcaaacctgataatatattacagctttgaggcacatcaggtcttttgtgtagcctgtctcccaaaatgttcccaagaattaaaacaagggaacaaacaatgcactctaatttgttgaaaattctgctctgcaaaatttaggtatgcaatatgactaaaacctgaatgggaaggagaggcagaagttcagaggaaagtataaaatgtgaatatttttgaagaaatgagaagtcagggaggtgaaagatggcaggaaaagaaatgtttgtatacatagggacaaagcaatgattactcaatggacacaatgctaattttggtgggatgattaaaacaaatataagatcgtcacaatcttgtgtgtgtgtccactttgggggagtctccagtcagcagatgacaatctgctgatggatctttctaaattgttaataaccataaccctttttttcttttttttgagacagagtttcacttttattgcccaggctggaatgcagtggtactatctcagctcaccgcaacatccacctcccaggttcaagcgattctcctgcctcaggctcccaagtagctgggattacaggcagccacaaccacgcccagctaattttgtatttttagtagagacagggtttctccatgttggtcaggctagtctcaaactcctgacctcaggtgatctgcctgcctcagcctc

SEQ ID NO: 11770 - DNA, 258 bp, Homo sapiens
actttcagcagaacttggaaaagccatcatttcacttggttttactttccccagcctttgaaaagtggagctagaaatagctcagaataggacagtcacgccgatttggcaatgagaggccactgcataaagacttaaatattaggaccttcaatctgtaaatgtggtagtggataagttgaaaactgatatgtgccttaaattctagggtactaggagacacagactgaatttgcaaggggcatatttaggtacagc

SEQ ID NO: 11771 - DNA, 16279 bp, Homo sapiens
tggctaggagcgccgaccgcagggcctctacgggtgaggagggaccggggccggggcgcgagagcaggaccgtgtgtcctgggggctggggcgggcctgccctcaggtttatctaacaggtgtgtctggtgccccggccaggcccccgggggtgttgtgtggaggagctgggcgttaatcctcgccagctgggtgcacatggtgtggagcgcggttcccaggaagttgaacgcacgcgcgcctggagcagaggttaaggatgatggccagcggtccggccatacgctggtcttggcctggcagggctggaactgggactggggtcggaacttcgctccccagactttggcgtgggaaatgagacagttggtcgcgctctctgcagccatcggttttgaatgggcacgaacgtcccaggccccttctcttctcccattcccgggcgcatcccacggtggtcggagccattgaggcagctgctccgaagaccacctccgcaccgagtaggtcggcgctttccccagggtacagagggacattctttgtctctttttcctaggctcctacccctagaaataccgagtactgtactgtgatttctgttgcgggagctgatgtttatgtaagccaaactaatttaaaattttcatacaaaattgaacgggcgattataggattcgttttgttaggataatccctcatgaacgaatcctagaatggatcttaagaaattaatttaggcaggatttgctaaataggggagagagcgctagctgtatggtatgatgatgtaaagattggggtctgttgaggatggtaatcgagctcaagatgcgaaaacgaggattctagccccaagtcacttacttgctgtgttacctaaggggcaagtcttgggagttccaggtgctccagcttcctcatcggtagactgggaataacgcctagattgtaaaggtcaaactatcagaaaatacttttgaacattcatgcagttacacaatttaataaatatggccaggtgtgttaaaaatctttaacggaatagattcagaatggattcttgttatcgaaattgttataaaatgaatataaaggaatccgaagtccgcccctcccccattcacctgtacttagaaggttccccaggagctcttgagaaatacataggctggtttagatttggccttagattgtattttttaaaatttgtagatcgacttttaaaatcttcatctccggtgtctattacttgttgctctccgttggttgcttctagcagcagcctctctccccattcgtattccaacctgatacagaggctcagacgccaaatagttgaagttttgtttaaaaaatattcaattgagtgaaaaaatattcaactgatgtgatgactagtaaaaatgaatttggtgtatgctttccgcgatattgtggcagtttgggaatttttttttttttttttttttttgtccttctggattttctgaaatgtgacctacaggtaagtcttattcgttattcattcactaggcattattgggctagggttaggcttaaacgggtcttctaaacgcctgctaatttagcagttaatcagaaaaggttctgaggaatacttaaggaggattagtgtttaaagttcatctaaaaactttaaagaacctaatgatatgatgagattccgcttcacacaactgtgcaattttattcgcagaaatttcctagttttgcaatatctgggcacctgaagatgctaaaagattatttatataaaattacttatttaattatgttctaaacccccttggaaccaggtttcaagtcatatcttgcttcactttgcccagtaccttagttgggcaccagcagaattttacggtttgaggacagagtgagctaaagtgggccttcagtatggctctgttttgtagaatagctcataaaaaaatttttgatgttaatttctgattgcctggttaatagattcttatttcaatctgtaatgctttgtttaatgtattttgactagtctgattcccattttccaaatgtaggttctaagtgctgcttatgacttaatttttaacccttgtacaacagtaagatagggaatttatctactctagtgcatcttcagtgtaatggttaagagcagagtctgaagtcatactacctagcaggactggctacgtaatctgtggtaatccaaattaaaatgcagggttccttgttaaaaaattaagaacttcaaaacagtggcagcagggtatcaaacttaagtgcagggccctgtgtaacggcacaggtcaggggcttctgaagctggccctgttgcctcattttgaatcctcactctgttcttattggcactctaaccttgagcaagttactgtgcctgcttccttatctgtaaaattgggataataatgatacatcgttcattgtatttttaagagttaacatatagaaagttttcaataagtgttagccaatattatttatttttatgatcattcgtggaaaaggactgtctcatcaaagaaaagtacaagaaaatattagtatttcctggttaaaattcattatttaagggcttcataatcctagttgttttcctgtatacttcttccctctcatgaaaattattaaccctatttttcatgttttctagaccacatttttattgtaaacacagacaactttataggaaaaaggaatctagttaaatgtggttaaggttgatttaaattctcttttgagttttctttgaactttgtatttacaactatatgtttaatagcaagaccaaaatgtttaaatagtgtgctgcctcgaggaatttacatttttaatactgtacacatttcactttattaatacttagcctgtttatctacatacctgaaaaacaatgttgctacctaccattcagatgagattacacacaaaaacctcaagggtccaatttagacaaaacactaaaacacgtggactcaatttcatctattaaaaacttgttttggctgagcatgctggttcacacttgtaattccagaactttgggaggctgaggctggaggatcacttgaggtcaggagttcaagaccagcctttccaacatggcaaagccccatctctactaaaaatacaaaaattagccaggcgtggtggtatgagcctgtagtcacaactactctggaggctgatgtgggaagctgaggtaggaggatcacttgagcccaggagtttgaggctgcagtgagctatgattgcaccactgcactccagcctgggcaacagagtaaaaccctgtctcaaaacaataaaacaaaacaaaaaacctattttgaatggctattaaacttgttaaatttgaaatgactgcttgatcatcacaatttctatattttccttaatattgttagaactgggtatagtgtatgcagcataatttgaatcattttgtgtgtgtgtggctggggggacctctcagcagtctacattataaactacgttcttttctacccaagaatgctaacttttggtataacataaacgtaagagcctgtcattctttttgtagttcctgtaaccagcacagtgcctgattcatgaattaaaggtaaaaaaaaatgaacaagaatttataaactttaattttaaatttattgctaactagcatatatcttattaagtacttgcagtattccaggcactgctaagtgcatgactgcatacagtaatgcatttaattctcccagtaatttcatctccattttacaaatgaggaaactagattctaaaagcttaattaccgtagtacatatcacacagttgacatttgaacaccaggtatgaatccaaagctcatgctctttctatgcctaggtttaaatcctggctccgctaattttgtgaccttgggcaagttacttaacattttctcatctgttaaaatgtagataataaccactcctaacctgtaggatggttgaaataaatgaattagtaaagctctttcaacagtctggcacataagaagtgctgagcaagtgttaacttctgttgttacatcacatcacactaccttcccataactagtatattgcagcattgcttatatagttacataggattatacaggcagaaacttattatccatctttaaggaaaagttaagaatatttgccctaaagcatactgtgacttatgaaataaggaacaattgggggttaggttattgggcaaattgttctctcattaaaatatggtttctttaactggatatagaaataagttggggactgctttttttggatctctaatccaaaaatccaaaacactccaaaatttgaaactttattgagggccaacatgatgccacaagtggaaaattccacatctggtataatgtacaaaaacttttccatgcacaaaattatttaaaatattgtgtaaaatatttgtgctatctgtataagatgtatatgaaacacaaatgaattttgacttgggtcccatccccaagatatctcattatgtatatgcaaatatccccaaatctgaaaaaaaaaaaaaaaaaaaaaaaaaaaaaaaatccaaaacctgaaacatttctggtcccaagcattttggataaggaatactcaacttttaattgttgggaagcatctgtttcttttagcaattctgtgctgcacagaagccccctggccccagttttatgctttgtatgatttgtttttcatccttcctatcgttacttctctgttatttagtctcagttttaaaacattacaactagtgagaacctgctcatttctaaatgttcaaaaaagagggggaaatatcatgatcacttttcaatagcatgaaaaacaccagctatttttaagctgcttagatgcaactgagaaacactatacagtttaattttaatttaatttttttgagacggagtttcactcttgttgcccaggctggaacgcaatggtgtgatctcagctcactgcagcctccacctcctgggttcaagtgattctcctgcctcagcctcccaagtagctgggattacaggtggccaccaccacacctggctaattttgtatttgtagtagagacagggtttcgccatgttggtcaggccggtcttgacctcctgacctctggtgatctacctgcctctgcctctcaaagtgctgggattaaaggcacgagccaccatgcctggtccataccacagatttttagaaaatctgctgtgaaaacaaaatcctgcagtgtatatctagcatagccaaggtaaagtatttctgagaatgccaaaaaaaaaaattaatttgagcctgttcatcaattttcttctattcatggttcattgaaaaaaaaaaaaaaagctacatgtggctagacatggtggctcacacctgtgatacagcactttgggaggctgaggcaggcgaatcacccgaggtcaggaatttgagaccagcctggctgacatggcgaaactccgtctctactaaaaatacaaaaaaaactagctgggcgtggtggcaggtgcctgtaatcccagctactcagaaggctgaggcaggagaattgcttaaacctgggaggcggaggttgtggtgagccaagatcacatcattgcactccagcctgggcaataagagcgaaactccatctcaaaaaaaaaaaaaggctacatgcccagtaagttttttgagagggaatttcactcttacattgcccaggctggagtgcaatggcgcaatctcaactcaccacaacctctgcctcccaggttctgaggcgattctcctgcctcagcctcccgagtagctgggattacaggcatgcgccaccacgcccgactaattttgtatttttagtagagatgggggtttctccatgttggtcaggctggtctcgaactcccgacctcaggtgatctgcccacctcggcctcccaaagtgttggtattacaggtgtgagccaccgtgcacagctgaaagttttctttattggcaagtaagactaagagattacttttttaaaaaaaatttttttccccttgcaatttcctgttgaaacagatgccttcttggctcaataataaaatccaagaacataatgtaaaaaatttaagagcccatgaaaagtcagctattcatttagtagcaccaacccagaggaaaaacatgttttaaaagacctgataatagccgggcgcagtggctcacgcctgtaatcccagcactttgggaggccgaggcgggcagatcacctgaggtcgggagtttgagaccagcctggctaacacggcgaaatcccgtctctattaaaaatacaaaaaaattagccgggcgtggtgtcacgtgcctataatcccagatactcaggaggctgaaagaggagaatcacttgaacccagaaggcagaggttgcagtgagccgggatcacgcctctgcactccagcctgggcaacagagtgagactgtctgaaaaaaaaaaaaaaaaaaagacttgataataaatgggattttatagtttaaaacttactaatttagtcacttagccatttttttatctgatagtaggcatgatttttctatttatctgtagttgtggaatttaatgttagattcaggctgggttgcagtaaaatatctcgcatatgtgctaaagaatgcttctaattgcattaatttatattaactttctcaacaatcataattttccttctattaaataaagtgacttaatattcaaatttttattttagaccttactagaaaaatgaaacctgatgaaactcctatgtttgacccaagtctactcaaagaagtggactggagtcagaatacagctacattttctccagccatttccccaacacatcctggagaaggcttggttttgaggcctctttgtactgctgacttaaatagaggtaatgtacaaaatcctgtgtaaaattagagttagccttccatttttctctaaacattatgatgcagataattttttttaaatatttgacttttggactattttttgtataatacttagtttttaaagtgatggacactcaataccaatgagtgtgtgtcatggctaagaccaaatattactgtgaaatatttaaaatgacttaaatacaacatcactccttcctaattaagccaaaaagatttctcataaacaaaaattaaattatcatgtatgatgacacataaggagggatcttaagaagctggttggggaatgaaggtggaaataattttccttggataaattgaaagggtttttatacagttatttcttttttaacatctaaattctccaagttaacttccttaaactttggtaattaaaagtcaactttgtccttttcacaattatctctttgctagacagcctgaagggcctaattttggcctaattattgagtgtaggaaagttaagattttcaaaattccaggtgcactgttcacatcaatttccggtaacactaatgaaattcactagaaattacaattttaaagagtgtaatctcaacagtgttacttatactttaatttacgaatattgtatttagccatgttgcacctttaagtaaaaccaaatcacatatttgggaaaatctggcaccctttgcattgaacttaatgtaaaatataatacattgaagaatgtatgttctgggtctataaatactggatattaaggtcagcactatttaaaacatcttatgcaggcagaagcactggtaaaacctgttatttttgttatatgtagtgattatagaagaatagggttcactttattctaataattaaaagattatagaaagttctgaaaaaataattgcctgtaagcccacctgcttaatatattgcttattttcatactgtcttccttttgctattctcgtaatttgaaatctgtttttcaaaactaggtttttttaaggtattgggtcagctaacagagactggagttgtcagccctgaacaatttatgagtaagtactataacctctttttcctgaaataaagggaaacatgatttcatttttgtttagagctgttcagtgcccacttctgtttttgttcaaatagctggaaattattcaaagaacaaattagctgttttatacaaatgtttaatgtggctgagttgttctagaatccaaatgtaccagtaactttgtttttgcaaactatctgactactttattagataattattgtaccataggacctaggtgttagctctagaggtttttcgtttttttattgtagtatttcccttactgtggttatttacagaaatttcattaccaaatcaaaaaagcaagactatacgctttaaatttattttggggtttatttgtattgaagtttaaggttagcaggcatcttaagagttagtccacccgtcccctgcccctcttcttttagacataggagaaaataggaatttagagagatccaaagacttgcccaagatcacaggtagttattgctacggtgaggaataaaaccttaattctgtccagtgctctaccactgctttttcctgttataaaggaaatgaagtattattatcattactaaatatttagtaatatttaatagctgaggaattacaattcttcatttccttataatagggaattttgtattgaattctatttgaccctcctgagaatgaggaccatcattctgattctcattgtttattttcattcactgaatttctttttcccattttagatctctatctggaatgagaccatagaaattaacaatatgagagactattagcctcaatttttattcctgaatttttctttgcatgcacatgaattagatgagaaaccatgttatttcagcaatagtactgaaaatccatttgaggggaagtatctttgcacctatttgctatgtgacttggaaaagttacttggaaacagatatgtttttacttccttgcaaggtgctctcaaagcaaacaagagcaagtcatgttatcacaaaacactttccatcacaaagggaaaattaaaatatattttgtaaaaatattttgaaagcaaaagactaaaaattctagaattgagccatgtaaacatgctcttgttaaaatgtgcaaaggttatatttgaatatctattgagtataaaagttaaagagatctatttaaagtaaatgaagaaattgaagttttcattagtcatggaagtggcaacatcagccatttacttgtattttaagtgttgttcatctaaaatagctatattagtctttattttgctagcagatattttgaatgtgtaggttatattccaattgatactaattgctgatatttcaactacttggtaatattttctttagaaatggaaggtaaattactatggtaaaacagctttaaacatttagtaattaagtcagctaatcctaatatttttctggctccccataaaattgaatgtctactatgtaacactttgttatccaatttccacagaatcttttgagcatatgaagaaatctggggattattatgttacagttgtagaagatgtgactctaggacagattgttgctacggcaactctgattatagaacataaattcatccattcctgtgctaaggtatgtgctgcttataaataaaatggacagctgttttctagcacaactgactttgagtttccattagacaaatctgttttctcattgattttcagtgcctcttagaaatcccttttcccagtgtgttctgagagctttaagaaagaaaatgtataacagtatgaattgtatgctaaaattgttctgtaaggtggatcaatttggtataggcatagagaaaccaaacaacttagcagtaatgcacaaaatccctaatgttactcttttaaaaaaaacaactctgaatataccacgttagcataaatttgtttccacatggtaaagggttcagattattccgttctaattatgatacatctaatgcatgtagtgccctttcatccctcaataactcacataaaatagtaaataaaaaaagagggagagaaaaccttaattcaatgagaataaggtaggaacacttgggatgtgttctgtcacacttaggaatttcggtggggtttctgtactagacattaattttatttggatatctaaaataacttgctagtaagcaaggagtagaatgatggatatattcatgaaaaggttacattttggtgatgttgatcctgatatttgtttaaagacaatggggtgggaaggttggggacatagccaaaacaagtttaggtcacaacttgactcatactatttcctctaataagtaaaaacatctttaaattattaacttttaatagtagtactctcatactagtaggaaacaaacttttgggctaatcagatttgccccagcttctctgtcatatttaaaaacaaaggaaatgttcagctattacagaatattctatgatctctccttctcataagttgtagaaatacatactgaaacagccttcactgtataatattttttgcatttgatttctgttaagttcaagtttacaaaatatactacttattatcagtaaattcttaccaactcgttttagctaaaaacaaaagtaaatgcttactcctttaaacattgtaaatattttcagagaggaagagtagaagatgttgttgttagtgatgaatgcagaggaaagcagcttggcaaattgtaagtaggcagaaacaaggtaaccctggataaattttgttccaatttagtttcttaacaagatacttgtttgaagttctttttggcttcattaattctgaacttattctcactctaatagtttagactgaatttcatgaagaaataaagtattattatacatattttgccttaaagtttgaaaattggaagcatacttctttacagacagtaacatctttaaattactaactttttatagtaatgctctcgtcctagtaggagataaacttttgggctaatcggatttgcctcagcttctctgtcatatttaaaaacaaaggaaatgttcaactattacagaatattctgtgatctctcattctcataagttgtagaaatacatactgaaacagccttcactgtatatatctaaatcatttaaaataaatataaataagtggtattgatttattgccattttataagaacttgtagttcttatttattataatttttagtttttgagacagggtctgtttttgacagctctgtcacccaggctgaggtgcagtggctcaatctcagctcactgcagcctcagcctcctgggctcaagcaatcctcttcagccccccaattagctgggactacaggtacacgccacacctggctaatttttaaaaatttgtagagatggggcctcatcatgttgctcaggctggtctcaaacagtgctcctgccttggcctcccaaagtgctgggattacaggtgggagccactgtgcctggcccaagaacttgctttttaacactaactcttctgagttttaaggaattaacaaatattaaatacctgcttatgtaccagatgctattctaggtatttggaatacctcagtgaacaaaacagaccgatttcttgtgttctagtctatataatttatgttttttttttttttttttttttttttaagagatgggatctctttctgttgcccaggctggagtatacagtggtacgatcacagctcactgcagccttgaatttctggggctcaagtgagcctctcgcctcagcctcccaagtagctgggactacaggtgcatgccgctgcacccagctaattttttatagagatagggttttgctatgttgctttggctagtctcgaacttctggactcaagtgatccttggcctcctaaagtgctggaattacaggcatgagccactgcaaccagccaggcatacttcagtcaaggtcttttgttttttttaaaaataggagtttttagtctgttcaaacatgggcagacccttcaagtttgtatatcttttatagtttttatcctctaaggcacttagatccacactttaatactgggtttggattcattaagaaattttgtatagatgtagacttgctttgtttccacttcatattaattagaccaatcttgagttaatctgatacacaccttcacaaatattaaagtagctttaaaaatgattaaagagcaaagctattatgtactcattttatgtgggtatgtcgactgctccgaagttgtttaaatagatttaaataaagaatttttacaaaataattttggtcatttttttttttaaaggttgagtttttagtgttaacatgcatcttaaaattcgtttttctttttcaagacagagactcactctgttgcccaggctggagtgcagtggcacaatcactactcaccgcagccttgacctctctgggctcaggtgatcttcccccctcagcctctggagtagctgcgactttaggcatgtgccatcatgccctactaatttttatattttgtagagatggggttttgccgtgtttcccaggctggtgtcaaacccctgggctctagcgatcgcctgcctcggcttcccagagtgctaggattacaggtatgagtcactgcacctagccttaaatttcatttttaaagagggcttagggtgagttttgtatttgtcctgtttattagtgagctggagattactagataaaagtatatttgactctaagtaaaaatgctttggtgatttaaatgcttatcaacttacatgaatgcagtgggaaaagccataatctaaacctgtttctaaggaaacttaagttttataacattaattcatattgttactagaatcaatttttattaataaatgctatctcctcaccctaccccctttttaaatttcaggttattatcaacccttactttgctaagcaagaaactgaactgttacaagattacccttgaatgtctaccacaaaatgttggtttctataaaaagtttggatatactgtatctgaagaaaactacatgtgtcggaggtttctaaagtaaaaatcttgtaagaaaattgtcaaaggggctaatgctacaaggctacactcttcctagagttgaaatattttgttgctgcagccgagtgacctccataaatactggactgaaaaaacattgtaatactacaagtataatgacatttagaagattactttgggctggtgggacatgctgtgaatttagattacaaatgaatattataaaggggatgatttttaaccaaaggaatatatttttaacttgaatcttttcttgcattgtatttttctaaaagtttggcttcctttcttggtagtcaagagtatgggtaataaggagttatatgtctgctatctgtgttgctcatttaaaaaaagtatacattgaataaggctgtttatcacatgcataaaattaaatatttttgtttcaaagaaacatctcaatacacttaggggtgtattgtttcccacatattaagtcagggtggataaattagttattataactaaacatagtatagtccaacattcgttgatcccaatacaggcaaacaacctggtcaaccttttgaagtagaagaaatgaaaattacttgacaagattaaaagtaaaacaatttaaatgttttactgaaagtttatatagtatagtctatgtagataaaaagtaccacttgtcttttctgtgaattatgactattcatttgttaaaaatacctaagagcaattatagtgggacatctaaggtcctctgtaaacagtgaattagcaaacctcagcctatgtgtttctaccctgatttttttcttttcatgggtatctgaagcctctaagttttttcaaaaatggagtatcacaaaattgagtgaaacacaatacttaatgtattgtactagattgccaaattcataaaatgttaatggaagctttttgatgtgattataatggcactattctggtcattatcctattttgattttatttaattttttaaagttgaagaattaaatattttaatggttctaatcttttgcattccatgttgcattaaacctgtttatatgagtagtcttctgttagaatcacatctgtgcttttcttgagtctgctgttgaactattagattaagtcataattcataaaattttagtttaatgtgctctttgtaaaatgaaattgtaaagaaaataccagtgtttctcatcccattgactcacaccacgtcatctggattttggatttccctccatgcagccagctatagttggctttccaaaacaacagaaatccttcaccaatagagtgcactacttacctgcttatagcctatacagacgaactgatctgtccttcgtgaaacgcaacaaagctagttctgtcttttcagaagtcctacaaccttgacaaagagtagttttatcaggtaaatcctggtaattaaaaacgcatgtttttaaaaattagcctggtaaggccgggtgcagtggctcacgcctgtaatcccagcactttgggaggctgaggtgggcagatcacaaggtcaggagtttgagaccagcctgaccaaaatggtgaaaccctgtctctactaaaaaaaagaaaaattagccagacgtggtggcatgcgcctgtaatcccagctactcaggaagctgaggcgagagaatcgcttgaacccgggaggcaaaggttgcagtgagctgagatcacaccactgcactccagcctggcgacagagagagactccatctcaaaacaaaacaaaaaaaattagcctacttaaaggcacaactaaatgctttattacctttcttaccactgaacaatttgaggtaaaatcattcacaaggttggcacttcagtaaatccctttaaatagtgttcctaagatatctcttaaatcctcccataggaaatagaattacaggtaaggtacaccatacaaaaattgtgtcattgaggacaatggtgatctgtaattttagttgagtatgtttatgatttttgaagccatatggtgagtaaatgtaaatatgaaaaaagtgctacataaaacacttcttaaactttttttttttaaaaactgctccttgtggagcaggactaccccataggcagtgtacccacaatagatagccttttgttgttgttgttgttgagacaaggtctcgctgttgcccaggctagagcgcaggggcacaatcaccacacactgccgcttcaatctcctgggctcaaatgatccttccacctcagcctcccatgtggctgggactataggtgcatgccaccacacccagctaattaaaaaaattttttgtgtggagtctatgttgcccaggctggtctcttaactcctaggctcaagtgatcctcccacctcagcctcccaaagtgcttggatgacaggtgcgagccactgcacctggcccacattttttaaagagacactgtcccactccatcacccaggctggagtccagtggtgtgatcatagctcactgcatcctccagttcctgggttcaagccatccctcctgcctcagcctccccagtagctggaactacaggtgtgtgccatcacacctggctttacatttttctgtggggtcttactatattgcccaagccggtctcaaactcctgagctcaagtgatcctctgcctcagcctccagagtatctgggattacatatgtcggctaccgtgtctggccgttcacatctttggccactatttgcttgtgaaaaggtataatgaggtggtacttatcatttttactgtgtctcatgttttgtatatttttgtttcatcaactaagatgcactgtaacatctctgaaatctggatatattatcaatggtttatcatagttttgttagcaatacactgtcttttagtggtgcctaaaataatggtatagttgtgaggtgatcttagatttgatgaagcacagtatgcaggtaggcctaatgggggaagatggtaatataaaagcaagaagtattttttttttgtaatgactgaaagctgttctgtggatgacctaccctttcctttaaacacgattctctcacttccaactccaaacttgctcaactaatccttaaaaataaacttgagctggaatttgaggcttgcctgga

SEQ ID NO: 11772 - DNA, 1541 bp, Homo sapiens
ttttcaatattttggaggtataatggcacagcagttttaatacaaccaccaatcttcacaaaataattttaatactttgtgcctgggctagcagcatcttgcactgtgacattcctatacagacataagcattttatccaagtacaaatgttaaaagcagagtaacttaagcaattgtgtatacaaaggtatacagacactgtaggttatttttcttcttgaatcatttttgctgcatagtaaattgcaattacatgtcagtataatgttactgatctatagaatacactttgaactgtgaggtatggcagctccctatgagagagagctaacatgtaaacctgaatattttgagtgatttttgttttagctgccacagatgggaaagacaaaaaaaaaaaaaaaaattccagcattcaaagaccctagagacttacttttctaatcaattaaaaaaaaaggtctttcagtacttctcatctattttctagcattcccttatcggagcactgttgaacaaagaaagaaagaaaatactgaggtgaagctatgtttgttatgggattatggattaaatcagttatttaaaaaaaaaaaaatccgccaggtaactgctcatttactttacatcaagttgagatcttgatacatatatatatatatctcaactttataattcaagattgcagttaaatatttctaattcacttgaattaccatattaataagacaattagaaaccttatattttcttaatacagacatgcttaacattttctgacattacttctaaactcagatgaagcataaactctccccaaaactgctctaaaagttaagtggttgagttggtagcaaaagctatcatggtttaacatttccaccacagagtagatacaagtaaaggtcactgcagtttaaacatctaacaggtaagaaattaacatgaaccaactaactgaaattagaatactgccattccatgtttgaatattttcaatactcaagtttcatattttcaaaatggacagtaatacagtttccctatgttttgatacaatttcactataaattatgggcccagattacacttttaatgttggaattgggtggtcactcatacattatttaaatactctagaagataaatcatgatcagttaaatttatcatagttaactatcacaaaacatcagtggtaataaaagaatcacagaaatggaatcaaatagaataaagaataggaagagctaccagaactacttaaacattaggtggacagacatgcaagaaaaaacaaacctgtaatgttcttatatgaaataataaacttcatggtttgtctacattaatattgtactcagccaggcgcagtggctcacgcctgtaatcccagcactttgggaggccgaggtgggtggatcacttgaggtcaggagtttgagaccagcctggccaacatggtgaaaccccatctctactaaaactacaaaaattagccaggcatggtggcatgtgcctctaaccccagctacttgggag

SEQ ID NO: 11773 - DNA, 18733 bp, Homo sapiens; identical to SEQ ID NO: 8391

SEQ ID NO: 11774 - DNA, 649 bp, Homo sapiens
  SITE (49): n equals a,t,g, or c
atcttcacgcaagccttgaggcagagtctcatgttcccttctgattaancttgagtctcaggaaagtgaagtgacttgcccagggtccattcaggtagagttgagattcaaaccccacatgggctccaaagtctgcattgggtttgggggtgttttttggcatggcaccttcacctctctccctgcctgttttccccaaagtggaaaggaaggcctttcaaaccagagtgtctcattcccctctgacctccagaccagatggggcatgagccagccagctcagccaggctccctgttcctgggaggaagtgtccccatcccccatgccccttatggggagggagggcgtctgatgctctctctctgcctccccccccatcctgtcaggcacaggtgacgggggcagcccatgcgagcccttctcctgctgctctgggagggccagttccacactgagccagcctggtcccatggaaaatgatggcctgggctttctgaggccttatctgatgcctctgcagttcatgtcccccaccaggcctcgaggctcagggtgggagagggccccgggctgccctgtcactcctctaacacttccctcccctgtccccaacatgccctgtaataaaattagagaagactaactaga

SEQ ID NO: 11775 - DNA, 603 bp, Homo sapiens
  SITE (492): n equals a,t,g, or c
  SITE (506): n equals a,t,g, or c
  SITE (551): n equals a,t,g, or c
  SITE (556): n equals a,t,g, or c
  SITE (564): n equals a,t,g, or c
aacttgagtctcagggaagtgaagtgacttgcccagggtcactcagggagagttgagattcaaacccacatgtggctccaaagtctgcatctggatttgggggtgttttttggcatggcaccctcacctctctccctgcctgttttccccaaagtggaaaggaaggcctttcaaaccagagtgtctcactcccctctgacctccagaccagatggggcatgagccagccagctcagccaggctccctgtgtcctgggaggaagtgtccccatcccccatgccccttatggggagggagggcgtctgatgctctctctctgcctccccccccatcctgtcaggcacaggtgacgggggcagcccatgcgaacccttctcctgctgctctgggagggccagttccacactgagccagcctggtcccatggaaaatgatggcctgggctttctgaggccttatctgatgcctctgcagttcatgtcccccaccangcctcgaggctcanggtgggagagggccccgggctgccctgtcactcctctaacacttncctcncctgtccncaccatgcccttgtataaaattagagaagactaactaga

SEQ ID NO: 11776 - DNA, 12988 bp, Homo sapiens; identical to SEQ ID NO: 8392

SEQ ID NO: 11777 - DNA, 2982 bp, Homo sapiens
  SITE (313): n equals a,t,g, or c
acctccaccctcttgctgcccagaccctgaaggcctgacgggcctggcctcgcctccagggcatctcagtgccctcctggccctgttttctctactccctctggtccccagcactggctgttcgtttcctgtgagtgccttgcccttccccacctgcatctttgcactgttttccccaaaaagttttcccagacctctgcagacagccttctgagcctccgccctgggactgcccctctgggcagtgatgattcctacctacatttggagctttcatgtgctcttaatagcattttttttctctctccactcngcaggcctgtgggggaggggaacacatctggttcccctccttcccgtccccacatcctcagtgctcagctgagggtcttatcagcactcactgaatgagggagtggctcccgacattggcgacaactctttttccctctacaggctctgcagaacattgctgccatcagcctggccatcaactacccaaacaaggccacccgcctctggaatgtggagtgttagcccttggtggggcgtgcatgggactagttcatctgccacagggattttagagcagacatctaacctcattcaggaaaactcctgtagcgccagtgcccagctctccttgagctgaccactccagttaggatgccaagcagccacgtctccaagagctcccgtgcgtaggctggacacaagcacaggctgtagcatggtgaaaataagccaagcagtgcagaatgcctcagaaagggtgggcagggggcccttaagaaggttcagagaccagccttctccagaggctgtcactgcaggagccgtgggcctgggaagacttggaagcggcctctctcaactggtttctgtctccgtggagctggaactgcctgcacttgccttcagagggaggcacagtccacccagatccacctttccagcaagacccccagtggctgcccagcctgggagcacctctttgcttttcacaccaaaccaaaactggcgagagcccctcctagccaccagtgatccccaagcatccagtacagaaccaggcatcgagctagctccctgcacggccgcaccctcccagagaactccttgaggagaacaagtgcccttggggacagccggcaggcgcccctgtacgtctgctcatgcaccaggcagcacagccgcagttcctcagttgttgttttgacatatttcagtttccacctcacgtttttagagcagaaccacactgtctccctggaggggctcgagggcatgaccggggactgaccattctgtgaaaggagcagaatgtgaggagcacgcgtgagcttatgtaccgtgaagatgatcagaggatatcttattttaagagtaaaaacccacataattttatttctgcttgatagtcatggtagtctgtcatacccacctctgggactctgcgtggctgtttggctgtcacttgtagcaataacgacattagttctagtcagtgctgttttacatttttcttttgatgggtttagtcttgccctggagtgccgatgatgattctccctccagagccacgcttgggaacatgaagcaagtctggcgtgtgggctgcgtgccggccttagtgggacccgtggggttggagcatgcctttaggggcagtgtctgggccgaagcacgtcccaccacacagtgccagagccagagaaggggccccaccaccaaggccaagcttgaccaggtcagcattgccatggcccagtgtgccccgtggcctctgaagatccctctgtgcagggtctgcagggatctggattgcaagggcccaagtctgcaggtctggaagcatcttcctataagagcactttcgccttctgggtcaggactccaaggtgcagcgggcttcacagccctacaattgggttctcagctaagccccagagttctggtagaaccatcccggggcgggtggagggtgggatttaagggagacgggaacacatggggcaggtcctggaacttggtggcctgaggactgaggccattgccctggtggaaaggcctggcctggttcctgtggcttgggacctgaataggcaggtgctgctggctccgtagaaacccttttcccatcttttgctctttgccaaacctaccttgctttgggagctgcctgcaccaccccagagaaggccccaccttcttcatccctcagacccgaggaggcctcccagtaaggagtttcccaagaggggactcacaggaaacaagtcttagtgcttgggagggaggccccgctgcgtgctcagactcacagccaacctggaaggtagacgagatagcgccacccacgcccctccacaccccagactccgagtaaagcgggcggtagggccggagtcacctcccctatggcagtggccgccgctgtactccatcctcccgtcaggaagatcagctgtaaataaacgctgggctccccagagcacctgtccgcccactgcccttgctgttctgggatcttcgctgcagttcacgggaaacaagcctgagtccgctcgcacccgcggctgctctcccggctcggcccggccgcctctgtctccggccaccgggtggcgctgccgagccagagccgccgcgtcccggcgctttccaggagccccaggcccggaggaggcgaagcccgcagagcaaaggtggaaacacgtgcctacgctgtaaagaaatcctgttccagagcatacctgttgtacaaacagacactgttcctaacgagaggagtgacgtattttcatcaccgtttttaatttgttttcttacgggtttacgattttgaatttttcttatttggttgaaagaattttgattctatcagcctgagtgagttcagcctgtaaaaaggatgttaagctgtgggtaaaatatgcaaacgaaaagaaatatattgtacaaattctatataataaggta

SEQ ID NO: 11778 - DNA, 664 bp, Homo sapiens
tcatgttctcatgtctgcttctgcagtcagtcagatcacacgtcaggctctggaacactccaccatatactcaggagaaggaaagtcaaaaatgaaccttgcagaccccaaaagggtctcgggagtcgcctggccccagagtacattttgagaaccttggactccttgaatatcatcgcgtgtgtggcccaacacccccacccccccggaggacagctagggacactgaggctcacagggttacccgtgggtggacacccagccgggacacccagccaagagccctgcctgagcgcggcgctctgtcccttggaagtagtctccgaacacaccgcccttttgcaggaaaagggtcttctttcctgttgtaggctttgacgtgtacgctcggaagtggaaatgcccccagcccataccgaagagtttgtgtgaattcacccgagacctgtaggcagagtagaaactcccttacccccaacagctacctaccagcattgccgccgccaccccaggtttcatcacatcatgtaacgaaattttgatatttgcccgtcctggccccaaagctcagcatggcggcttgcctgtgggcgggtccctcttgctgcccctgtccagtctccatttcctccttaccctcttctgaccccccccacagcctgtt

SEQ ID NO: 11779 - DNA, 629 bp, Homo sapiens
gagcaactccattttgaataggggctgggtaaaataaggttgagacctactggctgcatttccagacggttagacattctgagtcacaggacgagataggaggtcggcacaagatacacgtcatagaggccctgctgatgaaacaggttgcagtaaagaagctggccaaaacaccaaaacccagatggccacaagagtgacctctggttgtcctcattgctacactcctaccagcgctgtgacagtttacaaatggcatgtcaatgtcaggaagtaaccctatatggtctaaaaaggggaagcatgaataacacacctctatttagcatataatcaagaaataggccaggcacggtggctcatgcctataactccagcactttgggaggctgaggcagatggatcacgaggtcaggagtttgagaccagcctggccaacatggtgaaaccctgtctctactaaaaatacaaaaattagccaggcatggtggtgcgtgcctgtaatctcagctactcgggaggctgaggcagcagaatcacttgaacccaggaggcggaggttgcagcgagccaagatcacgctactgcactccagcctgggcaacagagtgagactgtctcaaataaat

SEQ ID NO: 11780 - DNA, 4145 bp, Homo sapiens
tgcagtccaagtcagagctctcccactacaccttctactttgtggactatgttggcgtgagcgtttaccaatatggcagtgctttggctcatttcttctacagctctgaccaggcctggtatgaccggttctggcttttcttcttgccagcagctgccttctgtggctggttatcttgtgctggctgttgctatgccaaatatcgttaccggaggccttatccagtcatgaggaagatctgtcaagtggtgccagcaggtctggcttttatcctagacatcagccctgtggcacaccgtgtggcgctctgtcacctggctggctgccaggagcaagcagcctggtaccacaccctccagatcctcttcttcctggttagcgcttatttcttctcctgccccgtgcctgagaagtacttcccgggttcctgtgacatcgtgggccatgggcatcagatcttccatgcatttctgtccatctgtacgctctcccagctggaggccatcctcctggactaccaggggcggcaggagatcttcctgcagcgccatggacccctatctgtccacatggcctgcctctccttcttcttcctggctgcctgcagtgctgccaccgcagcccttctgaggcacaaagtcaaggccagactgaccaagaaagattcctgaggctggcaagtggggcaacgtgtggaggaagcccctcataatttggagaaaacttgatacaatagaagctgacttttaaggcattggcttttaaattaatacatatatccaaggatatgttatagctgcagtgtttgaaagccaaaggatttaagagttttgttgttgttaataaaaggaatactccttttccttttggatcatagcttaacaaggcacaggaagggaagggatcttgactaagattcatgagacattgaattaaggagaatcatcttcatgcctgaaaatttagcaaaattccgactatggcctccaggggcaattcctaaaagctgaatggataataaaattggactggaaagtaagtaggtggctggtcctcaccctgttggaatggctatcctactatgctgttctttggtaatggaataaattgacccaaggaccgaatttcatttggatttcaaattgtccagagtggaaaagccttcaagatgacatgatgaattactcagttcatctgatttctggtccctcctttctcgacaactataatactaacccttttctcaggataactgtctacacctggcagttttctctgacgtgctgttcactcacatccctaccttgcatggtaatataaaggactaggaagcagtcatacttccaggaaatgcttggattcatgtggacattcaggaagcttattctcatataatactaatctaaacagtactagaaattacagtgccaagagccaccaggaggcccagccaataagcatagatactatatggtatcatgggacccatctattttttaccagtggactacaggattacttgagagttatcagggctgcctaacagaccaggagatctgggggttgcaccagggaatcgccatatttgaccagcatgttttaaaagctcttggtaggattagttggttctaaggatccctctagggacctcattatttcaagaggaacccaaagtccagcctcctacatagatgctgccccacgaaggacccacaaaactaacctagttcagggttctcaggcaggcagttctgcttcagcttagagcagaacccataaaatactcaagtactgggataggcaagcatgtgtgtttactgtggattggtccctgaaggctcctttgggtgagaacatgtgaaccaggcaccctggtttgtttggagcattgctgcccagaagcttctatgggataggtggtgcttgggattgatgtgttgtggccatgcagccctccctgaggattgacttctgcactaatccagtgaaggaggctgtgtcaaaagaagggctcagaagccctcttttcagaggcaatgattcctgtcagtatgaggtcccttagttactaaaaagggacatgatttaactccagtttgatgaacctcctccgagtttactttattgtcttcaaatcttttgttttcttcctttttgtgagatttgtgggttttgtgccttataaatggaaatgtatgaacacaatatatgctcatgtagaattttctgttctgggttattgggataagaaaaaatatatattgctcttcaactagtgaatgaaagaaacttcagaaagctagaattgcttatcaatcaaaagactttctcaatctattttggccacaaacaaacatattcaactgaagctttccaataatctttatatcaagaaagcatgcgtcttgtcagctacattgttttcttagatggatttctcctgttaatcctcaaatatctgaacttctgtgttacccaagtgtcttatacaagcttctggtgtctaggacaaatttatggcaaataaaattagcaaaactgaactgggttgaactgaacaagaggatgggggaattgtgcaaatacgttgttagtagaaggtcaatttaaaatagggactagaaattatttgaagttttctttattacggattcaaagacttattttgaaagttggaaggagaagggagggaagagagcagaagggaagaaggtgtaagtcaagctcttgaatataactggtggtattgtgggcagagatctttagttcaaatccacgtattttttaaaagagagaaccggaggtagagcaatgatcagatgggtgcacagaccagtgccaatctgaacattgttaatggcctgtgacatgatgagcacaggaacaggcatgaagatattgccatacaattttaatttatacaagtattggcccctcaagtggttggaaattttttttttaatctctttttctgagacagggtcttactctgtcgcccaggctggagtgcagtgatgcaatcacggctcactgcagcctcgacctccccagctcaagcaatcctcccacctcagcctcctaagtacctggtactacaggcgcgtgccaccacacctggctaatttttgcattttttgtagagacagggttttgccacgttgcttaggctggtcttgaactcctgaactcaagtgatccgcccacctcagcctcccaaagtgttgggattacagacattagccatcacgcctgccctagaaacagttttttaataggagatatttgagaggcattgaggtaggagactctatgacatgccctcagaatatcagaatcttcttagaaataaactaggaaatgcagatgtttttaactactcagacttttgaggaattaatccttttaaaacatttttgttaaagttagtgtatcagtaagaaacagacctagtttaaaaggaataatcaacaattttataaaggagatggcttattcaaccatagcccctccaacatatctactggaaattctgctggttaactttatctctctctctcttaatttagactttcaacctatgaaaatgtaaatacctttgaaaaaactaaactatcagtcatttacatcctctcatgaatgaaatgcagtgtagggagaggagatggcaggacacagcaaacaggacacatttgcctgcttctctcttgcctaattcttcctgacctgtatttactgatgcttaataatacttgtaagactctaggggttcatttcccatttcagcggaaagtacttcactcaacaacaatattctcaagagtcttctactggaagctagaaagaaataggaatttaagtccatagaatgaaggtagttattcctgcctgtgttgcccacctgttcacaaaaagtacctttatgcttgaaaacattaggttctttggttactgcactgtagtttcaaatggatcctccagatggcattcatgtcttactcagaaagggcactgccattgtccccaaggcttctgtctactaattctattggtcttgtgttttgcttgcttggcaaaaaaaaaaaaaaaaaaaaaaaaaaaaaaaatggagctattttctgtctatataaatctacttatatgaataa

SEQ ID NO: 11781 - DNA, 4107 bp, Homo sapiens
tgcagtccaagtcagagctctcccactacaccttctactttgtggactatgttggcgtgagcgtttaccaatatggcagtgctttggctcatttcttctacagctctgaccaggcctggtatgaccggttctggcttttcttcttgccagcagctgccttctgtggctggttatcttgtgctggctgttgctatgccaaatatcgttaccggaggccttatccagtcatgaggaagatctgtcaagtggtgccagcaggtctggcttttatcctagacatcagccctgtggcacaccgtgtggcgctctgtcacctggctggctgccaggagcaagcagcctggtaccacaccctccagatcctcttcttcctggttagcgcttatttcttctcctgccccgtgcctgagaagtacttcccgggttcctgtgacatcgtgggccatgggcatcagatcttccatgcatttctgtccatctgtacgctctcccagctggaggccatcctcctggactaccaggggcggcaggagatcttcctgcagcgccatggacccctatctgtccacatggcctgcctctccttcttcttcctggctgcctgcagtgctgccaccgcagcccttctgaggcacaaagtcaaggccagactgaccaagaaagattcctgaggctggcaagtggggcaacgtgtggaggaagcccctcataatttggagaaaacttgatacaatagaagctgactcttaaggcattggcttttaaattaatacatatatccaaggatatgttatagctgcagtgtttgaaagccaaaggatttaagagttttgttgttgttaataaaaggaatactccttttccttttggatcatagcttaacaaggcacaggaagggaagggatcttgactaagattcatgagacattgaattaaggagaatcatcttcatgcctgaaaatttagcaaaattccgactatggcctccaggggcaattcctaaaagctgaatggataataaaattggactggaaagtaagtaggtggctggtcctcaccctgttggaatggctatcctactatgctgttctttggtaatggaataaattgacccaaggaccgaatttcatttggatttcaaattgtccagagtggaaaagccttcaagatgacatgatgaattactcagttcatctgatttctggtccctcctttctcgacaactataatactaacccttttctcaggataactgtctacacctggcagttttctctgacgtgctgttcactcacatccctaccttgcatggtaatataaaggactaggaagcagtcatacttccaggaaatgcttggattcatgtggacattcaggaagcttattctcatataatactaatctaaacagtactagaaattacagtgccaagagccaccaggaggcccagccaataagcatagatactatatggtatcatgggacccatctattttttaccagtggactacaggattacttgagagttatcagggctgcctaacagaccaggagatctgggggttgcaccagggaatcgccatatttgaccagcatgttttaaaagctcttggtaggattagttggttctaaggatccctctagggacctcattatttcaagaggaacccaaagtccagcctcctacatagatgctgccccacgaaggacccacaaaactaacctagttcagggttctcaggcaggcagttctgcttcagcttagagcagaacccataaaatactcaagtactgggataggcaagcatgtgtgtttactgtggattggtccctgaaggctcctttgggtgagaacatgtgaaccaggcaccctggtttgtttggagcattgctgcccagaagcttctatgggataggtggtgcttgggattgatgtgttgtggccatgcagccctccctgaggattgacttctgcactaatccagtgaaggaggctgtgtcaaaagaagggctcagaagccctcttttcagaggcaatgattcctgtcagtatgaggtcccttagttactaaaaagggacatgatttaactccagtttgatgaacctcctccgagtttactttattgtcttcaaatcttttgttttcttcctttttgtgagatttgtgggttttgtgccttataaatggaaatgtatgaacacaatatatgctcatgtggaattttctgttctgggttattgggataagaaaaaatatatattgctcttcaactagtgaatgaaagaaacttcagaaagctagaattgcttatcaatcaaaagactttctcaatctattttggccacaaacaaacatattcaactgaagctttccaataatctttatatcaagaaagcatgcgtcttgtcagctacattgttttcttagatggatttctcctgttaatcctcaaatatctgaacttctgtgttacccaagtgtcttatacaagcttctggtgtctaggacaaatttatggcaaataaaattagcaaaactgaactgggttgaactgaacaagaggatgggggaattgtgcaaatacgttgttagtagaaggtcaatttaaaatagggactagaaattatttgaagttttctttattacggattcaaagacttattttgaaagttggaaggagaagggagggaagagagcagaagggaagaaggtgtaagtcaagctcttgaatataactggtggtattgtgggcagagatctttagttcaaatccacgtattttttaaaagagagaaccggaggtagagcaatgatcagatgggtgcacagaccagtgccaatctgaacattgttaatggcctgtgacatgatgagcacaggaacaggcatgaagatattgccatacaattttaatttatacaagtattggcccctcaagtggttggaaattttttttttaatctctttttctgagacagggtcttactctgtcgcccaggctggagtgcagtgatgcaatcacggctcactgcagcctcgacctccccagctcaagcaatcctcccacctcagcctcctaagtacctggtactacaggcgcgtgccaccacacctggctaatttttgcattttttgtagagacagggttttgccacgttgcttaggctggtcttgaactcctgaactcaagtgatccgcccacctcagcctcccaaagtgttgggattacagacattagccatcacgcctgccctagaaacagttttttaataggagatatttgagaggcattgaggtaggagactctatgacatgccctcagaatatcagaatcttcttagaaataaactaggaaatgcagatgtttttaactactcagacttttgaggaattaatccttttaaaacatttttgttaaagttagtgtatcagtaagaaacagacctagtttaaaaggaataatcaacaattttataaaggagatggcttattcaaccatagcccctccaacatatctactggaaattctgctggttaactttatctctctctctcttaatttagactttcaacctatgaaaatgtaaatacctttgaaaaaactaaactatcagtcatttacatcttctcatgaatgaaatgcagtgtagggagaggagatggcaggacacagcaaacaggacacatttgcctgcttctctcttgcctaattcttcctgacctgtatttactgatgcttaataatacttgtaagactctaggggttcatttcccatttcagcggaaagtacttcactcaacaacaatattctcaagagtcttctactggaagctagaaagaaataggaatttaagtccatagaatgaaggtagttattcctgcctgtgttgcccacctgttcacaaaaagtacctttatgcttgaaaacattaggttctttggttactgcactgtagtttcaaatggatcctccagatggcattcatgtcttactcagaaagggcactgccattgtccccaaggcttctgtctactaattctattggtcttgtgttttgcttgattgcttggcaaaaaaaaaaaaaaaaaaaaaaaaaaaaaaaa

SEQ ID NO: 11782 - DNA, 241 bp, Homo sapiens
gcggatcacctgaggtcgggcgttccagaccagcctgaccaacatggagaaaccccatctctactgaaaatacaaaattagccaggcgtggtggcacatgcctgtaatcccagctacttgggaggctgaggcaggagaattgcttgaacccgggaggcggaggttgtggtgagccgagatggtaccattgcattccagcctgggcaacaagagtgaaactctgtctcaaaaaaaaaaaaaa

SEQ ID NO: 11783 - DNA, 241 bp, Homo sapiens; identical to SEQ ID NO: 11782

SEQ ID NO: 11784 - DNA, 46843 bp, Homo sapiens
gctccgcctagtcacttttcttaaggtggctcgtcgaggcctgacttcttccccgaaatcacgtccctagacagcctcctattttaccactaactttactcctgcagttattcagcggtaggaaactgaaaccaaaaaccagtgtaagcaagtaaacatctaaactgtttcaggagccgcgtagaaggaacgcggcggtgtgccccggaagcggaagtagattctcctatagaaaggctggactacgcggagtggtgacgtttcctcattgggcggaaggttcgctggcactccgttggtcttccagctggtgggagttgacgacgtggtgctgggcgttgggaccctactttatctagttcgggaagttgggttgtggggtcatacctgtctgtctgctcccagctttcttgggtttcttccgacggcgtggggcctcgctaaggaattcccggcccctcagggccacggctttagcggtgtcttttgcggtaagtgtctgctttttcccgccccagactacggagggggagcgaggggcagccccagcgctgctcaggaggcgagagactccgggggaagtcggcctccgtggccaccggccatcgttaccgagactgagtttctgtggctctttatctcgtcttccatgagaagttttattaaagatgcgctgtgccccttttgagttgtcttccgatttacctgagccaaataagatgtaggcagttgcaggcctgagtcttcgttttgctttcctgagcaagaatttagatgaagctacttccccgaaaatccttttacttgtacgagacttttatttttcctatgtgtttgtagtgcttaacacaatgtcctgcgtgtagtagacgttcaataaacgaatatggaatatcagttgaatgccaatgatgatttaagatagactgatagctctctctgtaccatttgacgctgctgaccatccatttcttgaaactttcccctgctgcctttcttcatgctatcctcacctgattctttcacatgcttaatttaacaaaatatatacttgttcttggctacaaggatacagaaatgaataacactaactctgccattgagaagctaacgcacataaatacacattatatcaagatgggtaatgagaaacactagttgcatataaagagctgtagaaagctgtgggagagctaaagtgctccttaggtgctttgtgaccctgagccagtttctattccaatctagcctcaatttcctcatctacttaataggcttgttttgaggaagaaaggagattaggtaagaggtttggtttggtttagtgcctagaatacagcaatcgtggtgccaaaggggagggaaatatttccctcaaatcgctttttctcagttttttgatatggccaactggtattttctaccttaatatagagtactatgcaaaagcatcttcaagtcttccttccagattactcctctgtccccatctatttggaaattctggacctgccacaggattacagtaagataaccataaatgtagctttttaaaaattgattttctcctatgtgccatggagaaagggaaagggaattagtaaaagctcctatctctttggttattttcagtcttggttaacgccgtccttttagttggccctcagtcattgctataacccaaatggtcttccacaggctctcctcgaggcttctcgcttgcttccatggcattgtccctatatgccaaccatgtccaaaccttattcttttcatttccaaaccttgttcttttccaaaccttatttgctctgtcgcccagactggagtaccgaggcaccatctcggctcactgcaacctccgcctcccaggttcaagcaattctcctgcctcagccttccgagtagctgggattacaggtgcctgccaccacgcccagctaatttttgtgtttttagtagagatggggttccaccatgttggccaggttggtcttgaactcctgacctgaagtgatccgcctgcttcggcctcccaaagtgctgggattacaggtgtgagccaccatgccctgcctaaaccttattctttagcctccatctcatgagttgatagttctgtactttcccctaaaacttgcaaactcattaggtccaaaaccaaatgcactgtcttcaccttccttttttttttttttttcactatgacatatgtcatgcatacgaaagtgtataaaagcagtgattgtcagtgcgtttttgagttttgacctctggttgaattttgtgatacaagtaggttaaatttttaaaaggattataagggctgtgagcaatggctcacgcctgtaatcccaatactttgggaggctgaggctggcagattgctttagctcaagagttcgagaccagcttgggtaacatggcgaaactccctgtctcaacaaaagagacaaaaattagccaggcttagtggcgccgcctgtagtcccagctagttggagggataatgaaatgaacatctatgtacacatccttcataaaaagtgaaacattaaaaataatacattaagtccctttgacctcttctctattaactcctctgactttcaaaccaccttccctttttgccttccattcattggttaatggcatcactagccatctggttataaaaactagagatattggaatcatttttgcctcttttttccttcacttgccataaccatttggtcattagattctgcttcatgaattagcccttaaccctagtttctttttctctagttcaaggccacatcttgtctcaactagccttatggagtatgggtagtgcatgtagtgtcctggctcttcagttttttccctccaatgtatttgttacactgtatctaaagatgtttctaaggtatagaacagatttctcattctgttgttttctttgggacatgttattaaatacttaatatagtgattatgaacccttgctgcacatcaatatagctagtgaaagttttcaaaacataaatgtcttgttttgcactccagattaagaatttagatgaagctactccccctaaaacttttttaccttactatctctggagagtctgattgagcatttaatttttactgataggcattatctaaatgtcattgaaataacgcattgcttgagcatatgcctcttatccctccttttccttttttatttttcacttttcctttttcttttcaatgttaaggccaactttccaaggaattcttttgattttcgttttaattttcttcttggtagcattttatgtaaagattctttttatggttgacctcatagccagaaagtatcgtaaagaaatgattcccagtgttcctgagttattacctcttgttgctaattgactttttttttggtataccttttttgctgcaaaagtacgaattggtgctgtgatattattttacataaaatgagttttaaaatttgaaaaacaattactttaatgaagagaaagttgcttgatacttcttgatataattgaatataatctttggtgctaagttaagacagaggtggtatgatgcataatttatcttttgaagggagtcttgtgttaaactgttatatttgattaggaattagaacttctctcatgctgggacaatttctggagtacatagtaggtgtttaatgaatgagtaaatgaatacaagtggcagctccatcccaacctctagtctgttgactagttgcactctaattctcacaaggaacgctttggaaaataattttcccttgacttaaaaaatagtgttctcagtcattactaaaaaattggaaattagaaaaagatataagaaaataaaaattgctggtcgtggtggctcacgcctgtaatcccagcactttgggaggctgaggcgggtggatcatgatgtcaggagttcaagaccagcctggccaagatagtgaaaacccatctctactacaaatataaaaaattagctgggtgtggtggcaggcacctgtaatcccagctacttgggaggccaaggcaggagaatcgcttgaactcggagggcagaggttgcagtgagccgagattgtgccactgcactccagtgggcacagagtgagactctgtctcaaaaaaaaaaaattgctagttattcatcatccagagataacaaatgttattttaacagtttattaaaatataattcttggctgggtgcggtggcttaagcctgtcccaacactttgggaggccaaggcaggcagatcacaaggtcaggagatccagagcatcctggctaacaaggtgaaaccccatctctactaaaaatacaaaaaattagccgagcatggtggcactccatgtagtcccagctacacgggaggctgaggcaggagaatcgcttgaatccagaaggcagatattgcagtgagccgagatcttgccactgcactctagcctgggtgacagagagacactacatctgaaaaaaaaaaaaaaaaatatatatatatatgtgtgtgtgtgtgtgtatatatatatacacacacacacacacataattcttagttcacctaaagtgtacaattgaaaggattatagtgtatttacaaagttacgcaactatcaccataatcaattttcgtacatttttattatcccatgaagaaaccccatacctattagcaatcattccctattttactccatctcctgagccctaagcaactattaatccactttctgtctctgtagatttatgtattctgaacaattcatgtggaaccataatatgtgatcttttgtgactgggttttttcacttatgtttcgaagattaatccatgttgtggcatatgttcagtacttcatttctttttattgcctagtgatatacctttgtattttattctacattttacttatccgttcataagttgaaggatatttgggttgtttctactttttggctattatgaataatgctgctctgaccattcatgtacaagtatttggatgatatcttattaagattttgatttacaattccctgatggctaatattttttaatacttgtttttagactgtgtttaacaaaatatggattatactacatatgcagttttgtagtctgccttttgcatttaagcctgtttttagcattagcaagcatattttacaaaagaattttcctaatttttgctcccctctttactccccgccaaaaccataaattcttgggaaaccttgcttaaattaatatacctagaaaatacaatccatattaatatataccagattattattggttgttaccatggtatgggagtgggtagaattaggggaattatattttctaccttaaatatttctgtaatgttttaacttttacagtgaagatacatcattttgtaatcacagaacataaaggtgaattatttccttggggaataagtagattcagcatgaaaaacagttcctaaatttgaaagtcataattaacattgtaaaattagtcattaaaatatatttcactaagctgggtgcggtggttcacgcctgtaatcctagcactttgggaggctgaggtgggtggatcacgaggtcaagaggtcgagaccatcctggccaacatggtgaaaccccgtctctactaaaaatacaaaaattaggtgggtgtggtggcatgcgcctgtagtcccagctactcagaaagctgaggcaggagaatctcttgaacccaggaggtggaggttgcagtgagctgagatcacaccactgcactccagcctggcgacagagtgagactccatctcaaaaaaaaaaaaaaaaaaatatatatatatatataacatatatatatataatgtatatattttactaaatacaatacctataggccattttgttaactaaatttacttttctgtggtcctagactgtgaacacatatgctgtgcagaattaagaaaaatatttagtattaaagtcagaaaagcaaatactggttattagcctttgactgctttatagaaaagtatacagttgtctcttgctatctgggggggattgattccaggaccaaaatcagaggatgctcaagtccctgatgtaaaatggtgtagtatttgcatatgacctatgcacatccttccatgtactttaaagcatctctagatcaatacctaatacaaaatgtaaatagttgttataccatatttatatccttaagaaaatacttgttatactgtattgtttagggaataatgacaagaaaagtctgtacatgttcactagagacacaattttttttctgaatgttttgatttgtagttggttgaatccatggttgtgaagccccagatacagaaggctgactgtactatgtagaagtaatttttctaagtatatttagttcttgaggctaatattgattcaaaaagtcattgacaaggacttagaagaaaggacttttggccaggtgcagtggctcatgcctgtctataatccgagcactttgggaggccacggtgggtggatcacctgaggtcaggagttcaagaccagcctgaccaacatggtgaaaccctgtctctactaaaaatacaaaaaattacctgggcgtggtggtgggcacctgtaatcctagctgctcgggaggttgcagtgagctgagattgccccattgcactccagcctgggcaacaagagcaaaactctgtctcaaaaaaaaaaagaacttttttgtagggattatgttgtaataggatttgacatagctaatcattagactctgtttatataatctcagatcaggcaaatctggcaggaatatttataattgtttatgtagagaaaggtgggtttttggacactgcagcttctgttgaataataatctggcagttgtaattgccactaaattttaaagattccaggagtggttcctgaatgatgggacagacacttctgtaagattgttcagaaaatttccagcttacttacactccatataatacagagagagatagttggtatcattaaaaaaagaaaggaagttaatagttaatatgctaggtttttgaagacagctttatatgtattgtctcatttaatcctcacaacagcccttcagggtaactaccttggtaatggtatcttcattttgcaagtgaggaaagtgaggctcagagagattaagtaacttgcccaaagtaacacagccagtatgtaacagagctaggatttgaatctaagtctgtcagactccaaaatctatgctctttccagtacttcacactgcagcaagtaagtgtgatacttggccctgtgattgccttacttagggcacccaaaacttcagcctgtttctattgcttactatccaaatcctagtcagaccccagttagaagaccctgtgactcgagccaggatcagtccttgtatgtactggtctgattgcagtgatagttatcatttctttctgaacgttgcaattactcctccacaaagaggaatatacatctttaaatatgattaaaatgtgatttcttctattatagcatagcagcaaaatttgtccttgcagtttccagcaggtgtattcaaccctataatttaaagcttcattcatactctagccaaaggactatgggaagtcattttgcttttttttggcagggaacggctgttctattccctatcctgcttatatcataaaattgttgtaagagtgaaatgagataatagatgttcaactgtaagaaagtactgtgtggtaatctcttacctttctaaaagccccatctaagtagagattcttcctttgtgaaattctagcatatacagatttatttctataaatcgttttagttaggcaagagaatcttgagagtgtacttgaattgtagattactccaacctgagatttaggcttagctattaacatacaaaaggtatttttcactttagtgtacatattagaacaaggtgaggttaatttttaagtatcttgttggaaatgcatggcagggaaattctgaagaagaattataagtaatgacaaataaatatatttaatgtacagtacaaattacccaagttattgtttttcttttgattcatcatattatcttcattgatttattttagtggcttttaaagatatttgcagtgcctttcatgactttagttctctggtctcgctttttccctaaggccttaaatacatcatttcattcattcataatgttcatttttattaaggatttactgtataaggctgaggatagataaagcagtgagctcacaggagaaagcaaaagaggcaaaaatccctgcccttgtgcaggttaaatttcttttcttttttttttttttttttttgttgttgttgttgttgttgagatggagttttgctctttcacccaggctggagtgcagtggcacgatctgggctcactgtaacctccacctcctgggttcaagcgattctcatgcctcagccttctgagtacctgggattacaggcatctgccaccgcgcctggctaatttttgtattttcagtagagatggggtttcaccatgttggccaggctggtctcgaactcctgacctcaggcaatccactcacctcggcctcccaaagtgctgggattacaggcatgagccaccacacctggccacagcttacatttcaatagtgagattataggtgacaaataatataaataagccatatgtcagttgataatagaacaataggaaaaaataaagggaagagggttgcagttttaaataagtgattagggaagacctcattgagaaatggcatctggacaaatctgaaggaaatgagggagggagttatgttgtcaagcagaggaagagcatgctggctagtaccgagacactgaggtggaaatgtgtagcagcaatagcaaggaggtcagtatgattaaaatcagtcatgcgtgtgtgttgggggtggggggtggagggggccttacagtccattctgaggactttacatctgtgtgcaatggaagtcattgagattttaagcaaaattctaacacggagttttcaggaacacatcatccttggacattgtagaggaaacactgtaagttaaaggtattattagatgttcttactcctctactgaaatgcaggattttattttgtttttgtgttttgtgttttaagacggagttttgctcttgtcatccaggctggagtgcagtggcaccatctcggctcactgcaacctccgcctcctggttcaagcaattctcctgcctcagtctccagagtagctgggattacaggcatctgccaccaagcctggctaatttttgtgtttttagtagagatggggtttcgccatgttgaccaggctggccttgaactcctgacttcaggtgatccacccgccttggcctcccaaagtgctgggattacaggcgtgagccactgggcccggacagattttgttattttatatattaaaactatatgtattcatgtattatataataaaatatattttttaaatttaaggcaaaaatgttttaaaatacacactgccagtaactacttgcagaaggaaaagtatattggaaaacctcacagaagtttttaaaatttttaaatttaaaacaaccagttaacatggaaagttagatttatatttaagaatttactaggcagccataaaaagaatgaaatcatgtcctttgcagcaacatggatggagcaggaggccattatcctaagagaactaattcagaaacagaaaatcaagtatctcatgttctcacttataagtgagagctaaacataggtacccatggacataaagacgaaagtagtagacacagaccattccaaaatggaagagtttgggagaagactgaggattgaaaaagtacctcttgggttcaaggttcaatatttgggtcatgtgtgtataagtccagtccccaccattacacagtataccagtgtaacaaacatacacatgtaccctctgaatctaaaataaattaattaaaaaaattaaagacacttcctaaagtttgcccccccaaaaagttaactagtatggcttatttatttatttatttatttatttatttggagatggagtctcactccatctcatcacagtgatgtgatctcggctcattgcaacctccacctcctgggttcaagtgattctcctgcctcacactcctgagtagctgggactaccggagtgcaccaccatacccggccaagttttgtatattttgtagagatggggtttcaccatgttggctagactggtcttgaactcccaacctcaagcaatctgcctgccttggcctcccagagtgctgggattataggcgtaaaccaccatgcctggcttagtatagctttttaaaatgaaagatgatctgtttatgacatgacctctaaaaaagttaattgtggtgtcataaataggattctatcactcccagtaccaccatggtgaaggatataaactgaaacatctgaatcttatttcttaaatgaagaatattaatttaaggatcaataattattttgtataatgggtatggcataagaaataaaaagtcctggatcttttccatgaggtggttggctctcaggttaagtaacaatgtaattgtaaaaaaatcttatggtaagcaatttttttttcaatttcatcaagtattggtagtaagttttttttaagttctaaattaccaaattgtacttgagtgaaagtgtagtgtttaatttgtagctcagcctgggatatctgtttgccagtgataggtcctcaaatgcattttcccttcctgcctttttatgattcctctcacctctttactttctctatggtgaatgagtcagctatttcatcttcctgtttgtcttaaaattaattaattaatttatttatttattgagatggagtttcactcttgttgcccaggctggagtgcaatggcatgatctccagctcaccgcaatctccacctcccgggttcaagcgattcacctgtctcagcctcccaagtagctggcattacaggcatgtgccaccatacctggctaattttgtatttttagtagagacggggtttctccattttggtcagggtggtctcgaactcccaacctcaggtgatccgcctgcctcggcctcccaaagtgctgagattacaggcatgagccaccgcacctggcccaaaatttattttttttaatacggactttctctcttgttgcccaggctgagtgcagtggcgcgatctcagctcactgtaacctctgcctcccatcttcaagcgattctcctgcctcagccttctgagtagctggaattaaaggtgcctgccaccatgcccagctaattttttttttgtatttttagtagagatagggttttgccatgttggccaggctggtctcgaactcctgacctcagatgatccacccacctcggcctcccaaagtgctgggattacaggcgtgagccaccacgcctggtgctgtttctcttatttttaatctcctgtgtattctgtagaagggatctagtctggataatcttggttgactaaattagactacattagtttggaagggttaccaaaacagttgttttgaagagttaccttttctgctaatattgttcatattggaaaattgatattccccagaccgtgtttttagagccctttgaaatctctgtttccttctaactgtatacacctctgtcctaagcagaatgttttgtttcctgtcccctaaataatgctcagtgatccataagtacagtgcatatataaggcataagtatgtcccagacttacctctctctccatttctgcttatgctatttcatcttcctcaaattcccttttgtcttctccacttactcaaattctactcttatttcaggaccaaattcatactcagtctttccaataaagcctatactctctgccttagtctaaaattcttccttttctgttttctttttttgtggagacagagtctcactctgtcacccaggctggatggagtgcagtggtgtgatcatgacctccttggctcaagcaatcctcccctcaccctcccgagtagctgggactacaggcacatgccgccatgcctggctactttttttttttttttttttttttttttaagagttgaagtcctgcctgctatgttgcccaggctggtttccaactcctgagcccaagtgatcctccttccttggcctcccaaagtgctgggattacagacatgagccactgtacctggccttttttttcctttttttttttttcttgttccagagaagcagaatcaataaagggtgtgtgtgtgtgtgtgtgtgtgtgtgtgtgtgtgtgtgtgtgtgtgtgtgtgtagagagagagagggagaaatggatataaagatatgtatttattataaggaattggctcaggccgttatggagacttaagtttcaagatctgtaggatgagttggcaagctggagacccaggagagcccatggtgtagatccagtctgaatctgaaggcctgagaactcagagagccattgatgtagttttaatccaaaggcttgagacccacaaagaaccagtgtttcagtttgaaggcaagaaaagctgatgtccctgttagcagtcagacaggaggaattctctcttagtgtttattttagtgttcatttgtgtgccttgtcttaccagctagtaggtaagcatcttgagggcagggactacaaatcatatttgcttgtttatcatccataagcccttgcatccttacaagtagtaagtacatctaatatgtaatacttttataaaacagtaagattttagagctggaaagggtttttgactcttagttaactgaaacagaaagtctgttgcatgtgactattttttggaagaaccaggatcagaattttattttcggttcctcatcaagggctttttctaataattcttattaataataaatgataacttaaatcattatcctattttagagttttcctggaatcagaaacaggtttaaaatgggaagagaaccagccttggcaacataacatagtgagaccccgtctctacagataataaaaattagctgggcatggtggcatgcacctgtggtcccagctacttggggggctaaggcaggaggatttcctgcgcccaggaagttgaggctgcagtcagctgtgatcacaccactgcactccagcttgggtgacagagtgagaccctgtctcaaaaaaaaaaaaaaaagagtaaaataatatacctctttcctttgtggttagaagaataaaatgaaataatgtatgtggaatcacttagtatagcgcttcgatatagctgatagctgaacagttgctttttttgtactagaaaagttattaaaaccttttttcttttttttgcttaggagcaagaatcaaaatagtttgcagagtcctttaatgtgggaaattaggcagtattcctggagatttcacctttttctcctcttttaatttaaaaatgtgcatgatacataattcagttattcataagtattgtgccaaaaaaagaacatatttaatgtgagattatgtcattatttcctcaaagtatggtatttgacatgttaaatttgctgattcatatacaagattccaattaagtattcaaatataaggcatcataaccaagtagcagttttatctttatgacatgactgtatttaagcacaggttgaggctatggaaggtgatcttacagtatctaaacactagagtaatttgaacttaaatactctttagaactcttcagtcatgggaagtgaaattgattattctcacttaattttttttctgctgtagagttcttcgtaagtacatcttaaagctgtcaagatggttctagcagaccttggaagaaaaataacatcagcattacgctcgttgagcaatgccaccattatcaatgaagaggtatgtaaaatattgtatgaaatatatatgattgtatattgtcactagcattgggaagatggcttattcataatccctgtatttatatgtattttgatgtagacttaatacttgtagataaaagcctaaaagtggatacagtaagtagtgttttattgagaaattaactacaacttcaaatttacttcaactttctataaagaattttccaaaaaaaaatcgaaaaaaacctgaccttaacttacatgtaaaaataacatattttatcttttgaaagtggcttaaatctggaactgtacttttgttttctttattgatatagacctaaaatttcattactctgcttctttcttcttggctaggcctgtgcttatctgtccttttctttgtgacttttatttagcatttttataaaaggctagcatttccatcttgtctgttttgattcattttctttgaaatcttcagttttttggagattttgtaagccactccttagatgatattaaaatacttttcttcccggctatattattttaagatatttctttgttccatttgtcccccacagattgtatcttagtggtttattaattgaaaaagttgactgtggttcacaagtatactttatattttgtatcaacaatggaaaagtactgaatttggtgttagaagacattggttagtcccactgtagctatttagcagctgtacgatgtaaattggggcaactaaaccttagattccttagtgtataaaataggaaaaatagcatttaccatagaaaatggttttaagtttcaaataaactttctaacttggaggttagaaaacttacgtagaattcttacatggaatttgatctcaatactaagctaacggaattaaataattttgagaccatcttagagatcatttagttcagcctcttatttaacagaaccaaagtcagtttcatgtgattatttatttggaagaaccaggattagaacctttttttcctagttcctcatacagggctttttctaatactgcttattaaaaaataaatcataacttaaatcattgtttggtcttgtaattccaaatatataaaacgactttccaaacagttttccctgttgtgtagcccttatgttctttgtgtttatagtagaaaggaaaggaaaccaggggaggagttcttggtgggaggtagagtaacagctgttgcttaaattggcagcttctctgttcttgatactgtgctgctagctaattaacaaggagaaagccctctagtgaaagatcagttcgaattttagcagacccgtttaatgagggatagagaaaactggtaagcctctctctgtagggcatatgaagtgagttgaaggagagagaacattcaagaaatatttgagggcctatgtttttgcagacatttttgctggcaccagagatacagcggtgaacaaaatagactaaaattcctaacctcatagagtttacattctagtgtgtgagcactttatatacatgagtggctaaagcctcatcttttcttaagacttttaattttatgaccttttaactacagtgccttgcaattcaacaaacatatgatgataataagttattaatggagagtagcctcctttccacctgtattctgctgctctaataaaaatgacaagactgggtaacttccttctgtcacatttacttccataattgtccagtttttaagaaaagcaatattaagccgggtgtggtagctcacacctgtaatcccagcactctgggaggctgaggcgggcggatcacctgaggtcaggagtttgagaccagcctggccaacatagtgaaactccatctctactaacaatacaaaaaattagctgggcgtggtggcaggcgcctgtaatcccagctactagggaggctgagacaggagaatctcttgaatctgggaggcggaggttgcagtgagccgagatcacgccattgcactccagcctgggcaacaagagcgaaactctgaaactctgttccaaaaaaaaaaaagaaaagcaaatattgtaactatataccactacataatagtgacaggagctcttcaataaagtagaaaacatcaaaggcaacatctatttgtagtaactttttttggcttgaatattgtctttattattactttgtgtgtatgtgtgtgtgtgtgtgtgtgtgtgtgtgtgtgtgtgtgtggttttttttttttttttttgagacaaagtctcactctgtcacccaggctggagtgcagtggcactatcttggctcactgcagcctccgcctcccgagttcaagtgattctcctgcctcagcctcctgagtagctgggatcacaggcacgtgccaccatgcccagctcatttttgtatttttagtagagatgaggtttcgccatgttggccaggctgttcttgaactcctgacctcaagtggtctgcccacctcggcctcccaaagtgttgggattacaggcgtgagccaccatgccgggcctataattacttttatataggaataaaattgtggcaattaatacttgggtgtaaaactaaatggggtctcttattttgacaaaatgactaaacatttaataaaattatctctccaagaactaactgaaaaacccagtagtgtggtattactaagctgtggttatgtaagtgatcaacaattgtttttatggaactgaaatgaaacattgggtgctttaaatttcatttatttctttattttcaggtattgaatgctatgctaaaagaagtctgtaccgctttgttggaagcagatgttaatattaaactagtgaagcaactaagagaaaatgttaagtaagttaaatcaatcaggtaaaacacaggcacagtttagtttagtttactggaaagaggtgctaactggaagtgtttgctgtatcaggaatcatttctgctctgcaccactggaaaagtgctgtgttggagctcatatgttgggcgagagcatgtgtagtacgtttccataatgatggttcaaagaataaactacatgtgattttcatttaattacatatttttttctattttactagtcttttatttgaatggatttgattaaatactgtatagtattttaatatataaagccttttaacaattcaggctcttcatagaaaagtactgccattttattctttttaggcttaagatgatcttaatcaaccttcattattggaggactgtattctcttttgttctccttttggtttctctgtttcatatttgaatgaagaattaatgtgtttggtctcagttatcatattcattgggagaggcactgagttggtaggacacacagagcaatacaggtagctcagttaactgcttgagtcttatctcttaccatgctttagacatctctccttgtattgttagactgagattagttgtgggactaccagcatttaagcatttagacatagaggaagtagccgggcgcagtagctcacgcctgtaatcccagcactttgggaggctgaggtgggtggatcacgaggtcaggagatcgagaccagcctggccaacatggtgaaaccctgtttctactaaaaatacaaaaaattagccgggcatggtggcacacgcctgtaatcccagctactcaggaggctgaggcaggagaattgcttgagcctgggagacagaggttgcagtgagccgagatcatgccactgcactccatcctggctgatagtgagactgtctcaaaaaaaaaaaaagaaaaaagaaagaaaagaaatagagaaagtagtcctgatttctgttgtaaagatatataaaatatataagctgcaagaaaagtaaataaaactagttctttgtggtaatattaggacaaatttatatttatactttcaagtgtaatccttgaaaaccaaagtcttgcatctaatacttcatgggaaaactctttatgatatagacttacgagtctgtagtaattacatgcatgttaattggaagactattaatatgaatgactgaatgttgtacattctttggagcagaagcttctttttcttagagtttcttaactgattttctcctccccaccccaatcaccaaccaccatcataaaggtctgctattgatcttgaagagatggcatctggtcttaacaaaagaaaaatgattcagcatgctgtatttaaagaacttgtgaaggtaaaagtatatgaagattatgctgtgattctatactcagtggataaaaaagcgttagcactacaaatatttcagaatttttaaatatgttttttatggaatattcatctgtattaaaatattaatgaaaggattattgagttttcttagggacctttttttttttttttttgagaaggagtttcactcttgttgcccaggctggagtgcaacctccgcctcccgggttcaagcaattctcctgcctcagcctcccgagtagctgggattacagacgtgcaccaccatgcccggctaattctgtatttttagtagagacggggtttctctatgtgggtcaggctggtcttgaactcctgacctcaggcgatccgcccgcttcggcctcccaaagtgctgggattataggtgtgaaccactgcacctggccaggacctatttttattgtagactttactgaatatacataattctgagtgcagatatgaaagctagtactattcctgcaaaaaatgccaaagccaagatgcgatgagtgaaatttcactacagatttgttgatggaagggcctaagtttttcctcgttcactatcatgttttgcctagtgatggtcctgcttttgtatggcaaagtcacatatagcaagtattcttttctacactgttcgttgtgtaaggaattccctttgcaaagaccatgtatcccaattcttgcctagattatgagcaattttgaattagtgaaagttttattttcaaatagtaaatatagccagttgccctgcctcaccttattgctgatcatgcaaattatggtgaaaatcttagagcttaaaaaatatatatgggctcagttgtagaaaaaaaaagaaaggagctgttaaaaaaattattttagtccaggcatggtggctcatgcctgtaatcacagtgctttgggaggcggaggtgggaggattgcttgaggccaggagtttgagaccaaccagggcaacatagtgagaaccagtctctataaaaaaaaaaaaaattgataaaaatagctggtgcaggccgggtgcagtggctcacatctgtaatcccagcactgtgggaggctgagatgggtaaccacctgaggtcaggcgttcgagaccagcctggccaacatggtgtaaccccatctctgctaaaaatacaaaaattagccgggcatggtggtgcacatctgtagttccagctactccggagggtgaggcaggagtattgcttgagcccaggagttcgggggtgcagtgagccgtgattgtgccactgcactcccgactgggggagagggtgagaccctgtctttaaaaaaaaacaaacaaaaaaaattttttagagcattagatgcccactagttctacaatcatttttcccccacattgtttgaatattttctttttttttttttgactctccctctgtcactcaggctgaagtgcaatggcatgatctctgctcactgcaacctctgcctgccaggttcaagcaattctcctgcctcagcctcccaagtagctgggattacaggtgtgtgccaccacgcccagctaatttttttttgtatttttagttgagatggggtttcaccatgttggccaggatggtctctatctcttgacctagtgatctgcctgccttagcctcccaaagtgctgggactacaaccatgagtcactgtgcctggcctccttttttttttttttttttttttttaagagacagtctgactctgttacccaggctggagtgtagtggtgcaatcatggctcactgtagcctcaacctcctgggctcaaacaatcctcctgcctcagtgccccccaagtagctggggctacaggtacatgccaccacgcccagctagtttttgcattttttgtagagacaaggttttgccatgttgccctagctggtcttgaactcctgacctcaagtgatccacctgccttggcctcccaaagtgttaggattacacatgtcagccactttgcctggccagaaatttttattgttaggggctcgtaactgtaggcaattctggagcatcaagtgctttattaagaagcatttattgagtacctactttatttcaggaagtatgccaaatgctgctgatagcagaaataaatgagactggttcttatactcagatgcttatggtctagaggaatggtgtacaaagcaaggtcaaaattattttcataatactaagacattatttgacttttgtactatgttgacatttgcactgaaaacaatggtaggtaaaactccctggtatgaatcaaggcagtggcaccagatgatactagtagtttctggactctctatttatttatttatttttgaagacagagtccctgtcattcaaactagagtgcagtggcgtgatcagagctcactgcggcctcaaattcctgggctcgagcgatcttctctcctcagcctccagagaagctaggactacaggcatgcaccaccatgttttttgtttgtttgttttttgtttttttggtttttttggttttttttttttttgagacagggtcttactctgttgcccaggctggagtgcagtggtgtgatcatggcttgctgcagcctcatcctccctgggctcaggtgatccctacacctgagcctcctagtagctgggactactactctttgagcccaggagtttgagaccagcctgagcaacatggtgaaaccccatcactacaaaaaatacaaaaattagctgggaacgatggcttacacctgtaaaccgagttactcgggagggtaaggtgggagaatcgcttgaatccgggaggtggaggttgcagtgagccgagaccacgccactgcactccagcctgggtgacagagcgagacctgtctcaaaataaataaataaataaataaataaagcttccaggcatggtggcgcatgcctgtaatcccagtactttggcaggccaaggcaggtggatcacctgaggtcaggagtttgagaccagcctgaccaacatggtgaaactccgtctctactaaataaaaaaaaaaaaaattagccatgtctagtggcacatgcctgtaatcccagctacttgggaggctgaggcaggagaatggcttgaacctgggaggcagaggttgcagtgagctgagatgacaccattgcacccagcctaggccacgagagcgaaactccatctaaaataaaaataaaaaggacttgtatctatcatctgtctctatcatgagtttgacagtatcccagtacttagttttctgatgagggtcagtattgatattaatgaataaagttttttgattatgtatagtgaaatatgtcaatgacgagagatctgcctaactcagtgaaccaatgttttgtgaatagctagtgcgtgatgttacaagatcatttaccagtataagattcatttaaaatgcaagatggaatcacagattttaatgtaacgagtataaaagtttatatggtttcagattctacattgcagctaacctttacaaactaccatgattataaagaagccctgagaccaagaagttgaaaactgctgttcttgatggtgggaggaagagaagacaaatttataaaattatttactaaaacatatatgttccaaataatgggtccatagagagctgggagtttttgccatgacatgtagaaaatggagatgaatgtggagcagcatcagtgtactgaaaggatctatgaggaagggaagtggatttatgtttaagacagattttgcctatttcaaaagtttgcctaagggtaggttgatgcctaggaaaggtataagaaaatgtattttcctctcttctctacctcatggctttccttgaaattcaagtataatatagatgatgtaatttttatggatggcttggcagactttctctcaaaggtttagactttgtggaccacgtgatttctattgcaactactcagctctgctgttgtggcacaaaagcagtaaatgggtcaggcacagtggcttatacctgtaatctcagcacttcaggaggccaaggctggaggattacttgaggccaagagttcaaaaccagtctgggcaacatagcaatactccatctctacaaacaaatactaaagttagccagacatcatggcatatgcctgtagttccagctactcaggaggctgagatggtaggatcgcttgagtccaagagttcgagactgcagtaagccatgattgattgtaccagtgcattctagcctgggtaacagagtaagaccctgtctcaaaaaaacaaaaaaagtggtaaatgaatgggcatgactgtattagattgaaatttttttcaatgtaataactagaaatgtaataactttacagcctgttgcccaggccggagtacagtggcctgatgatagctcattgcagtctcaaactcctgggctcaagcaatcttactgcctcagcctccttgattagctgggaccacaggtgcgtgccaccacacctggccaattctttaaattagtagagacaagatcttgctatgctgcccaagctggtctcaaactcctggtctcaatgaatcctcctcctttgtccccccgctgaaagggccgggattataggcatgagccaccacacccagcctccattgaaactttatttgcacatagtttaccaacccctgatctaggacattaactattatagatttattattttatcatacatttcaagctccaaacaactgacccccaagtgaattattttttaaatgtcccatgcttttttttgtttttgtttttgagatggagtctcgctctgtcacccaggctggagtgcggtggcgcgatctcggctcactgcaagctccgccacccgggttcatgccattctcctgcctcagccttcagagtagctgggactacaggcgcctgccaccacgcccggctaattttttgtatttttagcagagatggggtttcaccgtgttagccaggatggtctcaatctcctgaccttgtgatccacctgcctctgcctcccaaagtgctgggattacaggcatgagccaccgcgcccggccctaaatgtcccatgcttttttaatttggagactgtccctatatgaacctcagttttccactgactgattttaaagttgattattattttttactagccctctaaatgtagtaactttacagtaaatatttggcattggagaatttacagtttgacctggaaaatctttcacatataatctgtaattttgttaagtaaatatttgtcaaattgaatatggacattagcactctcgagtatggcatccactagccacatgtggttattgagcatttgtaatgtggctagtccaaactgagatgtgttttacatataaaatacacaccaggttttcagacttggtatgggaaaagaaatgtaaaatatctcattaattttttatatagattacatatgaaaatgataattttttagatgtattggggtagatactaaaattagtatcacctgtttttactttttaaatgtcagtactggaaattttaaaattcatgtgtagccttcatatacatttttgtattacatttctgtagtgctgatgtagattcctcctgtggcttaaatttggtttcacattttatactccagcttgttctaaaaaatgctgtgagatctttacctctgaattggtttggagtatagacttgattatgacttcttaaatttatgttcttaaattttactctgtctttacaaaggggaataattgtattataatagcttatggtagcttttacatgaaaatgtccttatttatataatttaaaagttgtggcagcacagtggctcacgcctgaaatcccagcactttgaggctgagacagaaggattgcttgaacccagaagttggaaaccagcctgggcaacatggcaagaccctgtctctacaaaaaaaaatttttttagttaactaggtgtggtggcgtgtgcctgtagtcccagttacttgggaggctgaagtgggagcatcatttgagcccaggaggttgaggctgcagtgagctctgattatgccactgcactccagcctgggtgacaagagtgtgaccctgtctcaaaaaaggaaaaaaaagttgtggggaaggggttttgaatttatatgtatgttaacctgattttatttttaatttatttttggtatttagcttgtagaccctggagttaaggcatggacacccactaaaggaaaacaaaatgtgattatgtttgttggattgcaagggagtggtaaaacaacaacatgttcaaaggtaaattgaacttaatttaaaaagaagtcatatggaagataggtttgtataaatcaagttttgtatttaatataaaaatgtaaagcctggctttataatgttgaaatatatattttattaattataattattagaatgcatttatatattataaataatgttattttatataaaatatatttacataaaatatatttatattataataaaatatatttacataaaatatattttattaaaatatatttatattataataaaatatatttacataaaatagattttattaaaatatatttacataaaatagattttattaaaatatatttacataaaatagattttattaaaatatatttacataaaatagattttattaaaatatatttacattaaaatatattaataacatattaagatataaagccaggctttataatattgttgctttataattttgtgttacttgatgtatgtttttaaatagttttttttaggataagaggagaggtcctcatagtttcttatgattttttttttgtaagaaggtagacatctgtaactatgctatttcttttattaaaaaaagaccattcctatcctttcaggaagtgagtgtgtgatttttggagaagagaacatggagtttactttatcctctatggctcaggactcctttttcaggttcccacccagcatactatagatcttcattttgtgtatccttatgccatatttttttagacagagtcttacttttattgcccaagcttgagtgcagtggcacgcaaacatagcttactgtagccttgaccgctttatgctaatttttaattcagtttaccactcctttctcccaaattgcatgtctcaacaatattacaagatttttccacaagcttcacgtatgttacagtttgagagggaaaaagagaaaaggatgatttttagatcgttttgttgttgtttgtttttaattaacattaatagtagttaacattttttgctatgatcatttgctacttgatcattttatatttgaatgctactgcatgacaattagaatataaaactttgtaggaaatttgccacattcaaaaatctttaataatattttcaggagaattataagcagttttattttactccttaggtaaataataaggaaaaacagaaaaaattatatgtatagtttgttatattttatgatattatatttttaaatcttttctcacccagctagcatattattaccagaggaaaggttggaagacctgtttaatatgtgcagacacattcagagcaggtaatgtcttgaaatttgaaaattgttttatataatttttattttcaagtttgaggattcatgaactctttatcttccaggggcttttgaccaactaaaacagaatgctaccaaagcaagaattccattttatggaaggtaggttactgttttttattttaacacttatatccctcttcttgtctgtcagcttttttttttttttttttttgagacggagtctccctctgtcacccaggctggggtgcaatggtgcgatcttggctcactgcaaccaccacctcctgggttcaagtgattctcctgtctcagcttcctgagtaactgggattacaggtgcccaccaccatgcccatctaaatttttgtatttttagtagagacagggttttaccatgttggccaggctggtctcgaactcctgacctcaggtgatccacctgcctcagcctcccaaagtgctggaattacaggcatgagccaccatgcctgaccatgccctgctaatttttttaaaaactttttgtaaagaccctgtcttataaaatatcctttgttgcccaggctggtcccaagctcctgggctcaaatgatcctcccacctcagcctcccgaagggctgggattacaggcttgagccactgtatgcagccacacacatgttcttattaagtgtatttctatctgagtttttggtggtggttcttaatttaggggaaaaactttttttgtaacattatgtgtctttatttgataatagtgatctgcatataaaaagttgccactaatcagaagagtgcaaattaaaatatctcatttcttgattttcaagttgacaaagattgtattggggattgtgaaaatgtagtgaaatagggatgagattaaacttttatggaagagatttgcctcataaaagcaaaaagccttaaatggtcataccatttgttccaaattcagcttataagaggtgtcataacatagtgtcaaagaagaaacatttatgtaccaattatattggcggtatttttaatatcaggaaattggaaacactgccatgcacagtggctcatatctgtaatcccagcacttcgggaggctgaggtgggaggattgcttgagcccagaagttggacaccagcctgggcaatatagcaagacctcatctctacaaaaaataaatttaaaaaattttcaggctgggcgcaccacgttgggaggctgaggcgggcggattatgaggtcaggagttcgagaccagcctggccaacacagtgaaaccctgtctctactaaaaatacagaaattagctgggcgtggtagtgggtgcctgtaatcctagctacttgggaggctgaggcagaagaatcgcttgaatctgggaggcgaaggttgcattgagccgagatcgtgccactacccttcagcctgggtgacagagctagacaccgtttaaaaaaaaaaatttttttaggccgggcacagtggctcacacctgtaatccccgtactttgggaggcttaggcgggtggatcacctgaggtcgggagttcaagaccagcctgaccaacatggagaaagcccgtttctactaaaaatacaaaataactggacgtggtggcgtgtgcctgtaatcccagctactcaggaggctgaggcaagagaattgcttgaacccgggaggcagaggttgcggtgagctgagatggcatcattgcactccaccatgggcaacaagagcaaaactgtgcctcaaaataaataaataaataaatttaaaaaagaaattggaggccaggcatgatggctcatgcatgtgatcccagcattttgggaggccaaggcgggcatatcatgaggtcagaagtttgagaccatcctgaccaacatggtgaaaccccgtctttactgaaaatacaaaaattagccaggcctggtggcaggcgcctgtaatcctagccacttgggaggctgaggcacgagaatcccttgaacccaggaggcagaagtggcagtgagccgagatcgcaccactgcactccagcctgggcaacagagtgaaactttgtctcaaaaataaataaataaatacataaaaattaaaaaaaaaattggaaaaacgtcaaatgtctaatagtagggcgttatttaataaatgatacagccatctgatagaatgctgtataacctcaaggttatgtgttacagaaatattttttcttttttcacccgtgttaatttttaaagagacatgccatggtcttgctctgttgcccaagttggagtgcagttgcatgatcataagctcactgcagtgtcgaactcatggactcaagtggtcctcctgcctcagtctcccaagtggctgggactataggcatattccactatgccagctagttttttttttttgtagagatggaatctcactatattgctcaggcttgttacaagaatatctactggttttataaaatgcttccaaatggatgttaaatggaaaaatgtgtgaaacactgtgagcatgagttcaattattaaagaagatataaaaaataaatttgaaggagacacaattcattcaaaaaagacatgcagtagaatcatactgggttttggaattggaaaattggataatgcttcatgcttttttagaagtagattctgtatttaatactttatagattttcctcttctaaattgaaattggggtcattttggctttttcaaaatagattataggtaaattaactttccgaattagtagtatttggaagttttgtcgttttgttaaatcatttgtccatgttatatagctatacagaaatggatcctgtcatcattgcttctgaaggagtagagaaatttaaaaatgaaaattttgaaattattattgttgatacaagtggccgccacaaacaagaagactctttgtttgaagaaatgcttcaagttgctaatgctatagtaagtagctttcaatgtaacactattattaggactttggttaatttaattataaaaccaggttgagtatatgaccaatataaattattctttgcctgtgaggcagatccccagtaatttatttttgttttgggcacctatatctatgtggtagggacttaatttcattatttttgttctccattaaatataaaattttcataagtatgaaaaagtaatttcctttctcagtcatcctattagtatgcataagaaaacatttaaaaattagtaattaggccgggtatggtggctcacatctataatcccagcactttgggaggccagggcggatggatcacaaggtcaggagttcaagatcagcctggccaacatggtgaaactccgtctctactaaaaatacaaaaattatctgggcatggtggtgggtgcctgtaatcccagctacctgggagctgaggcaggagaatagcttgaacccgggaggcagaggttgcagtgagccaagatcacgccattgcactccagcctgggcaacaagagcaaaactccatctccaaaaaaaaaaaaaaaaaaaattagtaattagcctttagtttctgttgaatttcctttttaaaaattcagttggaaatacttagatttttaaatactttaaaaaatattaattatcattttgtgtctctttaaaagtgtgatggaaacaatttgggggaggagaagcagtttatagatatctgcagcatatattattaggaacccacgtcttgacattggagtgttagcagtaattctttggtttgtggttaatgctaataagtttcttttcagttatgttgttattttgaccaagttgagcagatctaagggaagtagcctcaagtatattttatccgttttcagtatacactcttctactttgatttgcctttgtactttttttgcctagattgccattctttcaaatctttgcatataaccttttcctctttattcaggcctcagctcaaacattaggtccagagaggccttccctgactaccttactagaaaatgcctcccatacttcaaaactgatactctgtatcccattttcgttgttatacatctgaaatgtttatctatttattatatatgtcctctgactagaatgcaagtttcttaggacaaatattttctcatttacctttttgttctcatgacctagatggtacctgataatacatagtacttcaacaaatatttatggattgaataattatttatagtgtaaatgttgtagtttttttttttttttttttgagatggagtttcactcttgtcgcccaggctggagtgcagtggcatgatctcagctgactgcaacctctgcctcccgggttcaagtgattctcctgcctgagcctctcaagtagctgggattacaggcactcgccaccatgcctggctaatttttgtatgctaatttttgtatttttagtagagacggggttttcaccatgttggccaggctggtcttgaactatctcaggtgatccacctggctcggcctcccaaagtgctgggattacaggcatgagccactgcacctggctctaaatattgttttatagcttctaatgatgacatttgcttaggatcaataaaaatcttttctaaagtatcttttctatttaaactttctagcaacctgataacattgtttatgtgatggatgcctccattgggcaggcttgtgaagcccaggctaaggcttttaaagataaagtagatgtagcctcagtaatagtgacaaaacttgatggccatgcaaaaggaggtggtgcactcagtgcgtaagtatcattgatactgttgtcctctgtcttgggattatatggggaaggatatgtgtttatagctttcatattgatcatttaaaatatgtttcaatagtgagcctaatatggtttataaagaaagtttaaatagaaacaattttggagcctgtctgatataggtctattataacttgtgaaatgaaacttgagttttgtacctttgtctaattagctttggaggcggattcacttcgaatttcagatctgctggaaatttgtggggttcttttgaggttattttatattttctttttttttccagagtcgctgccacaaaaagtccgattattttcattggtacaggggaacatatagatgactttgaacctttcaaaacacagccttttattagcaaacttcttggtatgtacagtggtggggatatagaaaaatctccaagaaatacgatgtatctttaggacaaaataggattttaattctgtcctcactaatttaagcacatcatttctttctgtgacttagtttccttacctgtaaaatagagataatggttatctgccctctgtggtgaaagtggtaaaatgaggtatctagtagaaagttctttggaaaagttttagagcacagtacaaaaacaagtggttttaataatagtggatgtaagggcagtaatactttggcaatgtctcaaggtggtatagttagagagcatggaatttggagttaaaccctgggctgcagtccttgctttgccacttgtttgttgccacttaactttttttttttttttttttgagacggagtttcgctcttgtcacccaggctggagtgcaatggcgggatctcagttcactgcaccttcagcctcccgggttcaagcgattttcctgccttagcctcccaggtagctgggattacaggcgtgcaccaccaggtccagctaatttttttttatttttagtagagacggggtttcaccatgttggccaggctagtctcaaactcctgacctcaggtgatccacccaccttggcctcccaaagtgctgggattacaggcatgagccaccgctcctggccatgccacttaactttcttagctttggttttctcatttgtgtagtgtagtaagaatacctaacctattataacctcacaaggttattatgtatgtgaatgtgttttgtataatgtgaagcagggtatagtattagttgttaatttttcttttttgtatcttataggtatgggcgacattgaaggactgatagataaagtcaacgagttgaagttggatgacaatgaagcacttatagagaagttgaaacatggtatatgagtgacaaaaaagcacttcatctcagatttcttccattgattttttttataaagttactattaagttatttgaaatgtaatatctgttagagtcagatcttccactgcttattattttagatgatttatatgcaaatcatttaaaatctcaggtacctgagcagttacagaattcagtgtttttattttctttattgtaataaaattaagattaaaataaggctttcactaggttccttgaagtttttctgttttttaagacagagtctcactctgttacccaggctggagtgcagtggtgcaatcttggctcaccgcaaactccacctcctgggttcaagtgattctcctgcctcagcctcctgagtagctgggattacgggcacgtaccaccaggcccggctaatttttgtatttttagtagagatgggttttgccatgttggccaggctggtcttgaactgctgacctcaggtgatccacccacctcagcctcccaaagtgctgagattacaggtgtgaaccactgtgcttggccggttccttgaagttaaacaggttaaaagtaagttagaacacaaggatgaaattaaatataccacattttctttaccccacatgaaagaccactcctgtagagaaggatattattctgattaggagctcaggttcttaaatataacatacctgtttttgtatctctgatctattttttagctttataactttttaaattacttagcctcaattttgtcatctataaaacgtacataatactaactacttcatatggttgtgaagattgcattcgctgatgcatgtacaatgtctggcacatcataaacactcaatgtatattattctcaaccattccagttgttctaaaaataatctttaattaccgtagcaactattctgcctctttgcttcttctcactcatcttaccagataattgtgcctttacttttctcttaaatgctggtgtttctcagggatcattcgaagttatctttctcaggagcttcagactcatgtatctgtgtttactagaccattcttggatgtttcatagacatctcaaattcagcatatccttattcccatcccaacctctcacctcgttgtcttatcaatgaatattaatatcatttatattgttgccagagtcagaaacttgggtgtcattattatttcttcctcactctgcccactcctttctccatcagttaactagtccaagtgtttccacctcctaaatatctccattccatccccttctctgtagctgcccttcaactatgctagttcatctctttcctagatcttcttattgtaagtctttcaacagatcttccatcttcctgtactcttcccctttgatgtattttttcatactacagcccagaataatctttcaaaactgcaaatctgatcccattactgcttttcttaaaattctttagtggctttctcttgcccttttaaagtttttaactgattttactgtctagctcacatcttccatgttgtgttttagcattgttgttcttagtattctgtgtgccagctatgctggacttcttttagtttctcaaatgtacattcctgtctctcacatctgggctgttgcctttgccagtccctctatctctcttcttacctctgccatcatctcctctggccaagatggctaactgctacttgcacttcagatttctccttaaatgtccttcttcagggacatttcacctgaaccctagactgagttggaaccttctgacagatgtttctatcacttcctacaattaatttttatattattcagcacaattatttgatgtctgtttttcctgcttgaaggtgaaggtagaggtcatagctgggttactcattttttatgttcacagtacctagcacagtgtctggcacatagtaggccttcagcaactattgaatgaatgaatttatcctttgttgcctgtctctttgccccttttttttcttttctttttttttttttttcttctttttttgagacagagtttcactcttgttgcccaggctggagtgcattggcacaatctcagctcagtgcaacctccgcctcccagtttgaagcagttctcctgcctcagcctccccattagctgggactacaggcatgcactgccacgcccggctaatttttgcatttttagtagaaatggggtttcaccatggtggccaggctgatctcgaactcctggcctcaggtgatctgcctgcctcggcctcccaaagtgctgagattacaggcatgagccaccttgcctggccgctccttcctttttctatcttggataatcctaccactgtttctgctaccactatgaagctgggtgtatattcctactctgtttcctttctgactcctgactctccttaagtctctacatttttgtttctatttctaatattctactcattctgagatctccaagggtctcctaatttccacatgtagtgacctttcttgttttccttggttcctaatatttaagtgttttctgccttttctgttttcagactctaagttctatgtctgtggatttcttatattattctagctttaattatcacttctgtataaatggccaaatatgtatttcaaccttaatcctctcttccactgtttaattctgcgtttctagttgactgctataacatttcttttaagatactgtactgccacttcacattcagaatgcctgaaccaaataccttttctctttttatctttaggacataaatagaaaatactttctcttttggcttgttccatccctgtttttaaaccttaggttagtatacatacaatgaaatgctcaaatcctaaggatacctttctttttttgacaaatgcacagtaacccacacccaatcaagaaacagaacatttccattactctaaaaggtttgcttgtgccctttcccggtaatacttcatattatagaagtcctgggctgtgcatggtggctcacactgtaatcctagtgctttaggaggccaaggtgggaggatcatttgaggtcaggagtttgagaccagcctgggcaatgtagtgagacccatatctcttagaaaaatccagtggcatgcatccatagtcataactactctggagactgaggcaggcggtcacttgagctcaagagtttgaggctaccagtgtgtgatgactgtaccacttcaatccagtctcagtgatagagcacaaccctcttaaaaaaataaagaaattctgagtatatcgtttttcttccaatctgttttctttgactaagcatattttgatattaattcatgtagttgtacttatctatagtttgttctttttattgctgaataatattttttccacagtgtatccattttcctgttcatagatacctaagctatttaagaaactccaaacaatcttctaaagtgtcttgctattctatattctcaccaatatatgggagttctttgtggtccacatccactttaacttttgatattgtcaacctttaaaattttactcatcctagtaggtgtagtttatgtgccttgttttcaggtttcttgtgtgtttgtatatgtgtcttctcagatagaatgtaagcttctctatgataggacctgtctttgtctatgtattctccccagcattcatcctgtcatcttgcacatggtaactgcttggtgaatatttattgatgtatattttataaatatgcttcaagatgaattcatgattaaggaataaattagttttgttgaatggaaatgtacatactttaatatatccgaattatttacattgtatttcaggtcagtttacgttgcgagacatgtatgagcaatttcaaaatatcatgaaaatgggccccttcagtcagatcttggttagttatccttaaaactttataccttcttttgttttcattaaattttctaaaatagatacacttgctttaattatttttacattcgggtaaaaatatatctaagacttagtgtcaatattaaacctaatagttaaatgtggacattttgaaccattaatcttaagctactattgactttatgtttaaatctgttgtaggggatgatccctggttttgggacagattttatgagcaaaggaaatgaacaggagtcaatggcaaggctaaagaaattaatgacaataatggatagtatgaatgatcaaggtaagatggcagattattttcctcaggcaaaaatgttctgagtatcagtaagatgagagtttcactgtattcttgtggacaagatggggagaaatttagcctgaaagattatttttaggtagatttgtaatagcttgaaagctcttactcaaagggttatgattattggattgccttcatcgttgagagaaatgtctagtataatacttctccaaatgagttacaaggaaagaacactagttcttcatgatgttcatagagttaacttaaaaggagaactctgagtcaaatgtggtggaatgctagtttttaaagagttaaatttggctgggtgaggtggctcacacctgtaatcctagcactttggcaggccaaggtgggaagattacttgaggccaggagtttaagaccaacctggccaaacgtagcaagaccctgcctctatgaaaaaaaattatttactgaaagtctcttcacggagctttaatattgctaacatacattgggaaactaagaaatggatagcttaagcaatgcttagaaaattctttctgtctgaaacataagaattcagttttctcagtatactgctctgttcccctgaccctataaaggcatgcctcagagatactgtgggtttggttctagaccactgcagtaaaggaaatatcatgcaataaagtcagtcatacagattgttttggttttccagtgtatataaaagttatgtttacaaatacatatactgtagtctattaagtgtgcaagagcattatatctaaaaaacaatgtatataccttaatttaaaaatagttgattgttggccgggcgcagtggctcacgacgcctgtaatcccagcactttgggaggctgaggcgggcggatcacctgaggtcaggagtttgacaccagcctggctaacatggtaaaaccccgtttctactaaaaatacaaaaaaattagccgggcgtggtggcacacacctgtaatcccagctacttgggaggctgaggcaggagaatcgcttgaacccgggaggcggaggttgcagtgagccgagattgtgtcattgcactccagcctgggcgacagagtgagactctgtctcaaaagaaaaaaataaaaaaatatagtttattgctaaaaatgctaatgatcatctaagccttcagtgcattataatctttttgctggtggagggccttagcttgatgttgatgactgctaactgattacagtgatggttgccaaaggtcaaggtggctgtgacaatttcttaaaacacaagaatgaaatttgccccattgattgactcttcttttcacaaaagatttctctgtagtattcgatgctgttcgatagcattttacccacagtagaacgtcttccaaaattggagtcagttctgtcaaaccctgctgctgctgctttatcaactaagtttatgtaatattctaacaatttgaacaatttttcatatctgtgctttatctactatctgatttattgttatttttttgtagtctctttttcctgagctccaggttttcatagtagcccaaataagactgtctttttcttttaaggttgttttttttcctcactgtctttaacactgcaaaaatgtttgcatgtagaattcataattgcagcatatctaaagtatccattctgtgccaggcactgtcctgagcactttaaatatattaattcattttatcatcataacaactcctatggcatattcagttattatctgcctttttcaaattaggaaactgggatacagggaagttgagtaatttgcccagtatagaacctttcctgacttccttccttctttgaattaacgccccttcctctatttgcttaactctgtcgtattacttgccacgatgtgctgctattagtttatcttctttcatttgatttgagctgttggaaggaatataatatatatgtttcataaatcttttataaggaagatgtggcttaaaagctgcatttatgaaatggatttggaggttttgatcgtgactttattttgagatattgtatctttgttagtattgcattgataattagacttcacctggatttcagttcacttctggacaatatacttagagggtatgtatagacaaattaaaagatgtaggaaatcaggatgataaatggggttctaaaccatgttagaagagtcagaggtggatatttgtcatccagcgaaaattcacaggagacatggtagctcttatgcatttgaaagctggccaggtgcggtggctctcaactgtaatcccagcattttgggaggctgaggtcggtggatcacttgaggtcaggagttcgagaccagcctgggcaacatggtgaaaccctgtctttactaaaagtacaaaaaaaattagctggctgtggtggcgtgtgcctatagttccagctactcaggagcctgaggtgggagaatcgcttgaaccctggaggtggtggttgcagtgagcgaagcttgcaccactgcactccagcctgagggacagagcaacactctgtctcaaaaaaaaaaaagattttgaaagccttattttttatgcgtagcaaggagacatatacatgaataggaatggaagtgccacgtaaatggatttcaatttaatatgtgtaaagaaaagatttttccctaagtataacagaatggcatagacagccttacattagatagcaggtcatctctcctggggatattaagaccaaggctagataaccatttatttgggggatattgcagagggaatgcagacataatggacattttgactaaagtccatcccattcctgagattgcatgcaactgaagctagaagaaatgcacctgatattctaagagtgatcaaacaactgcgggaattaattcactatatgctactgagagaattaaaatactagtagtagtaattacttgattataggaaataatttttctgttgattatggatagaacgtacctctttctgcttgcttatatagtctacattatgaatttatgattaatatttagggtagagctaaagtgagcatttgtgttcattttttaaatataccatatacctctgatgtttggagggcctggagagggtagacatatgaagtatggaaatgttggacatggggtctcgaaacattctattaatagtttacttaaactgtagggaaagtacatgtttgtttcattgtttttatagcttatgaatactataaatgttcttttgaatatattccgtattttctttttttttttgagatggagtctcgctctgtcgcccaggctggagtgcaatggcgcaatcttggctcactgcaacctctgcctcccaggttcaagcgattcttctgcctcagcctcccgagtagctgggactacaggcacatgccaccatgcccagctaatttttgtattattagtaaagacagggtttcaccatattggccaggctggtgtcgaactcctgacctcatgagctgcctgcctcggcctcacaaagtgttgtgattacaggcatgagccaccacgcctggcctccatgtttaatttttaaaactcaaaagcaaacatagcgaatgttaacatttgttaaatctgggtggtagtttgactatgtattatgtctgtttttctgtatgtaagatattttgtaatataaaaagaaaaatgagatagttatcactttaaaaacatctgctaagctctttgaagttatatattgcccatttgcacataactgctttgatggtgaatgataattgtgtgtgagagtaactgaccttgtctacagaactagacagtacggatggtgccaaagtttttagtaaacaaccaggaagaatccaaagagtagcaagaggatcgggtgtatcaacaagagatgttcaagaacttttgacacaatataccaagtttgcacagatggtaaaaaagatgggaggtatcaaaggacttttcaaaggtaagaaaaataagcttgttattagttaacagacggaaaagaaaggaagttgagaaaaaagagtgctgccagtattggaaaattcacagctgaatttcatgttattttcaagtacttccaggatttatgtgacctgtgatttatctgttttcatattcaaggtaatattaatatttaaaaaaaaactttacatctgtgtagtgtgggtaaatgaaaaaaaattaataaagcaatgattttctttttgtgaacacattatattaaatttagataatataaggaaaaaaaaaacacattacctttactccccagagaatccagtggatcctactgcaaataacagttgctataactaagttttcttctgatatatcataactgtttttccatgttgtcaaatattcttcaaaacataattcttggccaggcacgatggctcatgcctgtcatcctagcactttgggaggctgaggcgggcggatcacttgaggtcaggagttcaagaccagcctggccagcatggtgaaaccctgcctctacttaaaatacaaaaaatatccgggtgtcgtggggtgtacctgttatcccagctactcgggaggctgaggcaggagaatcacttgaacccaggaggcggagcttgcagtgagccgagattgtaccactgtactccagcctgggcagcagagtgagactccggtccccaaacacacacacacacacacacacacacacacacacacttcttctgagtaatactgtttaagttatgcatgtatctttgtctaatgtagtgccacttttttggacagtaaggctgattcattcacttctatatcagatcagtttttgtgcagttccatgagaccagggatttttgcctgttttgatcagaaacatagtagaagctaaaaaaattttgtagtaatataatttccattatatttctttatttatattattttgagacagagtctctctctgtcacccagactggagtgcagtggcacaatctcggctcactgcagcctctgcttcccaggctcaaacaattctcctgcctcagcctcccgagtaactgggattaaaggcatgcaccactaccgcctggctaatttttgtatttttagtagagacggggtttcactatgttggccaggctggtcttgaactcctgacctcaaatgatgtgcccgcctcggactcccaaagtgctgggattacaggcttgagccaccacgtccggcctcacttccattttaatggttgaatattttctcaatatgtgtttttacattattaagtttaacatttctttgtacatttactggtttgaatttactttgtgaatcacctcttcatgttccctgtccagttcttccatttttcccccttatatctttgtaatagctccttaaaatctttggtttatgtcttcaaatattttcccccagtttttcatttaccttttatttttatttatattttataatgaacagtagttgccctttttaatgtagccagcctatctttttttatttcttttatgctcataaacagcttccccttgtttattttttccttttttttttttctttacagaggtaatcaagttaaccttctccatgttgataccacagttgtcaccattttcttctttttttgagacagagtcttgctctgtcgcccaggctggagtgcactggcatgatctcagctcactgcaacctccgcctcctgggttcaagctattctcctgcctcagtctcccgagtagctgggatttcaagcacgtgccaccatgcccaactaatttttgtatttttagtagagactgggtttcaccatctttactggccaggctggtctcaaactcccaacctcaagtgattcgcccgccttagcttcctaaaatgctctgggattacaggcatgagccacaacacctggcttctacttgtttttgtttttattttgtgtttgactttttaatctcaattgaatttattttgctgtgtattatgtatcgtaaaaagataaggttttccaaagacttccaactgttccagtcctctttttgatttttttctataatgtaaacaactaattcagagtctgtgaaaatttgccttgaaacccattaaaatgaatttattgtttccaaaaatattaattagacaagctctgaatatgaacaataccattgaatagcttctaaaagaatgagtatttccagatgttttaaattaccttttgtctttgaagctttccttattttccttgcgatatcctattttctcttttgtgacaaaaaaattagacaaacatgttgaaaattggttataattcctaccatcacatgctatttcagatagtgactaataaacacattacatcactgtaatgtctttcccatgtagtcctgactgttcttgatagaacagattcaccatccagatcttatctatgcattgatccctcaataaaggaataacccaagatgaagttggcagtgggtatacacacagctatgtcacaccaaacttgaaatactttttagaagttttaaatgctgataaacaaactcttaggacaaatcactaatgagcatggaattcccatcttcttcagatttattcatcataaatggttttcacagattttatcataaaaacataatcttctctttcattcatagtttataattcacatgatttattcacattaaccagctgtgattggagaatcaggaggagctttgagtcccatattttataaatgcttctgagaagtaccatagttaatgcccctttcaaataaataattttggatggttgtggtggctcatacttgtaatcccagcactttgagaggccaaggcaggaggatcccatgagcccaggagggcaaggctgcagtgagccatgatcagagcactgcattccagcctgggcgacagagcaagagcctgtctcaaaaaaaaaaaaaaaaaaattgttgaagcagttctattcattgttgtagtgatgatctcttgctttcttttatgagtacagctgttgtctaaagggtgtttttatctattctgttgttgtttttttatttattgttgttgtttattttttgttgttttttgtttgtttgttttgttttgttttgagacagggtctcgctgtgtcacccaggctgggggctgaagtgcaatggcatgatcatggctcactgcagccttgacctcccaagctcaagcgatcctccaatctgaggcccccaagtagctgagactacagacgcatgctatcacactgagctaatgcttttttttgttttttttgtagagacagggtttccccatgttgcccaggctgatcttgaactcctgggctcaagtaatcagcctaccttcgccacctgaagtgctgggattacaaatgtgacccacctcacccaggctgcatctctttcattgactgccctttttactatggtgttttgacatagtgtagaaattccttgacaagtgaagttgcattatttgtctttgtattctctgaaggttttcattacttaaagaaaacttctggccaggcgctgtggcctacgcctgtaatcccagcactttgggaggccaaggcgggcagatcatgaggtcaagagatcgaaaccatcctggccaaaatggtgaaaccctgtctctactaaaaatacaaaaattagctgggtgtggtggctcatgcctgtaatcccagctactcgggaggctgagacaggagaatggtgtgaacccgggaggcgggggttgcagtgggctgagttcgtgccattgcactccagcctgggtgacagagctagactccatctcaaaaacaaaacaaaacaaaaaaaacttcttagatacatacacatcttcacgttctctcagactcatactttactttctactttcttttttttttttttttcttctgagacagagtcttgctctgtcgcccaggctggagtacagtggtgcgatcttgattcactgcaacctccgcctcccggattcaagcaattctgcctcagtctcctgagtagctgggactacaggcgtgtgccaccatgtctgactaatttattttgtattgttagtggagacggggtttcaccacgttggctaggctggtctcgaactcctgacctcaagtgatctgccagcctcggcctcccagagtgctaggattatagttgtgagccaccacagccagcccaacagactcatactttcatattcatctaccagccatccagtctctttgctaattaacccatgtctataaactcagctttttgtccagcattcccctgtatcactattaagccgttgttatagcttactattaaaaactgctggctgaccaggtacggtgtctcacacctgtaatcccagcactctgggaggctgaggtgagtgggtcacgaggtcaggtgtttgagaccagcctggccaagatggtgaaaccctgtctctactaaaaatacaaaaattagctgggtgtggtggcgggcacctgtaatcccagctacttgggaggctgaggcaggagaattacttgaacctgggaggtggaggttgcagtgagccgagatcacgccactgcactctagcctgggtgacagagcaagactccatctcaaaataaataaaaaataaaacactgggtacaattttgctaatagtggcttattcacagatataaataaagtattagcataaatcgtagccttaaaaaagccttttatatgtccttttatatagaattttacatggtcttcaaaaaatagtatgtaattgagaaaaagattagaagggaatatgtagaaatagaaagaattatgttagagtgataggattatgtaattttttcttagtattttctcagttcatcaaactttctattataccctgattatactgattatattacctcctacgctgactcaaaatctttttttttttcccctcaggtggcgacatgtctaagaatgtgagccagtcacagatggcaaaattgaaccaacaaatggccaaaatgatggatcctagggttcttcatcacatgggtaaataccaagttgttggcagttgctaatgcagtttaatttataagggttgagttttaatgataagccttttattgtaatattatgaaaatatgttcaaaaggtgtgtgatttcagggaaatggtcatctgaatcctaagttgaattcaattgtaatagggcttattagctgaggtcttattcactcctctgctgccatctgtgtgatgtttgagcaagctatttaatcatcttttgtttgttctggtgactttttcccttattttagaacctggatatttttacttatatgactgaggatttttaacctgagttctactttgactatataacctttacaaagttccttaaactttctgaacctcactttccccttcggtaaaatcacagatcatatctcatcaagaaattgtgacaattaaatgagataatatatatgaagacattcagtacaattctgggcatatagtagatgttcaataaatgaattattttctttttgtaagtcctatgaaataatcccctattgattattttttatgtaacttagagtaagacccttttggatttataagaaaaaaattttttgtttagatttattgactatgtgaccggtagtatcctaagatctttttatgtatcacctcatttattcctcgcaataactccgtaagataggctattcattctcttttattgatgaagataactggtgataatacaaatttttaggtggtacgttctttaaggctgatgactaaattgcaatcagaattcagtatttttagaagtacttattaggcaaaagtaataaatgtttccagttctgcttaataattctctgtttttaactctacttccctacttttgctctaggtggtatggcaggacttcagtcaatgatgaggcagtttcaacagggtgctgctggcaacatgaaaggcatgatgggattcaataatatgtaaagaaaatgccttaatataaactgactcagttgaatacctaatttgctgagacctcagcgtttcccttctttttgcgaattggggggaaagtgtatttttcttgcttatcatgcactctttccttttcttctcgcccgcttttcccctccttttctttttccttccttctttcctccctttaatataagggagaaatacatggtttttgtggaaatcattatatgtttgctttagattttcttctgttttcaccatcataacacttaagttaaatcatgatgtaaaattttagtacttaaaggtttttaattatctcgaaggccaagcattgcatttgtaaacagtcctggtcagtagttaaataatgtttcaattaaagtgctgtaaaataaacttcaaagtggttataagttaa

SEQ ID NO: 11785 - DNA, 4136 bp, Homo sapiens
gggggagaggaacttgtttttgcctgcattgcccctcagacttggtttacctgtctgacactagtgctcattatttcctagcctaagctgtacaaagaaacatctaggctcccacctttgttttatgtttcttttttcctttttttttttgagatggcgtctcactctgttgcccaggctggagtgcagtggcgcaatcttggctcactgcaacctcagcctcctgggttcaagcaattctcttgcctcagcctcccgagtagctgggactacaggtgcacaccatcatgcctggctaattttttgtttttgtatttttagtagagacagggtttcaccatgttggccaggctggtctcaaactcctgacctcaggtgatctgcctgccttgcctcccaaagtgccaggattacaggcgtgagccactgcacacagccatgttgtctagttttaataaactcttatgaaactcaaaaccaaagccatactcaacatctagcgttgtcttttgttattccatcaaatggtataaaaattcaagaagagttataatttaaattaaaagtctaggcaaatgtcatgcaagacattatttaaatgacttaatgccagaggtttaaaaatttatttaaaaattataggagaggccaggcacagtggctcaggcctgtaatcccagcactttgggaggccgagatgggcgtatcacctgaggtcaggaattcgagaccagcctggccaacatggtgaaaccccacttctactaaaaatataaaaatcagccggacttggtggcatgtgccagtaatcccagctactcaggaggctgcactccagcctgggcaacagagcgagactccgtctcaaaaaaaaaaaaaaaaaaaaaacaaatttccccaggcaaaaggaaatctaattaggaaaatgaaaaatggttgtttagaagaatattttgtgctgtacttagaccacttcataaaaaggtatactaagagtttcagtttgggaagacaagagttctggagattaatagtgatatttacaaaacaacgtgaacatatttaatgccacttaactatacagtaaaaaatggtcaaaatggtctggccgtggtggctcacgcctgtaatcccagcactttgggaggctgaggtgggcagatcacgaggtcaggtgctcgagaccagcttggccaacatggtgaaaccccatctctactaaaaatacaaaaattagccaggtgtggtgcacgcctgtaatcccagctactcagaaggttgaggcaggagaatcgcttgaacctgggaggcagaggttgcagtgagccgagattgtgccattgcactctagcctgggcaaagagcaagactctgtctgaaggaaaaaaaaaaaggtcaaaatggtaaattttattttatacatattttaccacaataaagaaggtatactaatacactactttttttaaggattataaataaccatactcctttattttaagttcagtgatactctcacttcttaaaattttttttaatttttaatttttttttttttttgagacaggttctcactatgttgcccaggctggtctcacattcctgagcttaggcaattcacctacctcggcctcccaaagtgctacgattacaggagtgggccacatgcccggcctcacttcttaaaatattcgggttaataaacattcttcagaaactcaagttattttttaaattgtttaacaaattgcttgagcttcctcactacaggatctgctgaagagaggcacaagaagtacctttagatcaggtacgatggctcacacctgtaatcccagcactttgggaagccaaggtgggagtatctcttgaggccaggagtttgagaccagcctgggcaacatagtgagacactgtctctacaggaaatttaaaaaagctgggtgtggtggtttgcaccatagtccagctactcaggtactcaggatgctgaggtaggaggactgcttgagcccaggaggtcaaagctgcagtgggctataacagtgtcacggcacaccagcctccagcctgggtgacagagtgagaccctttctttaaaaacaacaaaaagtacctttaaaaaaagtaaaaatagggccgagcgcggtggctcacgcttgtaatcccagcacttcggaagaccgaggcgggcagatcacgaggtcaggagattgagaccatcctggctaacacggtgaaaccccgtctccactaaaaatacaaaaaaattagccaggcgtggtggcacgtgcctgtagtttcagctactcaggaggctgaggcaggagaatcgcttgaacccaggaagcggaggttgcggtgagccaagatcgtgccattgcactccagcctgggcgacagcaagactctgactcaaaaaaaaaaaaaaaaagtaaaaatatattctttagccagtgatattggctcttgtttacaaaattatccaaaacgttctttcaagtcttcctgattttgaaaaatagagtctcaactgatatctctaaaatttgaggctgggtacagtggctcatgcctgtaatttgaacactttaggaggttgaggtgggaggatcccttgaggccaagagtgtgaggctgtagtgagctatgatggtgccactgcactccagcctgggtgacaaagaccctatctcaaaaacaaacaaaacacaggaaaaaaaaaatcaaaatttagattgcaaatggctccacaaaacaaatcttgagggcaaagatgttttagtaattttacaattgccagctctaggcagtatgtgacatctttctaggcactcagtgcttttagaataaatgaccttgtgctgaggaatgtgaaaaaaaagatgtaaatcggtgctgttttattgacaaatgggatatgaagaatgaaatgtgcggccgagcacggtggctcacgcctgtaatcccagcactttggaaggcggaggcgggcagatcacgaggtcagcagatccagaccatcctggccaacacggtgaaaccccctctctactaaaaatacaaaaaattagccgggcgtggtggcgggcgcctgtagtcccagctactcgggaggctgaggcaggagaatggcgtgaacccgggaggcggagcttgcagtgagccaagattgcgccactgcactccagcctgggggacagagcgagactccgtctcaaaaacaaaaacaaaaacaaaaaagaaatgtgcaacatagggtttagatgaagtgacaggagactcagcatattatggaaattattatcttgattttgtgtatatagaaataaagctgtatccggctgggtgcggtggctcatgccagtaatccagcactttgggaggacgaggagggcagatcacgaggtcaggagttcaagaccagcctagccaacatagtaaaaccccgtctctactaaaaataccaaaattagctggacgcggtggttcgtgcctgtaatcccagctactccaggggcaggagaatcacttgaatccagaaggcagaggttgcaatgagctaagatcgtgctactgcactccagcctggcgacagactgagaatccgtctcaataaataaataaataaacaaagctgtgtatctggttttctatactttccaggtcaaatctcactagcagatgttcctgttatcttcagtttgacatcttatctaaaatgactcctaaaatgtgtaataatgttaattataatatctaaacctactgactctaacatcacaaagaattttaagaggtcgaggttaaaaatctaaaattgtaagtcatcagctaacaatgacatttcaagtcatgagcttggataaaaataaccatggaaatcaccattcagcaaaatacaggcatagtggccaggcgtggtggctcacgcctgcaatcccagcactctgggaggcccaggcaggaagatcacctgaggtcagcagtttgggaccagcctgggaaacatggtgaaactccgtctctactacaaatacaaaaatgagccgggcgtggtggcggacgcctgtaatcccagccactcaaaatcgctcgaatcagggaggtggaggttgcagtgagctggatggcgc

SEQ ID NO: 11786 - DNA, 123 bp, Homo sapiens
agggtcttgctttgttgcccaggctggagtgcagtggcacgatctcggctcactgcaacctctgcatcccaggttcaagtgattctcctgccttagcctcctgagtagctgggattacaggca

SEQ ID NO: 11787 - DNA, 1671 bp, Homo sapiens
ctgattatgtaataggatggaaaaagtaaaaaaaaaaaaaaaaatctaatttgtatttccatgacaacgtgttctcccagcaacatccctctcctttatttgagttataaagggcactgctgggcctgagaaccaggccagaacctccttctgtatggcagctaacagtgtagggctccagtatcccaggaaggccccttatccacactccactcagctcataggagagtcttgcataatgaagacacagacctgggcacttcagtccttgtgctcctcctctcttttccccacagcaggacctggatacagaagtactcagccaaggtgacagaataaaatcctttttttgttgttttctgtttgtttgtttgttttggagaaggagtctcgctttgtcacccaggctggtgtgcagtggcacgatctcggctcactgcaacctccgcctcccaggttcaagcgattctcctgtctcagcctcctgagtagctgggattacagacgtgcgccatcacgcccagctaatttttgtatttttagtagatacggagttttgccttgttggccaggctgtgctggagctcctgacctcaggtgattcacctgccacagcctcccaaagtgctgggattacaggcgtgagccacagcaccctgccaaataagatcctttttaaaaaatatctgaaaaaagcttcatatctttacaaactcataaaatagctgattgggccatggaggagatgaggctgtttagaactggttttgtttcaagtttgtcaattttccctgtatgagaacttgggtaaagcacaaagaaacatacagtgctagtaacaggtctcctgcgccctggaactaagtgtttggaggaaggactaaaccccgggggaggtgagtataaaataattccactaagatcacctcctcagtccccagaaggctgatggtggatcctctggccatctcctgtggggtcttactgctcctctgccatttctctatgcctgaagacacgaagatgatatcaaggcagagctaccatatcgcagccagtctctaggctactgctgtgcagtggctcccactttctaatgcttttttgtttttgctttttctaacaaaacaatcttttttcaaaatgaattccaacccctgctagcttccttccccgcctccatactgttttaggcagcaccgtttatgtgacagagtccgtgtttctcaaatgcatggtgttcctcaggtggagagtgggcagaagtttttgcaacactttttttttaagttattgggtgcaaaatcccaaaccaggatatgtgtatgtctgtgtgtttatgttttttatttgaccctcccctctttcaacctacccccttttatatctaatgtagaaaaagcgaaattgaatctggaaagcaaactgttgtatatagttgcggtaacaatcatgaagagagagccgggctgtcccctcagtaattcattttaaataacaaattatttaaaaataaaattcatgccagagccagctgaagaggccttccttcatcaccactgaggccacccccaatctgggccctctgtccatctggcatgtctcctcccagcaagattcatctgttcaatgccatttgcgtttcaataaagttatctcctgtactgtcca

SEQ ID NO: 11788 - DNA, 421 bp, Homo sapiens
aaacatcaaggctccggagtcctccatctgggttgctgcagtgtttgaaaacataccaccctcttgactttgctaaattttcttcttggggtaaaagtgaactgacctattagaagctgttgtaatcaagttcaacttcttttggccacttcaagaaagtaaataggcttactattccccattgcaaaattgaagggtccaagaagcaatcttttccctatgaaattgtagtaacataactcatctctgccctcttaacatgggaggtgacaagtgtgttgagaactctcttcaagccagttgcagtgggtgtacctgtagttctagctactctggatgctgaggtgggaggatcacctgtccagcctgggcaacatagcaagacccccccaactcaaaaataaataattgagaaagcttt

SEQ ID NO: 11789 - DNA, 9361 bp, Homo sapiens
agaaccaaacacacatctggatcaccgagacataaaggcctgaagaagacccacttcatcaagaacatgaggcagtacgacaccaggaacagcaggtatgaagcggagccgggaaccgggccagggctgtggtctccataagcccacggggtcctgcccctgtcagccaagcaatcttccctccactcccaaagctcccgcccaccccacactccacacctctagaggtgggccctcctccccaccacactgcttgctccacatcagccgagcacccgcaggtccctggtgtcaccacagcgagatcaccctctctgggctcccaggtgaagggtcacacgtggacactagcctccagcaacagtgctgacgtgaaggaaaactggagacacagaaacgggtgtggctgtgagatgtgtggggaggagggctgggctttgttgggagcacggaggagaggctgaataaaccaaacacctggctgcccaaagctggcggagggccgcagctggcaccggctgcaccctgagaggctgtgtcggggaggccgcaggggctgttcctgtggccccgtattcccatcactgcatgtcctgaggtgtcctgaggtccagagtgctcccttccttctggagctccccctgccgggcaccctccttgtggtgactgtgggtctggatggacccttgctccccatcagtcctgtacagctcccagcagacgtgagtgccagccctggctcccgtcatccaagccagagagggggagaagttctcccactgttgtccccctggtgagaccctgggcccaggcagggcagagccagcgtccaagggaggagaaacagtggcttctgcctgtgctctctgggcccggggcccggctgctcgagcgccttggaagggagcctccaggccagcctctctgtggacctggatcaggccctttctggtggtgttgagccccgctccacccaggacctctgaggtctggctcgaggcagcccttggcctcgccatcctgtcccctctggctgcctctcatctctgaatgagccaagatcctgaggtgaggccgccagccctacccgcactgggtcaggaaggagccttcgggatgtcactgctgtgcctgcccacgtgcagcggcgtcccagggaggggaaccccggtagctcctgtagggaatccactctgagagcttgcgggggccaggcttagtgacggtggccacccggcctcctgggctcaagtccccttggacagcatgggcagtttcccagcacctgaatttaggcagaaggaattttccatggaaatgtctgtagctctggaagcagcagtaccttgagccccgctccccggccccgtctcccctgactccgtccccctgcaggatcgtgctcatctgtgccaagcggtccctgtgcgcggccttctcggtcctgccctatggggaaggcctgcggatcaggtgagtactcagcgcttgcctcgcatgcggtgtccatctaggcagaaggcaaggcctggtctcggccaggcccaggaggcatcagcgggcactgcgcccccaggtgcggctgcccccgggctcatgcgaggctcagcatgtcaacctccagcaaagctcctcaggaacccggggccgtttcgggtcctcactctccagaggagccggtttctgttcacgctgtcgatgtacaggtggctgggctgtcccacctcctgtggacagagccacttggtgctgtgaccatccaggcagtcgtatccgtgcgtaattcagggaaggaggaaacagctatggggtggggattatgtgtggccctggcttaaaaacagtggtggagaaacctgaccaggcgtgggcacatgtacctagtgggctagtgaaggtgggcgccaccccgggggctctaccagccagtgtctgtactggggaagcggggctcaaaaacccctccttccatgaaagcactcctgacgtgcgccttcctggtcacaccagtgccgcctttctttcccgaggggctgtgctgacattgttcccgagagcacctcgggccagcggacaggtgggctgggctgccagagcctgagttcagcgcagaccacagccccttgcctctcccatgtttgcagtgacctgagggtggacagccagaagcagaggcacccgtccggcggcgtctctgtgtcttccgagatggtctttgagctagaaggtgtggagctaggagcagacgggaaggtaagagcctcttcgctggtggacacccagcgccgtcagggccaggcaggcgggtgggagcagtcccacgtcagtgcccacgaggcacacgtgaagctgtgcttcactccacgtaaaacgcaagggtggagtggatgcgggcccgtgcagccctgagaacgtggccctggagcccgtcggactcccccgcctggccgtgcctgaggtctgcgccactgccccacagccaggtgctcctggacacccccctgctgcagggtggggctcgccaaccctctggcctctgtgctggtggtcagcagtcttcagaggcagggagaacgttacaggctacagaacccagataaagcacagtagtgttccggaatgttctagctatgtgaggagcagcgtctagctcagacgcagcctcaacggcttgatctgagttgttcccttcattttccatgcagggctcctggcatgtgcgtctgggcttcctgcagcgggagctcactttgccctctggtcccgggaggcagagctgaggccagatgcatttgcttttccaggtcgtgtcttatgcgaagttcctgtatcccaccaacgccctggtcacacacaagagtgacagccatggcctgctgcccacacctcggcccagtgtcccccggactctgccagggtcaagacataaacctgcccccaccaagtcggcaccagccagcacagaactaggtagcccacgtgccttaaccacggcctggaacagggtgacccgcgtgccttaaccacggcccagggactgcagcagcatcagcaagcccctttcaatctgtagccctccgtgcagatggagcctggggaacagggtcaggagaggaacagctccacactgaatcgctatccctgggcttggcctgagccaggcagtggggaggagctgcatccacccacagatgactccagggagggcccctcctctcaggacatccttttcttgccctaagccctgggcccttcaggagagaaccatggcctagagcccctcccctgctcggccttgccccgccatggcgctggcctgccaggccttggggctagatgggtactgctcaagactcctggtgggtcaggggttgcctctcttacagggagtgacgtgggggacaccctggagtacaaccccaacctcctggatgacccgcagtggccctgcggcaagcacaaacgtgtcctcatctttgcgtcgtacatggtgagtgccctctcccagggcctgggtgcaggcagctgcacacctgtcctggctcggggcgtgtggggcaggctgtgggcaaagctgccccaggggcgtgacgtgcccccatcccggatcgcagcagcacagacagtggcggtgtgcagggcaggccagggagcagtgctggccactccagctggggtccacccttgcccttccgccctcggcacctggcaacctggctctccccacaccaagcaggcatgggctctggagttctctctcttgagccattttgttctcagagattcggggcctctcaagccacaccgtatgcatgtttgcaaacccaggacagtgagaaatccatcgtacccagcaggcaggacccatggactgtgcgaggggccggcccaaccctgcccactctctgttgcagaccacagtgatagaatacgtgaagccctcagacctcaaaaaggacatgaacgagaccttcagggagaagttcccccatgtcaaactgacgctgagcaaaatcaggaggtgaggacaccctctcagaccatctcatcgtcctgggaggccctgccagcctctcctctccagtttctggtagattctctccagcttgacaagtctagccgctgcccatccccaaccccctctcgccatccgaccaggcccccagcagcagctcccccacctccaccgcccgccaagccaggccccccgtggccccatcacactgcatccccccacacaccactgggtctctcacagccagaccctcgcagcagcccaggatctttttaaaacttgagtgggacaaggcctctgttgtgcccggcccctcccagtgtgtgctattttgtgagtagattccgtggcccttcccctggcccacaaagcgcccccatccaggcatgctgggtgctcgccaaggccgtccaggtgtgcctctgctctcacattgtgccacgctgatgacccatgaccggaggaaagcgagcagaaggcggcggaactgctgggctcacgtcgggctcctggccacggccctgtactgggggcctgccctgccggcctctgccccagtgttccagagggcagctcactcaataccctggcacctcccttcaaggctcttcctaaaaccacccctcatcagagaccactgccccccaccgagagcagagcctgtcctctgtggctccacccaccaggcacaggtgggagctgccatgggtgcccacccacgggacgggggaagccaaaacccagcctgccggtccctgcccatgcgccctgccctgggcgttatacatggtacggcggagggtaccatcccctgaaggatgcggtggtgtttcttgcggcccaaagctacatcgctccagcctcggttggtggtggcagggggctgcctcctcagccccagccagagcccccagggacatggcttctgtcttaacccacagcttaaagcgggagatgcggagcctgtcggaggagtgcagcctggagcccgtgacggtggccatggcctacgtgtactttgagaagctggtcctgcagggcaagctcagcaaacagaaccgcaagctgtgcgctggcgcctgcgtgctgctggctgccaagatcagcagtgacctgcgcaagagcggcgtgacgcagctcatcgatgtgagtgcccggctcggcaggcactgcaggcagggtcatgacatcgagccagggccactgctgggatggggctggccgggtgggaaatgtggaagagggaaggctcccgtgtaacccttctctcttctcccctgcagaagttagaagaaaggtttcgattcaacaggcgcgacctgatagggtttgagttcacagtgctcgtggccttggagctggccctgtatcttcccgagaaccaagtgttacctcattacaggcgcctcacccagcagttctagcagaggccccacagaaggctcagggcaccgaggtgcacttgccggcctgggaggtgtcccactgaagccccgcgcctcctcctgccagcacccccagcacctgctagcaggaggcacctggcctccgctggtgcagctttcctttttgcctctttgccatttccttggaaagagacgtcgctttcatccccaagtgcaccgtccctccgaggggatttctgagaattctcctgcatttttacataaactaaatgtgaggtttgttactggtatttttttcacgtgcctgagaccagcctggtaccaggaccttttgttcacagcgtgcagcagcgagccggctgcagtgtgtctcccctggcctcgccttctgcaaaccaccgcagccaccacagcgtcagggtggagatctgggtttctagacctcactgaacacactggaatggctgagtttaacttatttaggcattcatcttggagatgtggtttttcgggttccccagcagcatctcccgacaccaactgtgccgctggctccctgccacctgaagccgagctcctccagagctttctccgcccacctcactgcatcccaagtggagcttttggtgtccagttaggccagcgggagcagtctcctgatttattttgatctcattcttggactcttggacctctctgttcttcaagcatcgtgtcactgtgaaatcctaacgcccctgtgtcctacagaccgacggcacaacagacagctgcccatcccatgccatgctctaccctctgcctctcaccaggagacactctgggcctccaggacaattgctgcttgccggctcttatttttctaagcaatattgtgatggagaaaaataacatatttattgggatttggttttttgggtcttttttttttaagggaacaaaaaatggttaaatgaggtctgctgaagttgacttgaaaacacacttgaccctcaggcaggagggcactgaccacaccccacacaacctcaaagggtcagtgcgtcagtgccttttcttctgaggcaggaaacaggtgccatcttggccacctcggccagggcagcccaccatgctaaaaggaccccaaatggtggtcgttgtcccttctgtgcaggccagcagggccccatctctagtttttccacgtctgtctgaagttcttgcaacaaattctgcatggtccagcgctccagctagctgcctcatcaaaaacactgaataaccaaggactgctgagtttttcttcatggggggtcagctggtctcaaaactggccactgcctcagccaccaagctttttcctaccactaccttataaacctgcctggccctggaggggctctgggacgactttgtctctagcccattaatacaatacatcctatgctttctgtgcagactggtgcttccgcagaaaggagatgccaattctgctatcacagaactccaccagcaactccacccgaccccagcagtggtgcaggacagctgccagcacccacctggccctcctccttttccacagccactcactggggccaccaaaacccagagatggcaggtgtgtgggacagactggaggatgaggacaaaccaaagcctttgttctttcttattgtggagcgtccccttccatcaagcagcctgccctcaagccaaggatcatcccctggaacccagtatgcacccagaggggactcagcttcaaagctgctccaccatgctgggtcccaggcagctttcctctgaaaagcaacctctcctgccacccagatcccatctcaagagctcgcccatgttacgagcatgtaaaggactgacttcctagtaactgttgcagtttacaacctgccctccagggacacgtctccatggtttttcctacacatgaatgcgagaaatggctgataagcacagtaatttaagattgcgtattcatgtagtgagatttagtcattaaccaacccggtctttgtgatgtgtgaagccttcccttcagttatgtcccatttttatgatgccaaaagctgccactgtgtggtattcgaggattattgcaacaaagccagtagttaaaccaaactacagtctcagcctgtcattctctagaacacatccaggtgtcggagctaaggtgttcagctcggctgtgactatacagaaccaggcctggcgttgcttccgcaccggtagcagttgtggatgtcagtgtgcataagcaagtatcagacctcagaatgtttgagttattttgtcttagatatctgtttttaaatggataatgtatttgtcctttaaacctcagttttgcaatatgtttcacagcttgtctcctttcaactaactgggtaccctaccccacccgtcacccactgacagcaaaacctcaaccctgggcctacagacacagaatgaacctgcacaggtaggttttcattatttatttatgacaaatattccacatctgtgattctctccagtcaaaagttcctagaaccaggggaaaaggacaacgttaagaccacgcctctggagcagtcctagtccactcactctgcccaaatgtgagcccccaaccttactttgagacgatgccatcggccttggccaatcggagaatggaatcatctgactcacccttaagaaaaaaaaaaaagcacactaagaatatttccactccggctgcctgagatggcagaaggtcagctgtgccaccagcccacgtctctcccccgctgagcgaatggagacaggcgcagaaggggagccacctctcccggggcagcctgcagcctgactatggtggagcggggtcgggggggcacctcctagtgagaggcagagtctgctgcctgagtgtcttctcagagcacccctcttccaccctcaagaagcggcaggcggccagcccagtccagctggctcaaactactctgccagcagatctactcaggcaccatcacacactccaatgcgcacggtaaagtccacgatgtcccgaagtgatgagcaaagcccagggaaacactcaccatcctacgaatggccccgcagatagcataagttttaaactggccattaaacctgcctgtgaccttgtcaacctagaaagagaagaagggtcacaaaccactcccccaggtttgggaaacaccaatcctcaaagccagcctctgcctgtaccttcaccccaggggctcctccacaatgggacagcctgcctttcccgcacatatatcacaaccttcccgcctcccgggctcccagctcacctcggccacgttcatctggatggatgcgtggtccttggcaccgatgatgcgattgctagcggagctgtggagaaagggcgcagtgagcagaggggacttgggcggtaagaatgaaagaggggacgagggaggttgggggtatatgaatggaaaagagtaacgtcgggggcaggacaagttagggacgtgacgaggtaaggacgggaggggtgtgggggaacaagggcaggcgaggggacgtggtggttaggtaaggacggaagagaggcatgtggggggcgcttaccatttccgcggcacgtacaggtccacgaactcgccggcgtcgttctgcatttcgaggctgggctgcgcctggggagtcaccgcgcggcgccgtgagtacggccggaaccgtgccccggctcccggcgcaaaccggcccctagggtcacggccccagccgcacccagcaccccgcaccccgtcccccgcgtccaagcccccactcccgccccagccccagccctgagcccgaagcccgcgccgcgcgccacacctgctgccaccacaccgcgcgcgagagagaaaggaagcagctagtcacccggcagagatatcggcgggcaaggaggggcctcggcgag

SEQ ID NO: 11790 - DNA, 683 bp, Homo sapiens
cgcacttccgcttccggcaaggaggttctcggaccccagcctgctggccctggggcgcggggcgtcgtgggggtcgttgtcgttgagggtcgttgccgtgtgtggcgtcttagcctggcccctgggttgtgccccacggacgcagtcgacccctctgagcgcctcgggagccccgaatagcagctgggagaaggggcgaggactgagcctcgctgcccgctgccggccgggctagagatacgggcgtgccccccattgtgcgcctcccgccctccggtcccctcaccctgcggccacctggggcgtggggcggtgctcctgcccgtgcacgtagccgctgcgagcggaggcctgctcacctggtgcctgctactcactcccccgggccggtgggcgaaggacacccgcaggaactcggcagaggagaaattcagacggctcccgagggtaggaaaagaccccggcccaccgtggaatctgaaacacccgaccactctgccatcccatgtttcaccagtcagacccccagggcagggcaggggaagcagaatgcaaactggggcaccgtttccctgaagcgtgttggccgcgtttgtcgtagtgctagaggtgcatacccttggaccccgaaaacccattcctgggaatttgctccaaggaagtaaagatgttacaaagatgga

SEQ ID NO: 11791 - DNA, 131 bp, Homo sapiens
gtggtggcgggcgcctgtagtcccagctactcgggaggctgaggcaggagaattgcttgaactcaggaggcggaggttgcagtgagcagagatcgcgccactgcactccagcctggcgacagagtgagact

SEQ ID NO: 11792 - DNA, 184 bp, Homo sapiens; identical to SEQ ID NO: 5421

SEQ ID NO: 11793 - DNA, 143 bp, Homo sapiens; identical to SEQ ID NO: 5446

SEQ ID NO: 11794 - DNA, 1405 bp, Homo sapiens
cacccctcgagtccactgttatttccttcactttcaataggctgtcattaaattctccttccccattatcagtgccactgcttcttctcttccatgttcacagtcttacttttagagctgtttagtcatcctacctatgctggtttctccatagcctttgaattctgtgtttgatacttttgaacagaacatctaaaagctccctttctgtattccaacactcatagggtgattctcattaagaaaacaaaaccaaaaattgagctcagactaaaggaattcttttttgactaaatagtgattaagttatgatattcctgttggcctaagaacaatgcctatgatttagttgtgttatgtatatttgtacttataaccaaacaatcgattgggtacaagtagccttagggcaatacttccttaaaaacatgtttctgataaactaaagctttagcattaaccagaagtcataatttaatagtattgtaaaaatacctcatttattttaaatcctgtgttgggtagaggattacagttgtcatttcaaatacatgaatctcttgtcaaaagagtactttgacagtttcatggtaagaccccttcatatactacctcaaggagtgagatttttattgtgcatgttgtttggatgtatggggttggagaggtaggttgagcctaaaatttcctaattactttactcttttacgtgtttcttattgcaaaggcaagaaattgttttcaagtttgtcattactaataacaaagagatctttttgttttttggcagtggtgaggatgagattgatggagttgctgctttagcttattggaggtgtggatcattttattttttgtgtttgaccggtcaagtgacttagtgagaagggggaagtagtagaacaaggagttccatctgtaactgtgaacagtcaattgtgataactcactacctttagaccagtcaataattattttaaagcctgggattatacaatatttgtttaactatggtatcaatttgtaacttaaattcatctcaattctttgtcctaagcagctctcagtttcattttttttgtttgctgtagaagaaaatattaagccaggctgggcacggtggctcacgcctgtaatcccagcactttgggaggccgaggcaggcggatcacgaggtcaagagattgagaccatcctggccaacatggtgaaaaccggtctctactaaaatacaaaaattagttgggtgtggtggcgcacgcctgtagtcccagctactcgggaggctgaggcaggagagtggcgtgaacctgggaggcggaggttgcagtgagccgagatggcgccactgcactccagcctggcgacagagtgagactctgtctaaaaaaaaaaaaaaaggaaa

SEQ ID NO: 11795 - DNA, 153 bp, Homo sapiens; identical to SEQ ID NO: 5246

SEQ ID NO: 11796 - DNA, 1406 bp, Homo sapiens
cacccctcgagtccactgttatttccttcactttcaataggctgtcattaaattctccttccccattatcagtgccactgcttcttctcttccatgttcacagtcttacttttagagctgtttagtcatcctacctatgctggtttctccatagcctttgaattctgtgtttgatacttttgaacagaacatctaaaagctccctttctgtattccaacactcatagggtgattctcattaagaaaacaaaaccaaaaattgagctcagactaaaggaattcttttttgactaaatagtgattaagttatgatattcctgttggcctaagaacaatgcctatgatttagttgtgttatgtatatttgtacttataaccaaacaatcgattgggtacaagtagccttagggcaatacttccttaaaaacatgtttctgataaactaaagctttagcattaaccagaagtcataatttaatagtattgtaaaaatacctcatttattttaaatcctgtgttgggtagaggattacagttgtcatttcaaatacatgaatctcttgtcaaaagagtactttgacagtttcatggtaagaccccttcatatactacctcaaggagtgagatttttattgtgcatgttgtttggatgtatggggttggagaggtaggttgagcctaaaatttcctaattactttactcttttacgtgtttcttattgcaaaggcaagaaattgttttcaagtttgtcattactaataacaaagagatctttttgttttttggcagtggtgaggatgagattgatggagttgctgctttagcttattggaggtgtggatcattttattttttgtgtttgaccggtcaagtgacttagtgagaagggggaagtagtagaacaaggagttccatctgtaactgtgaacagtcaattgtgataactcactacctttagaccagtcaataattattttaaagcctgggattatacaatatttgtttaactatggtatcaatttgtaacttaaattcatctcaattctttgtcctaagcagctctcagtttcattttttttgtttgctgtagaagaaaatattaagccaggctgggcacggctggctcacgcctgtaatcccagcactttgggaggccgaggcaggcggatcacgaggtcaagagattgagaccatcctggccaacatggtgaaaaccggtctctactaaaatacaaaaattagttgggtgtggtggcgcacgcctgtagtcccagctactcgggaggctgaggcaggagagtggcgtgaacctgggaggcggaggttgcagtgagccgagatggcgccactgcactccagcctggcgacagagtgagactctgtctaaaaaaaaaaaaaaaggaaa

SEQ ID NO: 11797 - DNA, 193 bp, Homo sapiens; identical to SEQ ID NO: 5539

SEQ ID NO: 11798 - DNA, 153 bp, Homo sapiens; identical to SEQ ID NO: 5573

SEQ ID NO: 11799 - DNA, 150 bp, Homo sapiens; identical to SEQ ID NO: 5248

SEQ ID NO: 11800 - DNA, 142 bp, Homo sapiens; identical to SEQ ID NO: 5249

SEQ ID NO: 11801 - DNA, 268 bp, Homo sapiens; identical to SEQ ID NO: 5616

SEQ ID NO: 11802 - DNA, 1548 bp, Homo sapiens; identical to SEQ ID NO: 5628

SEQ ID NO: 11803 - DNA, 4704 bp, Homo sapiens; identical to SEQ ID NO: 5253

SEQ ID NO: 11804 - DNA, 578 bp, Homo sapiens
caggaactcaaatgcttccacatctccctctctctggttctcttttatgcctctcatgttccgtccgttcattctcttgctctacagattggcttcctccatctgatagtggaacatggttgtcaaaactcacaaatttcacatcttgcaacattcaccatcagtgaggtgtttacttactttgagtttgaaaaattgagggaaaggctctgagtggccttgcatgggttagatgcccatctctggaccaatcagctatggccaggggtacaatctttaagaatataggctgggcacggtggctcatgcctacaatcccaacactttgggaggctgaggtgggaggatcgcttgagttcaggagttcgagaccagcctggccaacataggaaaaccccgactctactaaaaacacacacacaaatgagctgggcatggtggtgcatgcctgtaggaggctgaggcaggagagtcacttgaacctgggaggcagaagttgtattgagctgagattgcaccactgtactccagcctggataacagagtgaaactccatctcaaaaagaaaaaaaatatat

SEQ ID NO: 11805 - DNA, 144 bp, Homo sapiens
tttttgagacagagtttcgctcttgttgcccaggctggagtgcaaccgcatgatcttggctcactgcaacctccacctcccgggttcaagtgattctcctgcctcagcctcctgagtagctgggattacaggcacccgccacca

SEQ ID NO: 11806 - DNA, 719 bp, Homo sapiens
ctgcacatctcggcagagcgggcgctgaccctaccggccatgatggggctggcggcggggggtgggctcctgctgctggccatcacagccgtgctggtggcgtacaagcgcaagactcaggacgcggaccgtaccctcaagcgtctgcagctgcagatggacaacctggagtcccgtgtggccctggagtgcaaggaaggtgcctgaggcggggcgggatgtggtgtggaagctggggacctccctcctgcccactcattccctctctccaccccccagcttttgcagagctgcagacggacatcaatgagctgactaaccacatggacgaggtgcagatccccttcctggactaccggacttacgccgtgcgcgtgctcttcccgggcatcgaggcccacccggtgctcaaggagctggatgtgagcctctgcctggcctgccccccaccattcccttcagggccgcccccaccctctgagacctcctgctccccacagacgccacccaacgtggagaaggccctgcgcctcttcgggcagctgctgcacagccgcgcgttcgtgcttaccttcatccacacgctggaggcccagagcagcttctccatgcgcgaccgcggcaccgtggcctcgctcaccatggtggccctgcagagccggctcgactatgccacggggctgctcaagcaactgctggccgacctcatcgagaagaac

SEQ ID NO: 11807 - DNA, 340 bp, Homo sapiens
aacatggccaactctttcaccttcacccgctccctcagccgctacggtaggtgtcctcagtgtggtggccatgtgcccttcgagggaacccccacttccaagtgccatcgattctgtagagtgtagacggagggtcggccagcgagggcagatgggtccccacatgctgctgagctcccgggagagtggggcaggggccaggtggtggcctaagggtcacatgcattctctgctccagagagcttgctccgcacggccagcagccctgatagcctccgctcacgggcacccatgattacgcctgaccaggagacaggcaccaaattgtggcgacctggtg

SEQ ID NO: 11808 - DNA, 4094 bp, Homo sapiens
tgaggctcaggagagctgggaacgactttcagatggtgggaaggctggtccagaggagcctggggacagccctcccctgagacaccgcccccggggccctccgccgccttccctcttcggggaccagcctgacctcacctgcttaattgacaccaacttttcagcgcagcctcggtcctcacagcccactcagcccgagccccggcaccgggcggtctgtggccgctctcgggactccccaggctatgacttcagctgcctggtgcagcgggtgtaccaggaggaggggctggcggccgtctgcacaccagccctgcgcccaccctcgcctgggccggtgctgtcccaggcccctgaggacgagggtggctcccccgagaaaggctccccttccctcgcctgggcccccagtgccgagggttccatctggagcttggagctgcagggcaacctcatcgtggtggggcggagcagcggccggctggaggtgggcagaggggctaaaggtgggcagagcggctgtccgccccggggattgtgggcctttctggctggcaggtgctcacagcctctggactcgtaggtgtgggacgccattgaaggggtgctgtgctgcagcagcgaggaggtctcctcaggcattaccgctctggtgttcttggacaaaaggtgagcgtggcctgcctcagccccagatgtccccagcctttgttggctaggccatactctcttgagtcttgagttctggttctcttcaactgctgtactgtatgattcgattgaccttcttggtgcccagctccacacctgtgagcagagggcagtccacttggatgggaaggtaacaattaaaagcgttaggggtggccgggcgcggtggctcacgcctgtaatcccagcactttgggaggccgaggcgggcggatcacgaggtcaggagatcgagaccatcccggctaaaacggtgaaaccccgtctctactaaaaatacaaaaaattagccgggcgtagtggcgggcgcctgtagtcccagctacttgggaggctgaggcaggagaatggcgtgaacccgggaggcggagcttgcagtgagccgagatcccgccactgcactccagcctgggcgacagagcgagactccgtctcaaaaaaaaaaaaaaaaaaaaaaaaaaaaagcgttaggggtgtgacgtgcttggaatagggcatggcacatggtgacctcccagggccttaagcagtgacagtggggagtgatatactcctatcctttctcgcccttctcaatgaagccagtttctctgattagcttgtcaatattgagcctttggggtatcttggttgcatttttagttacagagtgcgcttgcagaaccctctcttctccttggccgctggcagctgttctctgctctccctgcctctgtcgtgcttggcctcctcagcaagcctgttggctgtgggcgtccccagtactccgtctgcatgcacactccttggggagtctcagccacctgggttctggccccacctccaagctggtgaacctgggtctccacccagtggccaggtgccttctgccggacgcctttgcctgcctgtcccacactggctcctcctccaaggctccttgactgttggtggcagcaccatctgacctagagctggagtctttttccttggggagggggcgtcccttgcccttagtgatgttgatttctgccagtgggctgctgccgtcattcctgtcaccacaggttctgcatgggctttggctgacatcctcccctccagcctggccaatttcaccaggcccctccatgcttcttggaaattctcctttgctgcttgttttagctttaaggaaagccccgatgtctcaacctgaccatcagggttcctggtgactgtggtctctccttgtccacccacttccaatcataaaactggcttccccagctctggtgcaggcccttcaaattcatgggcagaggttgtaggcagacatgcattgcctttccctgcagtaagattttgaaccccatctgctttgaggctttggggttactgggcaaatatacccatccctgcctgtcagactgtacctaggaattttggagagcaaagaaaatccttgtttctttatggaaaaaggaattgatgtgagctgtgcttgggttgaagctgcttttatgtggagaatgcaggcttccgcaacacccaacatagcccaccctgcatcctgtttcccctcagcagccctcccttcagctccaggctacatggagccctctgcttgtttttaatttacaaacttacgtgatattcaccaggtaccaccttacacgttagctcacttgattctcatgaccaccctgtgaggtgggtactcttatccccattttacggatgaagaaactgaggcacaaggtggttaatatttggagttgccctctggctccagcatctgttctggcaccatgtgctttcctcttggccatgtccctcctgtgccttcttgaactggcccttaactctcatgtccacatgctcagccccagggctggggctctaagggagaggcccctggcagctgttcttctcttccaggattgtggctgcacggctcaacggttcccttgatttcttctccttggagacccacactgccctcagccccctgcagtttagaggtcggagggcctggggtgggcaggtgttcacacttggtgggacgggcaggggccgtctacccattgctttctcagagattcttcacttggccttttgtcctcagggaccccagggcggggcagttcccctgcctctccagtgtacagcagcagcgacacagtggcctgtcacctgacccacacagtgccctgtgcacaccaaaaacccatcacagccctgaaagccgctgctgggcgcttggtgactgggagccaagaccacacactgagagtgagtattgtcttgtctcttgggtgctggagtggcccggcacggggtgggagcctgatgcattcgtcagggagaggctggaagagtcctgatgaagaacagagggcatttcccagccaaagtataacttggaaaatcccagagaccagaacctgaggcccatccctgtcccaggtgttccgtctggaggactcgtgctgcctcttcacccttcagggccactcaggggccatcacgaccgtgtacattgaccaggtaagcggcctgcaggtggggtagggggtacagagtctgtggcccatgtttgctgactcctgggagctggtccccaggggccttccaggaagcagtcagggccccacccactggggcacagggacaccactgttgacagaggtattacaccatggtgaccccactcccctggcctgtttccccagaccatggtgctggccagtggaggacaagatggggccatctgcctgtgggatgtactgactggcagccgggtcagccatgtgtttgctcaccgtggggatgtcacctcccttacctgtaccacctcctgtgtcatcagcagtggcctggatgacctcatcagcatctgggaccgcagcacaggcatcaagttctactccattcagcaggtagaggggatggggatcataggattcttgggattttagggaaggactcaggactgagcttgtcatgtccttgcctccaggacctgggctgtggtgcaagcttgggtgtcatctcagacaacctgctggtgactggcggccagggctgtgtctccttttgggacctaaactacggggacctgttacagacagtctacctggggaagaacagtgaggcccagcctgcccgccagatcctggtgctggacaacgctgccattgtctgcaactttggcagtgagctcagcctggtgtatgtgccctctgtgctggagaagctggactgagcgcagggcctccttgcccaggcaggaggctggggtgctgtgtgggggccaatgcactgaacctggacttgggggaaagagccgagtatcttccagccgctgcctcctgactgtaataatattaaacttttttaaaaaaccatatcatcatctgtca

SEQ ID NO: 11809 - DNA, 7016 bp, Homo sapiens
ccacagaacagggtggtttattatttcaatagcaaagagctgaaaaatgtcgggtcccataaaggagcagaacctgacccagagcctgcagtacatttccaccccacaggggtgcaggctgggccaggcagggccaaaggcagcagaaatgggagtaagagactgtgcccactgagaagctctgctgggtgtgggcaggtgggcatgagatgatgatgatgtagtgtaaggaccaggtaggcaaaacctgttcaggtcttgttgagtgtccagagtggatccagaaggctgagggggtcgtcagagggccgggtggcccgcagcccttgcccgttatgggcctgcagaaagttatgcttgctcatccgctgtttgccccgcagggagctgtccagggagaaggcctctggggtcaaggaggccagcaattccagggaggaggaggggggccccgagctgggggcttcaggcactggcggctcctccttaggctggggagcctcaggtagtggggaggaaagggggggcggggaggaagatgggattggggtagactctgggaggctggctggcgggaggcctgggggctctgcagggcctggcaagctggcaaccggggactccaaccccccaggaggccgaatgctgagcttggcaatggtggcctggatggagctgatgggcacatccccaccgaggaccaggtcctgggagtcctgaggaaggtggttctgagaagacagagtgagtgaggagagggagtcccaaggctgtggctctcccagcagcttccacggaaccttcctcaccttctggctgatgcttgcactggccaagggtttgcatggaggaggcacaccatggcgctgcaggacctgctccacgtgtctcaccactgcctcatagcagaacctgaggtgcagctgcacaggtgcatttggccaggtcagctgggcaggggcccgtcaccctgggacagaaggcccatcccagccccatctgcccagatcctcaccttctcctgcagcatgtgctttctctgctgccgcatgcgccgcaccagctgaggcagctcagggattccgttcccagcctccacctcctgcacagctgcatagagcagtgcaaaggctcccgtgcggcccacaccagagctgtgccaagaaggggttatgaggccggggtatgaggctaggccaagagcccatagaggagagaccctcaggcccaccctctacctgcagtgcacaatgatgggcgtgtgcagcggccgctgatgcaggtaatgtgcgtgcacctcctggatgaagcgcagcaagttgctggggctgtcgggcaggcctctgtgggacaggatggggccaggaagagcctatgagccaggcctgacctgaggctctcatccctcccagcaccaaggactggacagcacttagacccccaaccaccatccagagcagtggactcacaactcaggccaagtggggaagtgcaggtgcacaagagagcgcttgaggctctggtctcggaactgcaggctcagcacgcgctccacatgggtttcggtgctgcggacgctgctcaatgccaggctcagggcaccgtgcaccatgggctggcccctctcggtggggaagtagcgtgccactttttgctgagggacagataagccaagacagacctggttttccaggatcccctgccctgccaccccacactgccctcgtgggcacccaccccctcttctcaccttctccatctcagcctcagaaaccagcatgacaatgactgacactttctgctcatggaccatgagccagaagtcagcagctgtgccaggcagtggggcctgggttgccactagcggggggcagtatggggagagcccctccacgcagctggcattgatgtagtcatccttgcctgagcgcagcaccacacggttactgtcatagggcatgacatcctggtgccggttcttcagtgagtagcagcgggcaatggcgatggaacggcctcgggcatcatgttcctgcgcatcttgcagctctcgccagacagtgtccagagctcccacatcccccagctgaccccgaaaggcctccagctcctgctgcaactgccgcagcctctcaggatgctcataggggtcccgctcaatcagccgcagggcctgcggccgacgaccctcagctgcatccaccttggtgggctgcagcaggggctgcccacccccaggagactgagtgccgccatgctggctctccgggctggaggagagcaggtctgcagctgcggcgcctcggcgcaggcaagggggtggttctgctgctggggggcgagggggtaccggaccaggccctggagatggggcaggtgaaggcaccaggtggggactaggggtggactggccagcagacgagggccctcgaatggtaagaggggctgcctgggggcccatgggtctggtagaaggggcaggaccatatgccagtgggggatggggaggctgagggggcccagggctggggaaaggcagagcccctgagtgggctggcagagggtcttgagcgggacctgggtagagctgggtgtgtagggggggtggcggctgccccaggaccccaggctgaggggcataggggtagggggattgtgggggtaggagtcctggggcctggggtgggaagagatgtggatgctggagtggaaggggctgctgtgggggctgaggcccaaacgcttgtgaaggatggggctgaggatggggctggggctggggcccaatccttggggctggaaaacctgcggggatcccagaagagaagtggtgctgtgccgggatgggttgcttagcccctgcagggtaggtgtaaggcgtgggcagtggctgcggtgggggcacagggaagcagggcgggggaggagcaggggtggggtttggccgtggggctgtgtggctggggatgggcgcctggatgctatctactgtggtggtggctggccgaaccgccatggccaactcggggcctgagaattgaggaggtggggccgaggggagacctgcaactggtggggccggccctacccccacatagggactgctcaccacgccatgctgtggggaggatcggggcacaaggcccagctccggtgtgtaggcaggggctgggtagagggcaggcccaggtgctacgggcattgcatggggccctggggccctgggctgtatcagctgggtggggcccgagtaggtaccagggggcaaggggcctgagagatagtggggtcctgggcctgtggagctggggaaggggctgggaggaaagtggagcggggtggcacttcccaggaaggtgtcaggcagtcgtgggccagccaccatgtcaggggggaggctgcgcagctcctcaggggggtctcctgcttccactgcctcactctcctccctgcggggcagcagcggctttggggctgtgggccgtggcggcggcttcttcttcagctccctgtgcgacaggcaaggaaaaagtggggccaggctcccatcaccccagcctgtctggacccgagccgcaccacagccccagggccacacaaacctgtccaggagctgctggcgggcagcctcgcgggcctggcaggtggactgcgtgcgctccagcagagcagccaccttgctctccagatctgcgtagaagtccctgccctcctgcgacttcttcatcaggtcctcataggcttcatacgaggccaccagggtctgcagcgtggagttccacctggtgggcagaagggccagctccaggtgaaccatggggctgggctccaggtggctccgggaaagagcagaggactgggcactgacttttggtccaagtcgctgagtacccgccgcacggctgcgtactgcacgttggcctctgtcagtgcacagaggacacggtcctgggcggccaggttctgctccaggtacaccttcagctggtcatactttttcagctgctcctcgaacaacttctgaggaaggggtgggggccagggacggacactcagggcctcgactcctaagggtggggcccggagccagagcccctctaccctgctcacccagcccaccttcatctctgagtggtctgtggtgaccagcgaggcagtgatgtcatctttctggataagctcacgcagctgctgctccagggacacgcgctggtcccgcatctcctgcaccttagccaggatgcgctttaggttttgcagcacggccttgtcctctgtgggcagcagtggtcagtgaggccagagaaacccccagctcgagtctcccaatggggtctggtggggctcacctggggagagggccggtgtgggcagggcagcccggacctggtcaagcggcccgctgagcaggcgcaggttgccgacgtgcaggttcatggcacggtgcagctcactgttggtgaaggaggccttctcatggacttccatgtacttggcccattctcgcctcacctctgccagctcagccttggaggtgatggagatggcccctgcctggcccaccgcctcctgaaacttctgctctagcagctcatcctcctccaacagatctctgatgtccttcagggaagcctccacatccgtgaacacacctgacagcactggggttgtggattgtacaggcagcccctgaggcaggctgaccgggcacccatgggcccctcccccaagagacagaaccgccccctcaggtcagggcttaagtgaggcccagcgcacactgagcagggtgcaagaggtatgctgattcagaggagtgggtgtggatgcccaagccagggcctagaggggtgcagcctccatcctcagtgaccagggacacggaggaggccacagcagatgacctccacactcccttccacctgcttgctctgccccttactcaccttgcatggactgtacaaggttcctgacagtgtcgggccggacgctgagagccgcgcacttctccatgagctggggtgggatgtggctgtaggcatcaaggttgtccaccgtctcgggatccaactgcattgaatccatgaactggctgtggggagcaacagggccaggtgggtgctgggtgctgatccaactctgaccatgtcaaaggagccgctagggcaagcctcaccactcaatctgaggtctcagcagagagcaaattgtgacctcggacccctactaccaggtctggcctggtctcacagaacatgcccagggcactgctggaaacagtggaacagaaggcacctcctcctcccaagacatgactcctgccttacacactagccccaccaccccaggcgggaaggcagcattgggaaacctgtttggaatggacatttcattcctctcccagcataggcagccctggggcccccagaggcccgggaagtgctgcctgcctccgcctccctgcccaagtcccacactcactccaggacctcattcttgtcctcaatcttggccatcatctcccggagcagcttggccttctcctcactgcagaagcgacagagcatttgctgaagacccacatctcaagacaccccacctccctctgtgccaccctccacccacctgtacagtgacgaggcctcgtgggcagccatgggtaccagtttggcaaagatgtcagggcctgtaacagctgggtctgtggggttcactggcaagggcttcaccaagggggctcctgggggggtgggaattgtggagatcaggcccacgcagagtccttgaggcagcctcctgtgtcctgtccccaccccaccgtcacctctgcccccacctctcagctccccgaccttttacaggctgaagagtgtccaatgctgggacagcctcatggtaaatgaagtcgttgtccttcttggcagaattgtacctggggatcaggagcagggggagtgggcagtcacggggtgtcagtggggatccagaacctacttcccatgtagatgccagcagagggacaagacccttcacaaaaagagggaaccagggccacccccacagactcactttcccccaatgacatccatagtgaagcgaagcgcgtcttgcacagtgtcaggctggccctgtggggttagggacaggggtggggccttagcactaaccaaggctggcaccaggacaccccctcagtcctaccgggcttgctcctataccctcagggcagccaggccttcctcagctttaccttggccaacttgatggcttcattgagcttgtccagggcgctctggaagtatgcaacctgtggagggtggcaggaaagcctgctctgtcctcctctgcttggaccctttctcctcctgcctcccacccggccctgcctgtccatcagatgacaagcagctcaggaggcagccgggcaccaccccagccaacagcagcaaggtggcgccacaccctgccccagccacctgctctgtagggagcctgccccacctcctcagaccccgagggacgagggctgcacagatgggacaacacttaagacaccaggcctccagcagggtgatggccagggtgagacagagaaggccaccccctggtgtgtaaggagcgggagcacaccggcatctcactgaaggctgccattggtccccagtcccctcctcgctgtagctcacccgctccccgaacttctgctgctcctcggcctgctttcccatgtgcagctgggaaagaagaagagacgccacgacttgcttcctgagctgtggccactcagccccgccctgccccgccctggggccccaggccctcacatgagccacggctgcgaagtagtagatcttcatctgcacaagtttcttccagtccttctggatccggcccagcagtgaggcagtgtcggggttctccaaggcccggcatgcctccttgtagtaatctaccacctgagaacagggtggggcccaatgagtgggggagtcagcagtaaagtgaaggcctcccct

SEQ ID NO: 11810 - DNA, 7279 bp, Homo sapiens
aacagaggaggcatacaatgacttcaggcaaagcagaaccttttgactcacacaacattatattattttgtcagctttatattttatgaaacatttttactatgagtgaggcaagagaaagaaaaaggaagagacagcatttggttatattacatcatttctaaaatctaatttcctggagtgagaatgacactaagggtacctacgagaacattccttcccatgtaaactaatagtgtaataaatactcatatagttactagttttagttgccaaacctagtttgtaaatggtaaatttgagaccagaactatattcttatgactatcagaccactgatagtttcactaagtcaactcccttcactaacaatttgattctacacacacacacacacacacacacaccagtttcaacaattttctcataagctttaaatcaaattgatgagagaactttccctgtttttctgtcataaactacattatctgataaagttcatactatttttacatacatagattatttaacatactttgcctctcttgctgcagagaactttgcttaagatatacagctgatctattctaatttcatgattatctatttatatttatttgttgttattgttgcttgaacactagttttcgagcagttttagagatgataccacttttacactgtttttctctgtaattttagttccttatggttcctggtataaacatgtaaaatcttggtgggaaaagggaaagagtccacgtgtactatttcttttctacgaagacctgaaagaggtgaggaactgggaacacataagcaacttggtaatttctaagatgttagcatttgaaaatactctggatacaaaaatattcctttaaataaatgatgacagccatctcgtaaatttttaaaaggaaaggaccaaaataatacagatactttagcatagatttgaagctagcaaataaaaatattctgaaaataaatacattttaaaccacaagtctcaaaaatttcaaagaaaaaatttgaaagaacttgacttcatgaatcaataacacacacacataggcacacacacacacacattcacacacaaggaatcaacatgggcaagcaattaactggtctgcaaatgtagagatgttgcaattgttagataggtcctataaaataaccatgcttaatatgtttaaataaataaaagatgaaattttaaaaattacaaagaaacaaaaactattaaaattgacagagcagatttgaaaaaaaatagccaaatacaatttctaaaaataactaaaaaaatatgaaaaattaagagatgggttcaataatagattagacatggctacatagtgaattattgaagtaaaagatggagctaaggaaattctatagaatgtagcacagtgagataaataggctatttgatgaaaagtaatggttcttactaagtattagcatttaaaaaataaaaatgtttttggtatataagatacagtgataatgtctcacatatatcaactcaaacttccagaagaagagtgtaaagagaatgctaaaatatcaatacacaaattttttatggccttaaaattttcttataatctaatttttcttcagctttattgttagtgtaattcaaaataaaaatcactatgagatacctgttttacacccactacactgataacaatttaaatatctgacaataacaaatattagaatgtgaatcagtgaaaagtaacacactgttgattgtagtgtagaaagatacaaacactggaaacaacttgtcattatctagcaaaggcaaacatgcacatagtttaagaccctgaaattctactcttagacatatactctagaaaaactctgacttgtgtacattaggttagatattcaataattttcatagtagcattcttaataactgcaaaaattgaaaacaacccagatatatataccaaagaatccatatataatgtattttattgtattacaattagatattatattataatgaaaggaagtacactaaaaatacacatcagctaggtaaaatcaaactatatgttgtctagagattcatacctaagtttgaaacctataaagtagagaagataataatttgaaattagcagtttttttccttttcttttcttttttttttttttttgattgttttgtttatgtgggatgggagtagaggtgaagggaactcaaaagaaaaaaaaactaagaaaactgtgaatgttctatttcataagttaagtagtaggtaataggtgctgtatatagttttcctctttaaatgagatatatacatatatctcataatttttaaaacatagaaaacataatgagtttctttattaagaggtgagaaattttctctattttcttatcctttactatcaccaaaaaagcaattgatatccatgtcttattcatatatttgaataacctttaaaatcctttatggtatttcagtaattttagagtgtttttggtgagcatttatttaaaataaaatcataaataatattttataaattaaattatgtatttatagaatttaacactagatcaaatttgaataagaaaagcagtcatgatctacagtttattatattatccaatactgtgttctgtaattagactattaatgacagtgaatttgaaatacacacaaacaaaattaaatagttactccaactctcttcctccatttcaaattgtccatgtctacttactcccgattttggtcaataatagccatgtttaggtttcctctatatttgaattaataaggctaagaatgtacaaattaatttttatttgtttctacaatgtatccagtagaaagaaatcaagacattatcactatatatatacacatatgtctgtatatataaaataagattttgtgtatatattatatatatatacacatacatgtgagatgcctattttgcacccatatatacatataatcttttttcttgtgtcttgaagcatcatctttttttaatttcaatttttaatttttatgggtacatagtaggtgtatatatttatggggtacatgacatatttttatataggccaccatgcgtaataatcacatcaaggtaaatgaggtattcatcacctaaagcatttatcatttcttcatgttacaaacattccaatgatagtttttaattattttaaaatgtacaataaattattgtctactgtagtcaccatgatatactatcaaatactaaatcattctatctagctctatttttgtacttattaactatccccacttctcttttgagtaagatagacaagtaaataaaacattacaaaaatacacatgtggtaaattagatttatttaaacaattatgggagcaaaacagggtcatctacccaaaattagaatagccaaggatattatcctaaataagttgataaataagctgaaatcgaaaaggcaaactacaatttattgagcagagaatttagaaacagcatttgattggcatagagagaaatgtgcacttgaatacacattgcggttagtattgcaaatagttgcactgagagatatagctgaataatggtgtatattataggagtggcacagatatggggatgtttgtagctatggtgtacagacaactgatgttgcattgtgagtatttgactttttacaccttttcttaatctttcttgtttctttgtttctcactaattacaccaataaattaggagaaaaatgaaaattgcctgtatatctttatcccccaaacttgatttttcacaggggactttaggttttgagtatgatgtttgttttcatagacaacatctattaagtgtgattatgcatcaaggactacaataagcattcacaaacatctcatttagttttttgaataatcttaaagtatcttttataagcattttatggatgaggaaaattatacttaaaacagcttttataaaattcccccaattagatttctcattagaaatctaattctaatatcagtaggagaaaagagaaaggtttattttttctctttcatttagatagtgatttattcagttttagcaatttagttctcaaaacattttctctccctaggatatcagaaaagaggtgataaaattgatacatttcctggaaaggaagccatcagaggagcttgtggacaggattatacatcatacttcgttccaagagatgaagaacaatccatccacaaattacacaacactgccagacgaaattatgaaccagaaattgtcgcccttcatgagaaagggtgagaaaaatgtggtttgcctcgatactagaggaagtcacaaggtgacatggttataggcaaaaatctagtgaggtattttaatgcctatgaacccagcttaagttttcttcagcagtctttcatatttgaatacactctttaagttacacttctattacattgcaattacctgttgattatttattatatgcatcatattatgttaaaataactagcagactcctcaatctcagcattggaaatagtatcacactctactagctgtaatttaccaagcctatgtgcctcagtgttacaacatgtatcatatagttcctttaagttctaaccagaaattccgcagaaagattttattcctctctctttttgagttgaagaaataagtttagaatagtttgtcaacattttttaacaagtggcaaacacctttcaagggtaagtggcaaaaaatagaaattcaaatatagctctgtttagcaaaaaatatcaacatataaggagaaaaaaattctatttgaagggaaacatagcctgatgagatatagccagttaacaaatttaaaggcatgtaagatattcagatattcagagcactgggacaccagtctatttatatatgaggaagcagaaacaaacagaatagaatcaaatcttgctctttgaaccatactgtcagtgagagtcagggaatttgtaaaataacaaacctgccactggggaaaaaaacaaaacagaacagggatccactgaaaagagattcagttctcaaactatattttaattatgtactcttttgattatatgtttcctttttcaaaattctacatataaatgttacagaggacttaaaacagttgtcttgcttgcaaacggtgacttgctgctgtaccctcagaacctatctgatttttttaggatacacatgttctgtcttctggtttttgggttatttcagtgggaaagtttagagctccttgagcaagagggcaagtgaactcttgaatagtttaaaaaagaaggtgggctgggcgcggtggctcacacctgtaatcccagcactttgggaggccgagacgggcggatcatgaggtcaggagatcgagaccatcctggctaacacagtgaaaccctgtctctactgaaaatacaaaaaattagccaggcatggtggcgggcgcctgtagtcccagctactcgggaggctgaggcaggagaatggtgtgaacctgggaggtggagcttgcagtgagcagagatagctgcactgcattccagcctgggtgacagagcgagactctgtctccaaaaaaaaaagaaaaaaaaaaaagatgaattccttctgcaaggtgagtgttggaagtatgttaaaaagcaaaacaggaaaagcctgctggactattataattacccagatgagaaacactctctggctggcagtagcagaagtgtttaagaggcagtagatataaagaaagcctgaatataatgaattagatgttgtggttaagagaataacgtccaagcttatgtgtagatacctggtgttgactctacacaggtcattaaaatgtaaatggagaaaacacaatatgctaaggaataaaatgaatttatttttgaactaattgtatttggaaaatttggacatttttcaggtggcaaaatcatgtaggcagttgtatataaagcataagtctggattttagtgctatcagcattaagatgatatttaacaccttgagagtgggtaaaacatggatcttatcctgggagccccaacagctgagatgaaacttcagaagaaaaataaagtaaatggcataagaagaaagaatcagagaattaaatttgttgtttttttaaaccaattaggacaaatccatctttgtaagcccaaaaaagtatatcattaaaggtatacatttgattcctaaaattgagaattacaagtataatatttgattaggtgttaatgaaagtgatgaaattagcaaacctaatgattctttttggaagacttaatatttattgagctttcttttttgttacaggaattacaggagactggaaaaatcactttacagtagccctgaatgaaaaatttgataaacattatgagcagcaaatgaaggaatctacactgaagtttcgaactgagatctaagaaggtctttctttacttaacatatctgatattaaagatttcttttcattattctccacttttcttatttagattgctagaaagtacataatcatggattatgttgacattttctttttaaattttgtttaactttttttttttttttttgagacagagtctcactctgttgcctaggctggaggacagtggcacaatcatggctgattgcagccttgacctccttgactcaattgatcctcccatctcagcctcccaagtagctaggactacagacatgtgcaaccatgtttggctaatttttttaatgtttttttgtagagatgaggtcttattatattgtccaggctggtcttgaattcctgggctcaagcttcccaagtagctgcaacaacaggcacacaccaccatgctcaactaattttatttctattttttgtatagacaggggcttgctatagtgtccaggctggtctgaaacccttgagctcaagtgatcttcccacaccagcctcccaaaatactgggattacaggcttgagcctccatgcctggcccaggtaacatgtttattgagctgtacatgcatatgagaaataagaaacttttttttcctactatcatctcttaaattttggtttctttttcttttgcttcctcttcttcttttctattttttataaatatcatgcacaactataacctatgggaatgatgtagtaacccagattattcatcttgttagagttgtattaaaaataaacaagcatttcaaatta

SEQ ID NO: 11811 - DNA, 298 bp, Homo sapiens
tttttttttgagacggagtctcactctgtctcccaggctgcagtgcagtggcgtgatctctgctcatgctcactgcaagctccacctcctgggttcccgccattctcctgcctcagccttccaagtagctgggactacaggcggccgccaccacgcccggctaattttttgtatttttagtagagacggggtttcacagtgttagccaggatggtctcgatctcctgacctcgtgatccacccgcctcagcctcccaaagtgctgggattacaggcgtgagccaccgcgcctggccca

SEQ ID NO: 11812 - DNA, 15862 bp, Homo sapiens
cggaagtccctccgcctccactcgccctcgtgctcccttcagccccttcgcagctccgtgcgcaaggtcgtgtcccggaagtgaaggggccatgttgatgggtgacccggggagaggtacccggccagaggcgagtcctgcggagtggtagcgcgcacggcctgcgggtgagtgagagaaggaatgagggccgccggcggctgggcggcggggaggttgcagcgcctcctctcaggctgctgccggcgcctcgcatgcggcccggagtcaggataccagcatgcagccgggggtctcgccccatcccgccctggactttcccctgggagacccctcggctgccccgccccgccccaacctcggagacctccagtgccccgaagcaggcctgccctggcctctgggcctccgcaccccggcccggcccccacggttggtgaagtgcagactggctggggctcagccgcccagtcgcccagcgaccttgtagttacagccctcgccgtgacagtcgccttttacagcatcaaacacttctgttgattttctgcatcgggaggtccttagggccgagggatctcttaaacagttgaggaaaaatgggcagggatggtggcttgctcaagcttgcgcaggaagttagcaaggccggaggctaagggctcgcggactttgggcccaaagtccaatctttttttccagccaaatacttcccccacttggtgtcatttctttatttctgaaacggaggtgatcatttcttccacatagggacgttgtgaaattctctccgttacgcataattttgagccccttgtatgtgccaagcgctgtgctgggaaagttcgtggagcacccagaagtgctgtacacacggtccggctccagcaaagggtaactcattccagaggcaggcagagttggggtcaggagtgcagccctccccttgacagctgtgggcccgcgggcaagttacttccctctgggagattgtttcctccacttaaaatggggtaatgttgacccctagggtagctgacagaatgagttgttatgtgagacatgcttcgaacattgcacgttgtatatagtgcaatataatgcaataagcatttactgttactaagaaccctgaccaccttctagattcttaatttaaatgtggtcatgggcaacaaagcactttacagatatgcttgtgtaagggtttattgttactgaaggaaggcagtggcagtttatacttaaatgtaattatttattgagcatttacaaacctggctaggtgctactaataatatctgctgttgatagagtgcttcgtgtgtgccaagtgctgttctaaacatattcacatacattaaactcatttagtgcttatgccaaccgtatgggcaaaatatgatttttatcctcacttcacagatgaggaactgagacagtcacagagaggttaggagacttgcccacggtcatgcagctcgtaagtgctggtgccaggattcaagtatggctgagtgcttgtcttcaaccctcctagatcaccccctgtggtgaagttctattaccgttcattacgtgcacagttctcaaaataatcctatgtggtaggtactattgccataatatcctaatctccattttataagtgaggaagctggtgctcagcgggggttcagtcctttgcccaaagtcatatggcaagtaagtggcagggccaggatttgagccctggtgaaccacaacctgtatgtttccagaatgggcatccagaggctggggtctctagttctagtcttgccattaagtcatacggtgacctggagcggggggtctctggaacttggattaaaaagccctcacatagtctctacaggtccttttgttattaattctgatactaggcttgtatgtctttccttctgtttatagtgtgacacccagcccctgccagtcccccatggccccgtggagccgagaggcggtgctgagtctctatcgggctctgttgcgccagggccgacagcttcgctacactgatcgagacttctactttgcctccatccgccgtgaattccgaaaaaatcagaagctagaggacgctgaggcccgggagaggcagctggagaagggcctggtctttctcaacggcaaattggggaggatcatttaggatcctccaagggaaagaggacaaaggtgccttctgtagacactcctgctctcttccatccccatcttacagatgtattaagaagcctcaggtacgtaggccctcgttcctgtaggtttccttattttttgttgcaagggaccgagaaaaggatcaaagtcatccttttagtcattagaaatcagtgcagagccaggtgcactggtgtgcacctatagtcccaactctgcaggaggctgaggcaggaggatggcttcagcccaggaggttgaggctgcagtgaggtatgattgcaccactgcactccaggctgggtgacagaatgagaccctgtctctggggtgggggggaaaaaagaggacatttgaggtctgcctcaaatgagaaatagaggtttaccagcagcagggcaggaataagcaaatgcctggagtgggaactgcaattttcttttttaagagacagggttggcccggtgcggtggctcacgcctgtaatcccaccactttaggaggccaaggcaggaggatcacaaggtcaggagttcgagaccagcctggtcagcatggtgaaaccctgtctctaccaaaaatacaaaaaattaggcgggcatggtggcgcatgccttaagtcccagctactcaggaggctgaggcaggagaattgcttgaacccggcacgtggaggttgcagtgaaccaagatcgcgccactgcactccagcctgggtgacagagtgacactccgtctccaaaaaaaaaagagacggggtctcgctctcgcccaacctggagtacagtggcatgatcatagctctctggaaccttgaatgcctggcctcaagcagtcctcccttctcagcctcctgagtagctgggacgccaggcatgtaccaatgtgctcagctaattttttatttatttattttttttgtagagacggtcttgctatgttgcccaggctgctttcaaactcttagcctcaagcgatcctcccacccttgcctcccaaagctttgggattataggttcaaacagctctgcctgtccagaaactgcactttgtagtctggaaacttaagtctgatgtggccagcatggtacccctgtaaggcaaatagccagagttgaggctgggcctggtctggaaggacgttgactccaagttgagattgtaatgtatatcttcttatgtggggaccatcacagctctgtaaacagaggaatgacatagccacatttgtatcgtagagggagcataccagtggcagtgtgaagaataaattgatgagagatactagaggcagtggatgtagccagatcagattgagggaccgaggggtgggggtggccacatataaacacagtgtgtacagcagtgggacttggtgatcagttggctgaggcaggaggaggagagagaaagatgaagagtaactgggtgtaaggcctgccagctgggtggagggtgctgcttttaactgggggagggaaagtaggaagagagccttatgtaatgacttttggttcttctcagccacttaggattggcatatctgcctttggcagtacagggccaggggtggggtgatgcccatgggagcctgtctgcacagggagggttggctagcggatctaggagggaattagggcgttccttgaaatctttgtgttcctaatatattttggctgtgagttgggctacacgctgctatcactaccccctcaaaaaaaccaagaaacaaaacgccgtagagttaatacttcattcccacaacatatactccctatgcatcaaacactgcacaccctggggatgcagcagtgaatgagcccaaatgtcccccagaagcatatggtctgggggttaatggagtggagatgggaacaaggtgtggagcaagtacctaggacccctgtagattagttctccgcaccgcgtgatctcagggttcaaatcttggtcacatactttactgacacagtgaccttgggtcagttacagaaactactcagtttcttcatcctttaaatttgggataatattactgatctcatgggattgttgttgtgaggattgagggaattaataataagtgtaaaattgccagcacataatacacactcaatatctgctacctagtctcgtacatactcaagcaagataggtttataaaaaggcctatggctttttcaattaaaataagttggaactttcacacttctgtgctgtcatcctaggaagccgcaaggcctccattattcatcatccttaactatattagggtgatgagcatttctgttcccatttttgtatctagcgagacaggttaaataacttgcctgaaatattggcagagctgaaattctccatccctagttctgcccaccaggtctgtgttccttctttgttttttattttaaccatcttaaccattttaaagtgtacagttcagtagtagtaagtatattcacattgttgggtaacagagccccagaacccttttcatctggcacatctgaaactctgtacccattaagcaatggggttccttcatgacagtcccgattggaggtggagttcttacctgctagtaggctgtaagcttatgcagcagaacctgagtggagagcgtgtcatggagaagcagtttaaactggaacaagttgaattaacttttcaagtaaggtccgtgtctgtctgttgagcttgtggatgccgtcttctgttccaggtcaccaggtctgtgatgtcagtccgtccttggatggtgggcggggggtgcctattgcactacagtaggaaaagcctttttttcttgagatggagtcttgctctgtcacccaggctggagtgcagtgggtgcaatcttggctcactgcaacctctgcctcccgacttcaagcgattctcctgcctcggcctcccgagtagctgggactacaggcgcctgccaccacacctggctaattttttgtgtttttagtagagacagaggttcaccgtgttagccaggatggtctcgatctcctgacctcgtgatctgcccaccttggcctcccaaagtgttgggattacaggcgtgagccaccgtacccggccgaaaaggcttaacaagctggcccaacttaatagttttgatctcagctgttggctcacgcctgtaatcccagcactttgagaggccagggtgggcagatcacctgaagtcaggagttcgagaccagcctggccaacatggtgaaaccctgtctctactgaaaatacaaaaaattagcagggtgtggtggctcatgcctgtaatcccagctactagggaggctgaagcaggagaatcacttgaacctgggaggtggaggttgcagtgagccgggattgccccactatactccagcctgggtgacagagtgatactcagtctcaaaaaaaaagaaaaaatagttttgatctcaagtccaagatggcatcactgcgaattttcaaggccgttttagagcagtctcaaaaggtgcactgtcactcagaggacagtctgggttgctgactgacttctggaagctgacctttgtcctgtggatggaaatcttaaaagactagaggagaactcatttgtggagcacttttacagtttatagaccatccactgcaatacagtttataccgttcacatacaggattgcagtgaatggtttttcctcactacaaccctgtgatttggtcccacgcggggaccattatccccttttcgtagctgaggtgttaagtaactcatttgaggtcacccagctaataagtcagggctcaaggcaagttctgtatctcaggatttctgactctaaaacccacgctctgttctgtcatctgtagcaccaccttgctctcaccagtcatcagaagggcaccaaggactaaaatggtccagggaggctgcttctgccctgagtgaggaggtgcccttctggccctgctgcatcacactcaaggatcatttagagggcacatgtgtccagtggctctccctattgtaaatatttcagtaaagagttaaaacaagagacattgttatgtgtggggaaatgtatagtgttctgcttttctcctgattgggttatcttgcctctgctaagtttggtttgtcccgtctctatctcagtggccactggagagagggtgtctgctgttcttccctgattccacctgtaaatacaaacgttatctcttctccctggctttgctctgtgcatttgaggtgggaatgtactcggtttggcgaaatagtctttcatgtccctaaacctgaagcctctattgactgtaaatggtagagaaaaggaaagtacccccaaggtgtgaactctagttagggaaaaaaatatttttgggcttgacagtgactcttagttaactcaattactggaataatagagtcagaaatatttctttgtttttcagggaggtagaggcaggagcgtaagatgtggaagctagaaatatccacttgtaacacggtattagaaggaatgttattttacatggaagataatcctcagtgatccttttttttttttcttcaagacggagtcttgctctgtcacccaggctggagtgcaatggtgattctcctgccttggcctcccgagtagctgggattacaggcatgcaccatcatgcctggctaattttttgtatttttagtagagatggggtttcactatgttggccaggctggtcttgaacttccgacctcgtgatccacccaccttggcctcccaaagtgctgggattacaggtgtgagccaccgcgcccggctgatcctgtctcttgatgtcctcccattctgggacgctaaatggtatccgactttgttttcccttatgtcattcctggtgtgaaggacacgggatattatagaggagagtggcagcatgctgagtggtattccgatctgaatcacactgtcatcctttatccggctcaggcccagggttctaactccacaggaatgggcttatctggggactgctgctgctgcagtcaggaagactccactgtagtcgggagcagcactggcctgagcactgcactggaggccagcctcttcgctgtggtgcccaagtacttctttcaggtgaacacatttttagttcctcttccaggtgtaatcgagcagatgggtgttttgttttccagttagcagtcgagtctgcagtgtcctttgtgttttttatctcccggtataccagtctcacctaagcttttatagtccccgctgcgcacttctctcaagaaacaaagcatttgtcaagtaggagggtccatggagggacctttctcacatatggacgtgtagtttcagttccgtgtgcaggatgtttggtacatgttgttttgtgttttgtttgcagaaagtagatagaataagggccgatttgatttgggtaagggtgagcatggtacagtagaaaaagcgtcatacaaggagtggggagtcctgagttctggagatgactgtgtcgttttgttttcgtttttgagacggagtttagctcttgttacccaggctagagtgcaatcgtgtgatctcggctcactgcaacctccgccttccgggttcaagggattctcctgtctcagcctcctgagaagctgggattacaggcatgcgctgtcacatctggctaattttatatttttagtagtgacggggtttctccatgttggccaggcttgtcttgaactcctgatctcaggtgatccgcctgcctcggcctcccaaagtgctgggattacaggcgtgagtcaccgtgcccggcccattttgtttttttatttttatttttaagagatggggtctcactctgtcactgaggctagagtgcagtggcgtgatcatagctcactgtagcctcaaactcctgggctcaagcattcctcctgcctcagcctcctaagtagataggactacaggcatgtgccaccatgctcaatttatttttatcttttacttttggagatgggggtcttgccatgttgctcaggttggtcttgaacttctggccacaagcgatcttcccacctcagcctcccgggtagctaggattataggcatgagccactgcgcctgtaccatttcttttctctgagacctgacacatcacctccctatgttgagaacctctgtgtgaggtgatgtgatggcattagatgagctccaaggtcccgctcagatctaaccttccacaaagtagtggccaaaggacgaagaaatgacctgcattataacccctgtgatggggtagagagacctgctttataacctctgtgaaggggtagagagacctgcattataacccctgtgaaggggtagagacctgcattataacccctgtgaaggggtagagacctgctttataacccctgtgaaggggtagagacctgcattataacccctgtgaaggggtagagacctgcattataacattgtgaaggggtagagacctgcattttaacattgtaaaggggcagagagagggctgttttgcatggtggggtacttcattgtaatacaaaaaaggactgacactgagcttaatgctttcttaatctcactagcttggggaaagttttcctacaatacccaagatcagcccctcctccttgcatcctgatctatcatgggacattgtagctccctccagaccctaaagcatgcagtgctggaggcaagaagatttgggttgctggaactcacagagtaccctgtacttgttggggtttggcttgttaggggagggaggttcttggggtcccagtacttatggccgtgttctgtcttcattctcagatgagcaatggcaggcgctggtgagcgcaaaggcaagaaggatgacaatggcattggcacggccattgactttgtgctctccaatgcccggctggtgctgggggtgggtggagcggccatgctgggcatcgccacgctggcagttaagcgggtaagtgcatgcagccagggctgggggtggaatgtagtggtatggtcataagatgtaatgttttatagaaagaaaatgtcgaagcgttctaggaggaaatgatcgcaatgataagtgaaaaaaacaggtttcaaaagtatgtatagagtgatcgtcattacatgcatctagaaagaaacataccagatattacaaacagttttctctgggtcatgacgtggattatctatgtcttatatcatgtagtcttccctgagattttctgcgtggagcaaagtattctataatctaaaataaaaacaaaattactaaaagaacttactaggacagagcttctggggaggaagtaaattggaaggaaatagggaaagagggcaggtttatgtcctgtgtcctctctgctatttcagatgtacgatcgggcgatcagtgcccctaccagccccacccgcctgagccattcggggaaaaggagctgggaagaacccaactggatgggctccccacgactgctgaacagggacatgaagacgggcctgagccggtccttgcagacccttcccacagactcctccaccttcgacacaggtgagaagggctgctgcccctcctgggacctctctggactttcagtaccactcctgcactcagcagatgtttcctgagcacatctgtgccaggcactgtgccagcacttgccctccatgccaggcccttctttctggggctgaggcagctgtggactgagcaggcatgggcagagctcacgtgcctctctctcttgccttggcagatacattctgcccgccccggcccaagccagtggccaggaagggccaggtagacttgaagaagtcacgactccgcatgtccctgcaggagaaacttcttacttactaccggaaccgggcagccatccctgctggagagcaggctcgggccaagcaagctgctgtggacatatgtgccgagctccggagcttcctgcgggccaagttgcctgacatgccgcttcgggacatgtacttgagtggcagcctctacgatgacctgcaggtaacaaggtggttctcatggtgggtggggtttgagtgctgagcaccatagtgttgttggcacagatcagtgtcccaggcttgccagaaagactgaggtcttacagcttccgaatcctgtgtacctcagcagcatttggagatccatgcttgttattcttttttttttttgagacggagtctcactctgtcgcccaggctggagtgcagtggtgcgatctcgactcactgcaagctctgcctcctgggttcaagcgattctcctgcctcagccttccgagtagctgggattacaggtgtgtgccaccactcctggctaatttttttgtatttttagtagagacggggttttgccatgccggtcaggctggtctcgaattcctgacctcaggtgatccacccacctcggcctcccaaaatgctgggattacaggcgtgagcctggcctgttattctttattcttgtgtctttaatcgtttctcatgttttagtcctacttacaacttctaggaagctataagaggcctcctccttcctatattcttgtgcccatctctcctttctagttttctcactctgtgtagattgcatggtgacatgaaagaattttttttttttttttttgagatggagtcttgttctgttgcccaggctggagtgcagtggcacgatcttggctcactgcaacctccgcctcctgggttcaagcaattctcctgtctcagcctcctgagtagctgggattacaggcacacgccacaatgcctggctaatttttttgtatttttagtaggggatggggtttcaccatgttggccaggctggtcttgaactcctgacctcaagtgagccagccgcctcagcttcccacagtgctgagattacaggcatgggccactgcgcccggcctagagttcccattcttgctgggggggaatgtaagatggtgggaaccgtcttagaggaagcatgtcttttgaacagagtaaaccctcaaaaccctttaaattctgccctgacaggtggtgacagctgaccacatccaactcattgtgccccttgtgctggagcagaacctgtggtcatgtattcctggtgaagacaccatcatgaatgtccctggcttcttcctggtgcgtcgtgagaatccagagtactttcctcgtgggagcagttactgggaccgctgtgtagtagggggctacctctctccaaagacagtcgcagatacatttgagaaggtagtggctggctccatcaattggccagccatagggtccctcttggactatgtgatccgcccggccccacccccagaagccctcacactggaggtgcagtatgagcgtgacaaacatctcttcattgacttcctgccatcagtgaccctcggtgacacagtcttggtggccaaaccacaccggctagcccagtatgacaacctgtggcggctgagcctgcgtcccgcggagacggcacgcctgcgggctctggaccaggctgactcgggctgccgatctctgtgcctcaagatcctcaaggccatatgcaagtccaccccggctctgggccacctcactgccagccagctaaccaatgtcatcctccacttggcccaggaggaggctgactggtctccggatatgctggccgaccgtttcctgcaggccttgaggggacttatcagctacttagaggctggagtcctgcccagtgccctaaaccccaaggtgaacttatttgcagagctcacccctgaagaaatagacgaattaggatacactctgtattgctcattgtctgagccagaggtgctgctgcagacgtagggcaggtgaaggccaaagcgggtgttggtggtcaggccctggattctccgttagatacacttggctacctagttggtgcctcacagggttcctgctgcctggtgtcttgctgatcatcaccctggtcacttcatgctgattagaatgacatctctttcgtctcctattttgttacccaactcttcctatttttgttaccaatcactgtgctctctgccgccccctggctccaggctaatttttctggaatgaattgagaaggtggcgtgctggcctgagctgatggaccacttggtgttttgcgttttggcccatgtttgctgcctctatctggtctgccttgcccgtttgcctgttcctattcagtgtcttttctattttttcctctctcgttcatgccttctgttttgctcttgtccctggagcatatctgcctaattaagatgttgccttttagttgaatgccactgaagagctgtgatagcatgtttcaaagctgaactctacagagcgagtgctgagacagtatttagggtttctgggagtgaggctggtagaagagttggcctttgaccacggttcctggagtagaagtccatcctccccccaacctcctgacccattcataaatgctgagaatgtctctcatgggaacactgttaatgacccacacaggataagctgaatgcaaagttatttgcaggttgaatttcttggtggctattagcagaagtgcagagtagggaaccagagctggttaagggcctagtgaagggtttgtgtgcccagtgtctgctcgtcatctgtggctgcaggggtcagacagacaaggatggggactgccagggcaccacttcatcatgaatgctggttttcacaccttttccttattttattgccaatcaggacaaggccttgaaggaacgcagccttagacatcaggtgaggatgatggaggtagacagtcgactgaatgtcagctggaaaatccagtcactagttggggtttggtggccatgttttctacccagacaggccctgcttttctaggatgtggccttagagcaagaacagacccaacagccagcccttcatcctccagcgtctgccataggaatgtgagaggggtgtttgctgagcgctccgggcacggccagagggcaagtgagcatgcacggacctcttccccctgtcctgtttctcacccagcacctggggagatcggtgctaccaaggaagagagcacacagataagacagaggggaggaggtgggcatttcctacattcctccttgtttgccgctgctgagattgcagtatttattgcaatgtaaatgtatcctgaaggtggggaggaatgtttaatctaccatgtccgtgtgtcatcttggtttgtgtttttccctgtttgtagcaagactctgatgataattctgtttctcatctgcccattcagtattttgttttccttccgtcaagttgtcttattttttcaatgactacctctccatcattgaggttctggtgaagctctctgcagctgtctcattccttcccaacgatagtaacaggaaatgactctttagcatcgatacctcaacatcaatttagggtagagattcctgcccctcttttgtcacagattaggaaattgagaactagggttaaccttgactatatttagaggtctttttgcctcttttccccttaacaaggatttcttatggtggtttcagtttcatttgcataaaggtattgagagggaacaaaaaacataaagctgagaatcttgagagagctcatctaccctgtctgttggtcagactcaaatgagagttaaaaaaaaaaaaaaaaatctgtatgcctgagtaccatcctggatgaatctagaaggtatggggtagagcttgacagggttcctgtgtacccactgggtatccgttagaggtaagggagaggagaggattgatagagtgttgcaaaagtatagattattcattgagataaaggatttggtttccctgccatgagtattaaaaaaatttaagttttcccaagcttgcatctctgaccaaatttcacataaaacattggaaggaggctgggtgcggtggctcatgcttgtaatcccagcactgggaagctaaggcgggtggatcacttgaggtcaggagttcgagaccagcctggccaacatggtgaaaccccgtctccacgaaaaagataaaaataagctgggcgtggtggcaggcgcctataatcccagctactcgggaggctgaggcaggagaataacttaaacccgggaggcggaggttacagtgagctgagatcgtgccactgcactccagcctgggtgacagagtgagaccctatttcaaaaaaataaaaattggaagaagagcttaaaaaagataagattttaaagagtcccaagttatttaagttgagtgtaattgtcatttaaggaaggcaaatgagtttatcatccttcttaaagagcatctcttttaactgttggacaaaaccataactttgtcattttacaaggaagaacctcttaagaagtcctcagaaccagaagcaatgtgaactctcagcgctggtcctggtgggtttgctgaccatgactgggcaagccgttctttttgctgccatcttcctcatcataaagtgtggaacataggcaattgctttgagattcttggatagaagaggacaacattctgcacctgcccccttttttaaatctttggggaaagatgagtaactttccccactactctgccttcctgttcagtaactcttacttttgcctgaagtaacagcatcttctacttctccatctagagatttttgtgtgtgtgccatcaaggttagcaaactttatacgtagcctaacacttaaaaaatgcactcattatcttaaacctaataaattccagagtttattttggttctcctctgttgcccttcctaaaaaatgagctgaagatgacagtatttttctttacatgcttggttatgacttttaaagttttatttaaataaatgttgaagctcaagtttaaagaagcgttgcagaggcccacggtctcctgggtcccggccacctgtccatattccacatttgctgactgtgctccctgcactccactcaagttgagagttcaaatagtcttgaaggggaatcagcttcaggatggaaggacccaggagaggccccgaggtgggagggttctgtaaatacagactactgcgagtgtccagagctctctgccatgatacttccttgggactgacttggctgagaacgtgttctgtcagaggatttgttagaactctgcccttttgtctgaaactcaaggccaaggagaatgataggagacttaggacagagctgacccttgcaccaggctgggaggctgcagcccttttagatgccacttactgtaagtggccagaataccagagaggtgggttccatggtcaaatgcacagtaggtgtttacctttacatttggatcaccttgtagtctttaaattcttggtccctgaggccaagtccacaacttgccttctagtcacttgcctgcccgcagtggtggtggatgtgttagctggtagatttggaatcagtcaccagtctttctgtactgtcttggttagctctatataagtaggggcagcttagccctgaggcccagagacctgctgtcctttttctccttgagggaggaaataaaactgcggaatacaatgtccttccatagcatgggaagaagaaaataaacatctcctttccaaca

SEQ ID NO: 11813 - DNA, 279 bp, Homo sapiens
gaaatgccaccaattatatttatttgggtcacaaaattctttaaaaagcaaattagggcagcctgaaagagtggaaagaacacacatttcagagtaagacagacttggcttccactgaaagcttctttccttcttagctcagtgtcttagaaactactatgcctctctccatcttggttttcttttcttttctttttcttttttttgagaccgagtcttgttctgtcgcccaggctggagtacagtagcgtgatcttggctcactgcaacctctgcctc

SEQ ID NO: 11814 - DNA, 5755 bp, Homo sapiens
gaaaatagtatttaattgtagtttggatttgtatttctattgggttgtatacttactgattaataataagagctctttacatattaaggaaattaacccttttcaaatacattcctatttctcactaatctttaagttttattgtaatattttgctctttagtttatatatatatgtatatatatatatatgtatatatatatatatacatatatatatacatatatatatactaattttcttttatggttcctggattttgtgagtagtttgaaaaggctaatccagctgaagattttgttgttgttgttaaaccccatgttttctcctaactctttttatttttattttggaggactctatctagacttaattttagcataacaagtgacagggttagttagcctgttgtccttacaccattttctggctaatacagctattaactattgatctgtctattcacgtgccagttcctaatggttttacatagtgtaatctgcacttcaaaatagcgaagggaagccctacctcattattctacttttccagaattctcctggctattccaggctgcatgtttaccttaaccttccctgtgatgtcttcatgccgttgtcttcttatgcaagaataaggtacgtctttccatccactcacgtctatttaatttgactttgcattacacagaaagctggtcttggtctgtctacctcggcatctagttgtcctcactgccccctagccgaccccaccccatctgactgactaccccatcacagagtacttttatttacgttttgctctgcctaatggttacttgatactgtcacgccgacagtgtccagttcagtggtctttgcagttgaaatgctcccgtacacactgtcttgttaaaaatgccagtaagttcatacaaacccagcttgcacccaaggtcacattcagagagcgtagggctgggatgggttgttttccaagcttctgccactgtgtggctagctcttcccactgggaagttctgtgtacccggaatgtcggagtggagtcctgttctagtgtccagcacctgaccctgtgcccaacccctcaacagcctattcctgctgtccacagcctgctggaactttttacaaaatatgttgccatgctggaccctgggcactggacataagccccctggcagcctttttcatgtcacccaaaggggtaattgtcctactggtggtctgtaagatgagttagggtgacttgctaatagacattgtaaatcttaatatttatgtatgtattttattattaccggttttccatttatgatggtaatattgtttcttctaagaatatttatttttccttctaaatattgagataaaattcatgcttttgaaatgttctattcagtggcttttagtatatttgctatgttgtgcaaccatcgacactatccatttctagaactttttcgtcatcccaaacagacgctctgtattcataaaaaaataacttcctacctgtctctccccctagtctttggtaacctttgttatactggtaaactttgttgtgctctctgtctgtgtgaatttgcctattctaggggcctcatataagtgtaatcatacagtatttgtctttttgggtctgtctgatttcacttagcgggttttcagggttcattcatgttgcagcatataacagtactgcgttcctttttctggctgaataatattccactgtatggatagaccccattttgtttattcacacatcatttggacatttggattatttctggtttttggctattatgaacaatggtgctatgaacagttgcgtacaagtttttgtgtgaacatatgttttcaattctctcattatatacctaggagtagaattactgggtcatatggtaactgtatatttttgaggaactgccaaactattttcccacgtccatgcaccatttcacattcccaccagtaagtaagagggttccaatttctgcgcattcttgccaacactagttattatctgactttctggttataatcattctaatgagtgtgaagtagcctctggtgtcatttggatttgcatttctctgatgagtgatgctatcaagcacctttgctggtgctgttggccatatgtgtatgttccctggagaagtgtctgtgctgagccttggcccactttttaattaggcgtttgtctttttattactgagttgtaagagttctttatatattctggattctagacccttatcagatacatggtttgcaaatattttctcccattctgtgggttgtgttttcactttatcgataatgtccttagacatataataaatttgtattttaaaagtgacttgatttggctgtgcaaggtggctcacgcttgtaatcccagcactttgggagactgaggtgggtggatcatatgaggaggctaggagttcgaggtcagcctggccagcatagcgaaaacttgtctctactaaaaatacaaaaattagtcaggcatggtggtgcacgtctgtaataccagcttctcaggaggctgaggcacgaggatcacttgaacccaggaggaggaggttgcagtgagctgagatcatgccagggcaacagaatgagactttgtttaaaaaaaaaaaaaagtgacttgatttaagggaaaaaatgactggctatattcagtcagatatggcaaaaagtctcaaggtgttaatgtgaatgattaaggtcttggggggggtgtcccctatcagactacaggtgtttagaggcacagaaaaaggtgcagttgggttcttaatgtgaaatgatgagaagcacaactccagtgtgtctctttgtgtagaatgtcagcagacaccccctgctagatgtgctggatcatgggaaagcatttccatttgttactagattgttcagaagttttaatttatgatgggtgtggtggctcatgcctgtagtcccagcactgtgggaggctgaggcaggaggatcatctgaggccaagagttcaagatcagcctgggcaacatagtgataccctatctcttaaaaaagaagaagtttttaaatttgaaataataataggtactggatttatgcaaatgtcttttctgcgtcttttgagatgagtatcaggtttttttttttccttttatcatctgatgatgaacttaatgtttccatttgtattaatggaatactaagtccctctgtgatttctgaaccaagctattcctaggcctgagttttattttgttgacacagaaataaattagaaggccaagcgtggtggcatgtgcctgtagtcctagttgctgaggtaagaggattgcttgagcccaggagttcaaggctgcagcaagctttgattgcgccactgcactccagccttggcgacagactaagacgctgtctcaaaaaaaaacaaaaacgacaaaaaaaaaacaaaacagaaaaaataaactaaggcaatgacagtccctggcaaatgctgggagggaggcagcagtggtcagggaaggtaaccctgaagcaggacttgtaaagcaaataagattgggaggccaaggtgggtggatcacgaggtcaggagttcgagaccagcctggccaacatagtgaaaccccgtctttactaaaaatacaaaaaaattagccaggtgtggtggtgggtgcctgtagtcccagctacttgggaggctgaggcaggagaatctcgaacccaggaggcggaggttacagtcagctgagaccgcaccattgcactccagcctgggtgacagagcaagattccgtctcaaaaaaaaaaaaaaaaaaaaaaccaagaagaaaaggaatgaattagaacttcttctgcttggacttaagggcatcatcaggcaggttttgggtaggatagcaggggaggcagagacatagtcggggtcagtggtcatgagtgtggctttgagcccaaaaacttggtttctgttccctactttgccactcagtagtgcatgactttggccaaatttcttaaattcatgaagcaagtttccgggtgaatgaaatggggataaaaatagtgttcaaacctatccgttggtttgtgtgaaactgaaatgaatagtatcgtgcaggtacttgtgagcaaggggagctgctgtttcctgtccctttatgatgggaaatatctagacaagttcccaaccctctgcactgcaggctgcatggcacggagggtcttgtaacaccagctggggctggccttcttttaggagcttcagtggttctgaaaacttttatttgtttgtttgttttagtagatgtggggtctttctgtgttgcccggactggtctcaaacttctggactcaagtgatcctcccccgctcaacctcccaaagtgttgggattacaggtgtgagccactgtgcccagccttgaaaactttttcaggttcttccagggttactgggctattaaatatttctatttcattataagtcagtttttcaaagttatattatcttaattaccttttttatatgtattagtgtagagtagcattttatattttgatatcctccttatgcatagtttttcactttttattcctagtttttcgtttttaataagactttcaagaaatttattttattggccttttgaaaaaagcagctttagataaagtaagcagttctgctttcattttataatttatttctacttttgtttcattaatcttttcctccggcatgccttggattttgttgtgttactctttttctagaggctcgcattgtgtgtctggttcacttatgatcacgcttgcctacttttaagaatggaagaggggaggtggagggtggctgcacagtcgagggtgtgaggcagtcttgctctagccccaccatgccctcagcccgctgtggccacgctggttcctcaattgctggggcgtgcagtgtctgtaagggaggctactgatgccatccgaggaagatgtaaggtttcgtgtgggcagcgagagcctagcaggcatgtggggtgcccagcaaagggtaacagtggacagttgttgcctcattccacagagttttgattttttttttttttttaatggtcactccatcaacatcccccatggccagagcctgagctggtccccagagacacaggcattcagctgacagcctcgccttcacgctgctgctgttctcatgggggacaggcctcaggtggcaatgcacaaatcattagttaagggcagttgtgacagttaccaaggagtgtagtcccccgccccccgcccagtgaaaacagccctaaccaggggtggggacctttgggctctgacccgaagggtaggagaagctggaaggacagcattcctgtctgcgaaggcaggagcaaagctgccaggctatgaaggaaatggctggagcctgaagtcatgcaagctggggctggcagggacagggccaacttccaggcctgggggccaccatgaggattcaggacgtgacccccagggcacatgaaggccttccatctgtatttaagaaaagactttatcagacgagtatggtggctcacgcctgaatcttagcactttgggaggctgaggcaggtggatcacgaggtcaggagttcaataccagcctggccaatatggtaaaaccccatctctactaaaactacaaaaattagccaggcatggtggcgcacgcctgtagtcccagctactcgg

SEQ ID NO: 11815 - DNA, 5659 bp, Homo sapiens
attgggttgtatacttactgattaataataagagctctttacatattaaggaaattaacccttttcaaatacattcctatttctcactaatctttaagttttattgtaatattttgctctttagtttatatatatactaattttcttttatggttcctggattttgtgagtagtttgaaaaggctaatccagctgaagattttgttgttgttgttaaaccccatgttttctcctaactctttttatttttattttggaggactctatctagacttaattttagcataacaagtgacagggttagttagcctgttgtccttacaccattttctggctaatacagctattaactattgatctgtctattcacgtgccagttcctaatggttttacatagtgtaatctgcacttcaaaatagcgaagggaagccctacctcattattctacttttccagaattctcctggctattccaggctgcatgtttaccttaaccttccctgtgatgtcttcatgccgttgtcttcttatgcaagaataaggtacgtctttccatccactcacgtctatttaatttgactttgcattacacagaaagctggtcttggtctgtctacctcggcatctagttgtcctcactgccccctagccgaccccaccccatctgactgactaccccatcacagagtacttttatttacgttttgctctgcctaatggttacttgatactgtcacgccgacagtgtccagttcagtggtctttgcagttgaaatgctcccgtacacactgtcttgttaaaaatgccagtaagttcatacaaacccagcttgcacccaaggtcacattcagagagcgtagggctgggatgggttgttttccaagcttctgccactgtgtggctagctcttcccactgggaagttctgtgtacccggaatgtcggagtggagtcctgttctagtgtccagcacctgaccctgtgcccaacccctcaacagcctattcctgctgtccacagcctgctggaactttttacaaaatatgttgccatgctggaccctgggcactggacataagccccctggcagcctttttcatgtcacccaaaggggtaattgtcctactggtggtctgtaagatgagttagggtgacttgctaatagacattgtaaatcttaatatttatgtatgtattttattattaccggttttccatttatgatggtaatattgtttcttctaagaatatttatttttccttctaaatattgagataaaattcatgcttttgaaatgttctattcagtggcttttagtatatttgctatgttgtgcaaccatcgacactatccatttctagaactttttcgtcatcccaaacagacgctctgtattcataaaaaaataacttcctacctgtctctccccttagtctttggtaacctttgttatactggtaaactttgttgtgctctctgtctgtgtgaatttgcctattctaggggcctcatataagtgtaatcatacagtatttgtctttttgggtctgtctgatttcacttagcgggttttcagggttcattcatgttgcagcatataacagtactgcgttcctttttctggctgaataatattccactgtatggatagaccccattttgtttattcacacatcatttggacatttggattatttctggtttttggctattatgaacaatggtgctatgaacagttgcgtacaagtttttgtgtgaacatatgttttcaattctctcattatatacctaggagtagaattactgggtcatatggtaactgtatatttttgaggaactgccaaactattttcccacgtccatgcaccatttcacattcccaccagtaagtaagagggttccaatttctgcgcattcttgccaacactagttattatctgactttctggttataatcattctaatgagtgtgaagtagcctctggtgtcatttggatttgcatttctctgatgagtgatgctatcaagcacctttgctggtgctgttggccatatgtgtatgttccctggagaagtgtctgtgctgagccttggcccactttttaattaggcgtttgtctttttattactgagttgtaagagttctttatatattctggattctagacccttatcagatacatggtttgcaaatattttctcccattctgtgggttgtgttttcactttatcgataatgtccttagacatataataaatttgtattttaaaagtgacttgatttggctgtgcaaggtggctcacgcttgtaatcccagcactttgggaggctgaggtgggtggatcatatgaggaggctaggagttcgaggtcagcctggccagcatagcgaaaacttgtctctactaaaaatacaaaaattagtcaggcatggtggtgcacgtctgtaataccagcttctcaggaggctgaggcacgaggatcacttgaacccaggaggaggaggttgcagtgagctgagatcatgccagggcaacagaatgagactttgtttacaaaaaaaaaaaagtgacttgatttaggggaaaaaatgactggctatattcagtcagatatggcaaaaagtctcaaggtgttaatgtgaatgattaaggtcttggggggggtgtcccctatcagactacaggtgtttagaggcacagaaaaaggtgcagttgggttcttaatgtgaaatgatgagaagcacaactccagtgtgtctctttgtgtagaatgtcagcagacaccccctgctagatgtgctggatcatgggaaagcatttccatttgttactagattgttcagaagttttaatttatgatgggtgtggtggctcatgcccgtagtcccagcactgtgggaggctgaggcaggaggatcatctgaggccaagagttcaagatcagcctgggcaacatagtgataccctatctcttaaaaaagaagaagtttttaaatttgaaataataataggtactggatttatgcaaatgtcttttctgcgtcttttgagatgagtatcaggtttttttttttccttttatcatctgatgatgaacttaatgtttccatttgtattaatggaatactaagtccctctgtgatttctgaaccaagctattcctaggcctgagttttattttgttgacacagaaataaattagaaggccaagcgtggtggcatgtgcctgtagtcctagttgctgaggtaagaggattgcttgagcccaggagttcaaggctgcagcaagctttgattgcgccactgcactccagccttggcgacagactaagacgctgtctcaaaaaaaaacaaaaacgacaaaaaaaaaacaaaacagaaaaaataaactaaggcaatgacagtccctggcaaatgctgggagggaggcagcagtggtcagggaaggtaaccctgaagcaggacttgtaaagcaaataagattgggaggccaaggtgggtggatcacgaggtcaggagttcgagaccggcctggccaacatagtgaaaccccgtctttactaaaaatacaaaaaaattagccaggtgtggtggtgggtgcctgtagtcccagctacttgggaggctgaggcaggagaatctcgaacccaggaggcggaggttacagtcagctgagaccgcaccattgcactccagcctgggtgacagagcaagattccgtctcaaaaaaaaaaaaaaaaaaaaaaccaagaagaaaaggaatgaattagaacttcttctgcttggacttaagggcatcatcaggcaggttttgggtaggatagcaggggaggcagagacatagtcggggtcagtggtcatgagtgtggctttgagcccaaaaacttggtttctgttccctactttgccactcagtagtgcatgactttggccaaatttcttaaattcatgaagcaagtttccgggtgaatgaaatggggataaaaatagtgttcaaacctatccgttggtttgtgtgaaactgaaatgaatagtatcgtgcaggtacttgtgagcaaggggagctgctgtttcctgtccctttatgatgggaaatatctagacaagttcccaaccctctgcactgcaggctgcatggcacggagggtcttgtaacaccagctggggctggccttcttttaggagcttcagtggttctgaaaacttttatttgtttgtttgttttagtagatgtggggtctttctgtgttgcccggactggtctcaaacttctggactcaagtgatcctcccccgctcaacctcccaaagtgttgggattacaggtgtgagccactgtgcccagccttgaaaactttttcaggttcttccagggttactgggctattaaatatttctatttcattataagtcagtttttcaaagttatattatcttaattaccttttttatatgtattagtgtagagtagcattttatattttgatatcctccttatgcatagtttttcactttttattcctagtttttcgtttttaataagactttcaagaaatttattttattggccttttgaaaaaagcagctttagataaagtaagcagttctgctttcattttataatttatttctacttttgtttcattaatcttttcctccggcatgccttggattttgttgtgttactctttttctagaggctcgcattgtgtgtctggttcacttatgatcacgcttgcctacttttaagaatggaagaggggaggtggagggtggctgcacagtcgagggtgtgaggcagtcttgctctagccccaccatgccctcagcccgctgtggccacgctggttcctcaattgctggggcgtgcagtgtctgtaagggaggctactgatgccatccgaggaagatgtaaggtttcgtgtgggcagcgagagcctagcaggcatgtggggtgcccagcaaagggtaacagtggacagttgttgcctcattccacagagttttgattttttttttttttttaatggtcactccatcaacatcccccatggccagagcctgagctggtccccagagacacaggcattcagctgacagcctcgccttcacgctgctgctgttctcatgggggacaggcctcaggtggcaatgcacaaatcattagttaagggcagttgtgacagttaccaaggagtgtagtcccccgccccccgcccagtgaaaacagccctaaccaggggtggggacctttgggctctgacccgaagggtaggagaagctggaaggacagcattcctgtctgcgaaggcaggagcaaagctgccaggctatgaaggaaatggctggagcctgaagtcatgcaagctggggctggcagggacagggccaacttccaggcctgggggccaccatgaggattcaggacgtgacccccagggcacatgaaggccttccatctgtatttaagaaaagactttatcagacgagtatggtggctcacgcctgaatcttagcactttgggaggctgaggcaggtggatcacgaggtcaggagttcaataccagcctggccaatatggtaaaaccccatctctactaaaactacaaaaattagccaggcatggtggcgcacgcctgtagtcccagctactcgg

SEQ ID NO: 11816 - DNA, 3761 bp, Homo sapiens
attgggttgtatacttactgattaataataagagctctttacatattaaggaaattaacccttttcaaatacattcctatttctcactaatctttaagttttattgtaatattttgctctttagtttatatatatatactaattttcttttatggttcctggattttgtgagtagtttgaaaaggctaatccagctgaagattttgttgttgttgttaaaccccatgttttctcctaactctttttatttttattttggaggactctatctagacttaattttagcataacaagtgacagggttagttagcctgttgtccttacaccattttctggctaatacagctattaactattgatctgtctattcacgtgccagttcctaatggttttacatagtgtaatctgcacttcaaaatagcgaagggaagccctacctcattattctacttttccagaattctcctggctattccaggctgcatgtttaccttaaccttccctgtgatgtcttcatgccgttgtcttcttatgcaagaataaggtacgtctttccatccactcacgtctatttaatttgactttgcattacacagaaagctggtcttggtctgtctacctcggcatctagttgtcctcactgccccctagccgaccccaccccatctgactgactaccccatcacagagtacttttatttacgttttgctctgcctaatggttacttgatactgtcacgccgacagtgtccagttcagtggtctttgcagttgaaatgctcccgtacacactgtcttgttaaaaatgccagtaagttcatacaaacccagcttgcacccaaggtcacattcagagagcgtagggctgggatgggttgttttccaagcttctgccactgtgtggctagctcttcccactgggaagttctgtgtacccggaatgtcggagtggagtcctgttctagtgtccagcacctgaccctgtgcccaacccctcaacagcctattcctgctgtccacagcctgctggaactttttacaaaatatgttgccatgctggaccctgggcactggacataagccccctggcagcctttttcatgtcacccaaaggggtaattgtcctactggtggtctgtaagatgagttagggtgacttgctaatagacattgtaaatcttaatatttatgtatgtattttattattaccggttttccatttatgatggtaatattgtttcttctaagaatatttatttttccttctaaatattgagataaaattcatgcttttgaaatgttctattcagtggcttttagtatatttgctatgttgtgcaaccatcgacactatccatttctagaactttttcgtcatcccaaacagacgctctgtattcataaaaaaataacttcctacctgtctctccccctagtctttggtaacctttgttatactggtaaactttgttgtgctctctgtctgtgtgaatttgcctattctaggggcctcatataagtgtaatcatacagtatttgtctttttgggtctgtctgatttcacttagcgggttttcagggttcattcatgttgcagcatataacagtactgcgttcctttttctggctgaataatattccactgtatggatagaccccattttgtttattcacacatcatttggacatttggattatttctggtttttggctattatgaacaatggtgctatgaacagttgcgtacaagtttttgtgtgaacatatgttttcaattctctcattatatacctaggagtagaattactgggtcatatggtaactgtatatttttgaggaactgccaaactattttcccacgtccatgcaccatttcacattcccaccagtaagtaagagggttccaatttctgcgcattcttgccaacactagttattatctgactttctggttataatcattctaatgagtgtgaagtagcctctggtgtcatttggatttgcatttctctgatgagtgatgctatcaagcacctttgctggtgctgttggccatatgtgtatgttccctggagaagtgtctgtgctgagccttggcccactttttaattaggcgtttgtctttttattactgagttgtaagagttctttatatattctggattctagacccttatcagatacatggtttgcaaatattttctcccattctgtgggttgtgttttcactttatcgataatgtccttagacatataataaatttgtattttaaaagtgacttgatttggctgtgcaaggtggctcacgcttgtaatcccagcactttgggagactgaggtgggtggatcatatgaggaggctaggagttcgaggtcagcctggccagcatagcgaaaacttgtctctactaaaaatacaaaaattagtcaggcatggtggtgcacgtctgtaataccagcttctcaggaggctgaggcacgaggatcacttgaacccaggaggaggaggttgcagtgagctgagatcatgccagggcaacagaatgagactttgtttaaaaaaaaaaaaaagtgacttgatttaagggaaaaaatgactggctatattcagtcagatatggcaaaaagtctcaaggtgttaatgtgaatgattaaggtcttggggggggtgtcccctatcagactacaggtgtttagaggcacagaaaaaggtgcagttgggttcttaatgtgaaatgatgagaagcacaactccagtgtgtctctttgtgtagaatgtcagcagacaccccctgctagatgtgctggatcatgggaaagcatttccatttgttactagattgttcagaagttttaatttatgatgggtgtggtggctcatgcctgtagtcccagcactgtgggaggctgaggcaggaggatcatctgaggccaagagttcaagatcagcctgggcaacatagtgataccctatctcttaaaaaagaagaagtttttaaatttgaaataataataggtactggatttatgcaaatgtcttttctgcgtcttttgagatgagtatcaggtttttttttttccttttatcatctgatgatgaacttaatgtttccatttgtattaatggaatactaagtccctctgtgatttctgaaccaagctattcctaggcctgagttttattttgttgacacagaaataaattagaaggccaagcgtggtggcatgtgcctgtagtcctagttgctgaggtaagaggattgcttgagcccaggagttcaaggctgcagcaagctttgattgcgccactgcactccagccttggcgacagactaagacgctgtctcaaaaaaaaacaaaaacgacaaaaaaaaaacaaaaccagaaaaaataacctagggcaatgacagtccctggcaaatgctgggagggaggcagcagtggtcagggaaggtaaccctgaagcaggacttgtaaagcaaataagattgggaggccaaggtgggtggatcacgaggtcaggagttcgagaccagcctggccaacatagtgaaaccccgtctttactaaaaatacaaaaaaattagccaggtgtggtggtgggtgcctgtagtcccagctacttgggaggctgaggcaggagaatctcgaacccaggaggcggaggttacagtcagctgagaccgcaccattgcactccagcctgggtgacagagcaagattccgtctcaaaaaaaaaaaaaaaaaaaaacccaaaaaaa

SEQ ID NO: 11817 - DNA, 1608 bp, Homo sapiens
ctgtggatgtactaaaatgtatcctattattctctgccctaaaatggaatcatacaaggtgtactgttatttttatggctctataacatgtcatattgtacgtgttggtatggtcattttaaccatttttctagtgatggctttgaggttatttgcagtttcctagccatctcaaagtgtgctgcggggatctcttttgcatccctctgggtgcagagctgaggcacccagaggcagtgtccagaggaggcagcatctgtaggtgtcttcacctgctctggctcttggcacatctggttggtgacactgttttgtgagatgggttgaaagcacgtgctgccaaaatagaataatgttggtcctctcctcatgtgccgtggaactggggtaaaactgcgtagtggctgcagctgcctgtccataccggaatcgagtataacacggtgcctggcttagcacaaaacagtagtgggtcctgcaggccccagagtctaattcctggtattctttcccctacacagattaaataaaccaaaaacaaactattctaggaaagcgtctgtgacatttgtaaaaagtggtatttaatgatcttttattcacttgtctgtttagtttgttgaaatcttaagtggcatcctggtctgggaaggagtgctgtctgcgcctgccctccgctgggcacagcgtggctgcttcaggggctaagcacacactttctgtcttctaaagggccgccacatgccaggagctcaggtgtgagcccggctctggctcttacctcatagggtcactcataggggcacagggagcagaacattgtacacagcgaggcaccacccggcttggcatctgcctcggtggacttactacctctagaaggaaatacctgagttcctctggcctcagctcctagagtgactggtgtgctgtccctgttactcttctgtcaaggtgacaactgtgtgacccatcatctgtgtgtcaaagcaaggccctgcctgggcctctgctcctgtgctgaccccaaaggcaaatgctttgctagtttccttccagttaatttcacctatgaatagatgtgtgaaaactgttcaaagccatacctgcacatgtttgaacttcaaaccctgtgggtgattcagtggcatctttctctaacccccagcctcccttcccacagaggccaccgtcatggccagttgctgcagtttctttccagagaacctgtgtatgtgtaaagctgtacaggcgtgggtacaccacacagcctgtcttgcactgtggactgttgagttactagtacatctaggtaagcaccgcatatctgtattcatgtctgccttggtcttttcaacatctgtgtggtagccgtgtttgaattacccattccctttttggggaaccattaagttgtttcagcaatttttactgtagataaggctataccgcatatctgtgtacatgggtttttatgtacatgggcaagtatatctgtgagagaaaagtttcctcaggaggaattctgggcacagcatgtgtaaatttctaaatatgatggacacccccagcttccacctcaaggaggttggtcccattgacatttcc

SEQ ID NO: 11818 - DNA, 1508 bp, Homo sapiens
ccgggaggtggaggttacagtgagccaagatcgcgccactacactccagcctgggtgacagagtgagactccgtctcaaaaaaaccaaaagactttatcttatttcctatatgtttgtggtttcagtcctgatgtataatttgaccctagttagaatggttatctgaggaagtggcctgtacgatttctgcttttttaaatgtgtggctccctttcttcattgattaacgtatgattatttttataaatgttccatggcagtgggaagggattctctgtcacattccacatctggatcagttcctccccattttgttggtcaaatccgatctgccatatcctgtgtaatgacaagtgagttgcattctcaccgtcactcctggggtctctccgcttcccctgagctggctcagcagtctgctccatgtgttttgatgcagggtgacccattggtattcccgacactaacgcccccgtctgtggactgcttgctgcttgggcttcactgtgtctggtgttgacagtgcagacctaaaggtgtgcacacatgtgcacacacactccgctgtcttcttgtttgcactggacttaaatatctatgagggttattttcaactgctgaatttggaatgatttttatatcttttctgctttctgcccatgtacatgtgtttattttacactgttgtgattggtagttactatgtggggacacaattacttgggctgaaataatccacctgttgtggttggggtcctctggggcattccagggtgagaggttgtcactgccacctgggccatgtgggccggcaccagcattttgtggttacgaattctacagtcacaaatatctttgggcaaatccccttctatacctcaaggcagcttttggtttgcaaccccactggccagagggaagggccagtcacttggctctctcactgccctgcgccccagatggttctagggctgctgttttcccttggccctgccaacaccactgtttttacttctgctcattggctgagtgcagtggttcctggaagccagtggcacgtttccccgcgtagctcgcttatcccacagcacacacccaagggttctgttgctaacacgctgaattaattctttgctcatcttacagagtgtgttttgactgcccccatttctgaggccttgtaaggccagagctttgttgcttcatcggcaggttgggacttagatggccgtgaatgtttcctctctgctgctgcagtaagtaagtgcccgcaccatagtgtgtttggaggctgaagttgaagcgaggctgtgaggggagatggacgtgtgaggagggatgatggggcttgagcaaagtgggggagggggcaaaggcagttggcccaacacattccccacccctttgagaggtctgaggcctgcagacctggctcggagcccacctggtagtcctcagactgtgtgtgtgtgtgtgtgtgtgtgtgtgtgtgtgtgtgtgtgtgtgt

SEQ ID NO: 11819 - DNA, 1608 bp, Homo sapiens; identical to SEQ ID NO: 11817

SEQ ID NO: 11820 - DNA, 2223 bp, Homo sapiens
ccgggaggtggaggttacagtgagccaagatcgcgccactacactccagcctgggtgacagagtgagactccgtctcaaaaaaaccaaaagactttatcttatttcctatatgtttgtggtttcagtcctgatgtataatttgaccctagttagaatggttatctgaggaagtggcctgtacgatttctgcttttttaaatgtgtggctccctttcttcattgattaacgtatgattatttttataaatgttccatggcagtgggaagggattctctgtcacattccacatctggatcagttcctccccattttgttggtcaaatccgatctgccatatcctgtgtaatgacaagtgagttgcattctcaccgtcactcctggggtctctccgcttcccctgagctggctcagcagtctgctccatgtgttttgatgcagggtgacccattggtattcccgacactaacgcccccgtctgtggactgcttgctgcttgggcttcactgtgtctggtgttgacagtgcagacctaaaggtgtgcacacatgtgcacacacactccgctgtcttcttgtttgcactggacttaaatatctatgagggttattttcaactgctgaatttggaatgatttttatatcttttctgctttctgcccatgtacatgtgtttattttacactgttgtgattggtagttactatgtggggacacaattacttgggctgaaataatccacctgttgtggttggggtcctctggggcattccagggtgagaggttgtcactgccacctgggccatgtgggccggcaccagcattttgtggttacgaattctacagtcacaaatatctttgggcaaatccccttctatacctcaaggcagcttttggtttgcaaccccactggccagagggaagggccagtcacttggctctctcactgccctgcgccccagatggttctagggctgctgttttcccttggccctgccaacaccactgtttttacttctgctcattggctgagtgcagtggttcctggaagccagtggcacgtttccccgcgtagctcgcttatcccacagcacacacccaagggttctgttgctaacacgctgaattaattctttgctcatcttacagagtgtgttttgactgcccccatttctgaggccttgtaaggccagagctttgttgcttcatcggcaggttgggacttagatggccgtgaatgtttcctctctgctgctgcagtaagtaagtgcccgcaccatagtgtgtttggaggctgaagttgaagcgaggctgtgaggggagatggacgtgtgaggagggatgatggggcttgagcaaagtgggggagggggcaaaggcagttggcccaacacattccccacccctttgagaggtctgaggcctgcagacctggctcggagcccacctggtagtcctcagactgtgtgtgtgtgtgtgtgtgtgtgtgtgtgtgtgtgtgtgtgtgtaaaagagagaagttgtggagaaatgggggggctgattctgctcagattcatcagtatgagtagaaggcacccagctctcaccctggcctgacatgtgtgtccctgagcaggttacagtcctctctgagcctctgcttcccatctggaacctgctggggcagggcttctgagctccttagcactagcaggaggggctccaggggccctccctccatggcagccaggacaggactctcaaatgaggacagcagagctcgtggggggctcccacggacccgccgtgggcccaggggaggcagagcctgagccaacagcagtggtgctgtggaccgtggatcctgagggtggcctggggcaagtaccggctgagggtccaggtgggctttgtgtacctttgggtcctggggccctggtgacttggactccaggttagagtcaagtgacaggagaaaggctggtggggccctgtgcttccgacttcatttcgagtgatggcagttcccaggaaggaatccacagctgacggtggctgacagatcagagaatggaaggcgaggcaggcgggcgtctgcgtgacctcaggtgcttggggcccagcagacccagagaaccatttccactaggccagggtgccggaagtgtccacaggtcttagattcctgttcagatgaaaagatttgtgcctttaatgataaaagtgatctgcatagagtcaaa

SEQ ID NO: 11821 - DNA, 1608 bp, Homo sapiens
ctgtggatgtactaaaatgtatcctattattctctgccctaaaatggaatcatacaaggtgtactgttatttttatggctctataacatgtcatattgtacgtgttggtatggtcattttaaccatttttctagtgatggctttgaggttatttgcagtttcctagccatctcaaagtgtgctgcggggatctcttttgcatccctctgggtgcagagctgaggcacccagaggcagtgtccagaggaggcagcatctgtaggtgtcttcacctgctctggctcttggcacatctggttggtgacactgttttgtgagatgggttgaaagcacgtgctgccaaaatagaataatgttggtcctctcctcatgtgccgtggaactggggtaaaactgcgtagtggctgcagctgcctgtccataccggaatcgagtataacacggtgcctggcttagcacaaaacagtagtgggtcctgcaggccccagagtctaattcctggtattctttcccctacacagattaaataaaccaaaaacaaactattctaggaaagcgtctgtgacatttgtaaaaagtggtatttaatgatcttttattcacttgtctgtttagtttgttgaaatcttaagtggcatcctggtctgggaaggagtgctgtctgcgcctgccctccgctgggcacagcgtggctgcttcaggggctaagcacacactttctgtcttctaaagggctgccacatgccaggagctcaggtgtgagcccggctctggctcttacctcatagggtcactcataggggcacagggagcagaacattgtacacagcgaggcaccacccggcttggcatctgcctcggtggacttactacctctagaaggaaatacctgagttcctctggcctcagctcctagagtgactggtgtgctgtccctgttactcttctgtcaaggtgacaactgtgtgacccatcatctgtgtgtcaaagcaaggccctgcctgggcctctgctcctgtgctgaccccaaaggcaaatgctttgctagtttccttccagttaatttcacctatgaatagatgtgtgaaaactgttcaaagccatacctgcacatgtttgaacttcaaaccctgtgggtgattcagtggcatctttctctaacccccagcctcccttcccacagaggccaccgtcatggccagttgctgcagtttctttccagagaacctgtgtatgtgtaaagctgtacaggcgtgggtacaccacacagcctgtcttgcactgtggactgttgagttactagtacatctaggtaagcaccgcatatctgtattcatgtctgccttggtcttttcaacatctgtgtggtagccgtgtttgaattacccattccctttttggggaaccattaagttgtttcagcaatttttactgtagataaggctataccgcatatctgtgtacatgggttttgatgtacatgggcaagtatatctgtgagagaaaagtttcctcaggaggaattctgggcacagcatgtgtaaatttctaaatatgatggacacccccagcttccacctcaaggaggttggtcccattgacatttcc

SEQ ID NO: 11822 - DNA, 1522 bp, Homo sapiens
agcaagccttcaactttcgcagagaaaatgctcaaaaacttcagtttcagcagtgcccagcaaagggcaagtgcggtcttcaaggaggagctgggagatgatgaacgatgggaggcaagcgtggggactggcgggaaggcgggagcagctgaggggatcccagtggacccaaactacaagttggggcttgcagggagcctctgctgaaggtagtaggaaatgtgcttcttactgctcccttgtcttctctaatactcctcttagttcttttcctcttgcataccttttatttctggctaagtgttgggcattgttgtacattttctagcttgactcccttgggcaagttactttctgtctctgtgcctttgtgtcttcatgtttaagatggaaagaactgcagtgttgacctcctagggctgttgttagaagccattgaagacacagagaatacttagaataatagttggaacttggcaggccctgagttaattcactgccatcattgtcctcgtgcttcatagcagtagccgtgttgctgctcttagcctcagttctttcatgggcttctttcggttccttggaggctcccaagcaaaggtttttcagcacctctgttctgtgaaaaagagattaagcattttcagtatatttaaagttatctccagcctattgtgatgatgccttttctccaaaacccttttttattttcgttttattgtaggcacaaatctttctaatgcagatgcttaatttttcccaaaaagcaacttactcctttcaacaaggttttctatttggtcatcacatctgcattcttccaagaagcccactggtaaataatggaacaatgaagcagtgtcgccactaaagagtaatctgcaaccacacagaagctggaatcccaagtacctgtcattatattctcctacacatgtgcagagtttgataaaaagagagagccagttttattattcctttaagaggaaaaaactgccaagaactcctaagctttaattaccaaaataagcttgccttaaacaaattcaaacacatgaacacaaagtagaagatcaaatgcattttgtggccccatgcacatatatcttccatgagcttgtatcttcaaggtaacagtgctgcgtctttaatacccattagcgctgcactgtctaaatggtgcacgccagaaaagagccgtctctaggtgtctcaatgaaccatgaaaaatctcagggaaaatgtattaatatatttttcagcaaatcctttgagatgaggattctcaggaaggattttagtgcattatgcaatgtagttgaattccctcttcagtattgaatatgctttgctttattccaaagagctcaacctcttcctatagacattgaaattcatctgtttcattcatagcaccacgtaaactttttatttttgtctcaaacttctctgataagcttgcctctgcatacaaaaacatcaaagcctgtggtgaaaaattattagaaaagaaaagagaaaa

SEQ ID NO: 11823 - DNA, 5137 bp, Homo sapiens
ctaatttcatagagaacaggtattacaagatctatagctttaaaaaaagaaacctaattctaaaaattagaggaaatgactcaactctcatgaaaaatcttttgcaattctgatttctcagttattagatgaattttcatatcttacatacttctttattagtctcaaacatttgtatttttctattcctcacttctttcctaagagatgtagatacaatcaagagaagttccaaatgcatgagcttgaaccagtggcttacaatgcagctaaagctcttgtcaatgaaggccagggttcttgtcagtttatctcaaatttctacaaggctactaaaattaaccagggagctgtgtctccatttttatattcttattgccccagccaaattctgatatagctaattgcttgtcccccacccaaaattctcttctattttggttaactcatatctctctgcatgatctaagcttcataggtacccatacccactagagctctggccattgggcaaatgtactgcatcctagagatggcagtatatgttaataaagagcctttttgagacccttgagaaggaaattcactagcaatttactaagaatgaatgcgcttttgttctggtagggcaggctttgtggaaataaacaaccaaaggagaaaagcaaaggctgtctattctgagcttcctatagcaagggggctggccattatcacttgtgttttggcagagacttaaaggcagaagagtggtaaatattatagtggagaaaagggaagcttcagttgtgccctaattggaagctgatagcacggagatgttatgagccaaccagaagtggagcacccctggtgattggttggggtgtatgcctggccttctctggttggtcctcagttggaagcagagacaaaaactagggaagctttcatttatgaatcacgtcctggccatctggggccaaatgttgcacaagttctgaatagagatggcaatctgtctttctgtgaaactaatagcaggcttgcttcctgagttgcttattacaggtaaggagttggtttcctgggcaggatgctcaggttgtgggtcaaagttctgtttttatgcattgtctgaccattgtccatttgcatattcagtctctccatggggacatatgtgagagttataacgtaatagagctctggttccaaattatactttattttaaattagtttttagttaattgtcatgaaactaaatatagccaggtaattttgagaaaattatctattattagtttttctccttctggtactacatctataagccatttgtagcagtagatacaaattgtaaaggaaatcattgtggaaatgtaagaagcaggcagttaaccaaagggaaacattgaacgtagcttagtatctccttggacctcttttcactgggacctgaggtggtggacacttctgggtgtgtttcttgtagggaaggtgttattgactctgggtctcaaggcctagggaccaatagacctgggtggaaaaagaacatggcttgaaagtagaaagaaatctaccagaaattggtagaaagggaagaagaaagagcatccagttaaaattccataggctaaaatatacatgcacaattgtatcctctaaaccacattaaaaacaagttttcaggaatagattattgaagtagcactttgttcaacttgctagactccttcactgaaattggttgggcactactatgagcctggcactggaaatatctccattcttatttgttaacagtagtctgtatgtagcaacatggacagaagagtatttccctccactaagacagcgaattgcttgtggcttacaaagttagtatttaaatgaaactactaactcccaggaggtataaatggtgagatatttccccttaaggaaaaagcactttttatgttgcttttgcacaagtggtatgaaacccagttatttattggacacattccatgcacaaaggggtgggtttgggtgcctggataatggatagcatttccagaaagaaagttcagaaggaatttcaagaagccttgtaatgagggatagatacactcacctacaatgcaggggagatggttggtgcacctgctgactggggtaaactcgcaggcttgccagggtatccgtggggagggtgatatttccttggcactggagagttatcataacacatttggcaagccttacattttcattcattaggtttctttcattaggttgaaagttagtgtactgtctgtgccaatgcatgtttagacatttatttttctctgtgcaaatgttcctactattgcactccacagacaagtgagaggaaatttgacaagcaatttgtattatgtcagttttaccaaatcacacccttgtcctcccctctaatcacacaaaagcctccaaaagcccatgaggcatgacgttccaggagcttaggaggttattgaggcaggtgagaagtatggaatagatatcaggaggctttagcaaaaaggatcctccctttagctccttgaaatgcccatcccttgactttcagaaggtgacttaccttcccccatttccagcagtgacctcgtcttacctcggaatctctagagcaatagctttcaacatggggcaattttgtcccccaggagatatttagcaatatcagaaaacattttttgttgtcacaactggtgtggatgggagggtgctactggcacctagtgggtggaggccagagctgctgctgtctgtcctgcaggctatgggacagcctcacaacacagcatggtccagcccaaaatatcaacagtgccaagctggaggaacccggctccagatcttgtacagacgtctctcaaggagacctggaaacctggcaaattctgtctttctccaaaagaactattccttccaatctttttcagtaggcatagattatgtctacacatatgtgaaaatcacaagtctagtatgcaatccagccaaatgacactagctggatatagcactgctgtgaccctctacaaatctgtgcttgagttgccatagatgactctacctgtcagctcaacacaggggcagtgtggggcagggatgttacatggctcaactgtttaagttatgcatccatggggtggatggttgcaccattagagaatattccagaaactcttctgtggctaacgctctctgaaacatttccttctctctgcacagaccctgctgtttcccaggcaactaaatgcagtacctaaaaatatatgcatgcaagatttttatggggaaataaaacaatatcacattaaatttaggactaatatttgagatcatgtaaatctctgaaggcagctaccctcactcagggaatagcttatgcttcagtcttagaaactaccttgggatacctgactgtttgccatggtttggtttgggtggggtcctgttttatttgttcatggctaagtagatgcagagattggatgacacttcattcagggcagtgtttgtagaacatggaccttgatccaggccagttccaggttctgggagctcaggtgataaagagcctgtatttccttgcctcaaggagggtactgaagtgaatggacccttgtgctgtgctagaggaatgccaggatttggggatggtgaagcggccagcagaagcagctttgggaggagcgatttaggaaagcctccctaaatggtggaacccctgaattgagcccggagaagttgaagttaaccagacaaaggagcaaacaatgcaggaagcgaaaacaacaggacttaaacctgagagtcccatctcctggagcatatttacaaaattacaagcagggtcacctgctaggaacacagcagctccccagccctgcaggggtcctgttggccagtcccaagagctggtattttacctggtaagcaagagggagctagcgacatgacatggtcaacagaaaaaatggcactcacagtcttgtgcccccagcctacttctgctaggattgaagtatgtgatttgtatttattagggtgacgctggacctataccagagcagcaagcaatggaatacactgatctttctatgtttttattgacctgctgataaacgaaagtcacggcacatatgtatgcatgtatctgtgcatctgtgtgtatgtagacatggagccatactctttatacccctaaatatacacatatcctgtccctctctccgtcccttccctagccagcacaccccttggtggataattgtgtctctttggtttaaactcagaccccaaaacaatgccttttacgtgggaaaacaatacaaaaggcatttttgccatcgctgttggtggggaactgtatgtgatgtgattgggtccctgcgttcctgtagaaccagttgcccagtcccgcttcctgtgacatcatcctcctggacaggcagaggtgtgtactggcagctttccctgctttctgaagcagccggagtgccatgtgcaagtaatctttcatttccaagatgaagagcctgtgtgcacactcatctctctgagagaagcatggctttcacagaggcactcacggtcatgaaactcagctcattaaccctccggaaattcatgaggaggctctgctgagaagagtcactgatgacagaattttaaactttattttctgtccccaataatgttggtgattatgcccatgaaaacgcatgggctttctgtggctgtcaaggactttctagagaaattggtcttgagcttgccatttcgtcagtgctggctctgtgctttgttaactccagggagcttgaagcctgtttttttgttgttgtttgttttgttttgttttgttttgttttaacagatttggacaaaacagaatccagtggtagtgacagtgatgatggcagccaatgtgattaactgaagcatcatttttatttattttatttatttgcttttgcttatttggtcttaaataccaagttgagatatcattcaatgagatttcagacagcgttaaaagtgaaatggcaaattccgtgggattccatatgactgatgagacatgattatttgtcaaataaagcaaaatagaactgt

SEQ ID NO: 11824 - DNA, 4838 bp, Homo sapiens
agtgatgatgagctttttttcatatgtttgttggctgcataaatgtcttcttttgagaagtgtctattcatatctttctcccactttttgatggggttgtttgtttttttcttgtaaatttgttgaagttccttgtagattctggatattagccctttgtcagatggatagattgcaaaaattttctcccattctgtaggttgcctgttcactctgatgatagtttcttttgctgtacagaagctctttagtttaattagatcccgtttgtcaattttggcttttgttgccgttgcttttggtgttttagtcataaagtctttgcccatgtctatgtcctgaacggtattgcctaggtattgttctagagtttttatggttttaggtcttacgttaagtctttaatccatcttgagttaatatttgtataaggtgtaaggaaggggtccagttgtagttttctgcatatggctagccagttttcccaacaccatttattaaatagggaatcctttccccattgtatgtttttgtcaggtttgtcaaagatcagatggttgtagatgtttggcattatttctgaggcctctgttctgttccattggtctatatatctgttttggtacgagtaccatgctgttttggttactgtagccttgtagtatagtttgaagtcaggtagtgtgatgcctctagctttgttctttttgcttaggattgtcttggctatatgggctcttttttggttccatatgaaatttaatgtagtttttttctaattctgtgaagaaactcattggtagcttgatggggtagcattgaatctataaattactttgggcagtatggccattttcacaatattgattcttctatccatgagcgtggaatgtttttccatttgtttgtgccctctcttatttcgttgagcagtggtttgtagttctccttgaagaggtccttcacatcccttttaagttgtatacctagatgtcttattctcttcgtagcaattgtaaaatagattatttttcactgtcacttcttttaccttctagttaccatgttatttcttttcttcccatttcaactctcctcaaaagagttatcttcatttcctgtcttcattttccctcttccctttcatatatattaatatgccctctctccctattctttatctctttctgtttctctttccctatctgcccatctccctctctgtctccctcttcccacttccttctattctctcctctttctgtcccctcccctcattgttttacacactactgaatcttttccaatcaagctgtcactcccacccttcacctcccacacaaacaccccatcacactactctggtcaagttccagtgacctgcacattgccaaagccaatggtcaattcctagtactcatattactcaacctatgagcagtatttgttacagttccctccttctttaactttttccattggttttccaggactcagtactcttaatagctttcctcctaaatatccagtcgttctcagtctccttttctgcttccacctcttctttacaatttctaagcattagaatgcccccagggcttagtccttggactttatctatgcttactactttgctgacttcattcattccatttaaatactctgcctatactgatgtctcctaaatagcaatagaaataatctcagcctcctccctgattttgttggtccagatattactccttggatgccttattagcatctgagatttaacaggttcaaaattaagctcccgatctctgccctaccctcacctcaatttactattttcacagtctttctcatgtcagtaaatggtaacttcatcttttagttaactggaccaaaactggcagagttatcctcagcccttctctttccctcctgtgctttatccaaactcttaggaatccagtcagctctatcttcaaaatatagctgctaccccatagtacttaatcatcattggatataaattccatgtaatcatcttgtttactacctgtgcaccacccacctcccctatccaccctccaggccccagcaacataagctctatgacaatatggagttccatcagtctcagccaatgtgtaggaagaggcagatgaataatattgaaccaccattagcatggcacttctttacttcacttctttactcctaatacctagaacaatgtctagcacattgtatgttctcaataaatatttggtgggtggttagagggatgaatgcatgaaaggatgaaaggaacacatgaaaggaaggaacatcaaaggagctgagcttgagtcttccctttgccctttattacctgagtgactttaggcaagtcagttgatcttcactgaacctttcgtcttatttagaaagttaggggataaaataggtcctattctgataaaataggtttgttctgagaatcagatgagagaataaacatatattttcttgataactagaaagtcgtatacaaatgttagtcatgataaggagggagaaaaggaagggaaagactcgagggggctaatggttgccaaatgagagatcagggacacagaaaacagttttcttcacagttttgagtatttctagacctgggtatacagggttttttttttaattttattattattgtactttaagttttagggtacatgtgcacaacgtgcaggtttgttacatatgtatacatgtgccatgttggtgtgctgcacccattaactcgtcatttagcattaggtatatctcctaatgctatccctcccccctccccccaccccacaacagttcccggtgtgtgatgttccccttcctgtgtccatgtgttctcattgttcaattcccacctatgagtgagaacatgcagtctttggttttttgtacttgcgatagtttggtgagaatgatggtttccagcttcatccatgtccctgcaaaggacatgaactcatcattttttatggctgcatagtgttccatggtgtatatgtgccacattttcttaatccagtctatcattgttggacatctgggttggttccaagtctttgctattgtgaatagtgccgcaataaacatacatgtgcatgtgtctttatagcagcatgatttataatcctttgggtatataccctgtaatgggatggctgggtcaaatggtatttctagttctagatccctgaggaatcaccagactgtcttccacaatggttgaactagtttacagtcccaccaacagtgtaaagtgttcctatttctccacatcctctccagcacctgttgtttcctgactttttaatgatcgccattctaactggtgtgagatggtatctcattgtggttttgatttgcatttctctgatggccagtgatgatgagcattttttcatgtgttttttggctgcataaatgtcttcttttgagaagtgtctgttcatatcctttgcccactttttgatggggttgtttgtttttttcttgtaaatttgtttgggttcattgtagattctggatattagccctttgtcagatgagtaggttgcgaaaattttctcccattctgtaggttgcctgttcactctgatggtagtttcttttgctgtgcagaagttctttagtttaattagatcccatttgtcaattttggcttttgttgccattgcttttggtgttttagacatgaagtccttgcccatgcctatgtcctgaatggtattgcctaggttttcttctagggtttttatggttttaggtctaacatttaagtctttaatccatcttgaattaatttttgtataaggtgtaaggaagggatccagtttcagctttctacatatggctaaccagttttcccagcaccatttattaaatagggaatcctttccccattgcttgtttttctcaggtttgtcaaagatcagatagttgtagatatgcggcattatttctgagagctctgttctgttccattggtctatatctctgttttggtaccagtaccatgctgttttcgttactgtagccttgtagtatagtttgaagtcaggtagcatgatgcctccagcgttgttcttttggcttaggattgacttggcaatgcggggtcttttttggctccatatgaactttaaagtagttttttccaattctgtgaagaaagtcattggtagcttgatggcgatggcattgaatctataaattaccttgggcagtatggccattttcacaatatttattcttcctacccatgagcatggaatgttcttccatttgtttgtatcctcttttatttcactgagcagtggtttgtagttctccttgaagaggtccttcacatcccttgtaaattgcattcctaggtattttattctctttgaagcaattgtgaatgggagttcactcatgatttggctctctgtctgttattggtgtataagaatgcttgtgatttttgcacattgattttgtatcctgagactttgctgaagttgcttatcagcttaaggagattttgggctgagacaatggggttttctagatatacaatcatgtcatctgcaaacagggacaatttgacttcctcttttcctaattgaatgccctttatttccttctcctgcctgattgccctggccagaacttccaacactacattgaattggagtggtaagagagggcatccctgtcttgtgccagttttcaaagggaatgcttccagtttttgtccattcagtatgatattggctgtggttttgtcatagatagctcttattattttgaatacgtcccatcaa

SEQ ID NO: 11825 - DNA, 1308 bp, Homo sapiens
cacactactgaatcttttccaatcaggctgtcactcccacccttcacctcccacacaaacaccccatcacactactctggtcaagttccagtgacctgcacattgccaaagccaatggtcaattcctagtactcatattactcaacctatgagcagtatttgttacagttccctccttctttaactttttccattggttttccaggactcagtactcttaatagctttcctcctaaatatccagtcgttctcagtctccttttctgcttccacctcttctttacaatttctaagcattagaatgcccccagggcttagtccttggactttatctatgcttactactttgctgacttcattcattccatttaaatactctgcctatacggatgtcttctaaatagcaatagaaataatctcagcctcctccctgattttgttggtccagatattactccttggatgccttattagcatctgagatttaacaggttcaaaattaagctcccgatctctgccctaccctcacctcaatttactattttcactgtctttctcatgtcagtaaatggtaacttcatcttttagttaactggaccaaaactggcagagttatcctcagcccttctctttcctcctgtgctttatccaaactcttaggaatccagtcagctctatcttcaaaatatagctgctaccccatagtacttaatcatcattggatataaattccatgtaatcatcttgttactacctgtgcaccacccacctcccctatccaccctccaggccccagcaacatacgctctatgacaataatggaggtcccatcacgtctcagccaatgtgtaggaagaggcagatgaataatattgaaccaccattagcatggcacttcttcacttcacttctttactcctaatacctaaaacaatgcctagcacattgtatgttctcaataaatatttggtgggtggttagagggatgaatgcatgaaaggatgaaaggaacacatgaaaggaaggaacatcaaaggagctgagcttgagtcttccctttgccctttattacctgagtgactttaggcaagtcagtggatcttcactgaacctttcgtcttatttagaaagttaggggataaaataggtcctattctgataaaataggtttgttctgagaatcagatgagagaataaacatatattttcttgataactagaaagtcgtatacaaatgttagtcatgataaggagggagaaaaggaagggaaagactcgagggggctaatggttgccaaatgagagatc

SEQ ID NO: 11826 - DNA, 1308 bp, Homo sapiens
cacactactgaatcttttccaatcaagctgtcactcccacccttcacctcccacacaaacaccccatcacactactctggtcaagttccagtgacctgcacattgccaaagccaatggtcaattcctagtactcatattactcaacctatgagcagtatttgttacagttccctccttctttaactttttccattggttttccaggactcagtactcttaatagctttcctcctaaatatccagtcgttctcagtctccttttctgcttccacctcttctttacaatttctaagcattagaatgcccccagggcttagtccttggactttatctatgcttactactttgctgacttcattcattccatttaaatactctgcctatactgatgtctcctaaatagcaatagaaataatctcagcctcctccctgattttgttggtccagatattactccttggagaatttaatagcggtaccgatttaacaggttcaaaattaagctcccgatctctgccctaccctcacctcaatttactattttcacagtctttctcatgtcagtaaatggtatacttcatcttttagttaactggaccaaaactggcagagttatcctcagcccttctctttccctcctgtgctttatccaaactcttaggaatccagtcagctctatcttcaaaatatagctgctaccccatagtacttaatcatcattggatataaattccatgtaatcatcttgtttactacctgtgcaccacccacctcccctatccaccctccaggccccagcaacataagctctatgacaatatggagttccatcagtctcagccaatgtgtaggaagaggcagatgaataatattgaaccaccattagcatggcacttctttacttcacttctttactcctaatacctagaacaatgtctagcacattgtatgttctcaataaatatttggtgggtggttagagggatgaatgcatgaaaggatgaaaggaacacatgaaaggaaggaacatcaaaggagctgagcttgagtcttccctttgccctttattacctgagtgactttaggcaagtcagttgatcttcactgaacctttcgtcttatttagatagttaggggatggaataggtccgattctgataaaataggtttgttctgagaatcagatgagagaataaacatatattttcttgataactagaaagtcggatgcgaatgttagtcatgataaggagggagaaaaggaagggaaagactcgagggggctaatggttgccaaatgagagctc

SEQ ID NO: 11827 - DNA, 149 bp, Homo sapiens
ttttttttttaattttattattattatactttaagttttagggtacatgtgcacaacgtgcaggtttgttacatatgtatacatgtgccatgttggtgtgctgcacccattaactcgtcatttagcattaggtattctcctaatgctat

SEQ ID NO: 11828 - DNA, 2396 bp, Homo sapiens
gactcaagcaagaccccacctcagcggccaccccctcaaggttgtttacagtatattctcgactgtaatggcattgcagtagggccaaaacaagtccaagcttcttaaaatgattggtggttaatttttcaaagcagaaattttaagccaaaaacaaacgaaaggaaagcggggaggggaaaacagaccctcccactggtgccgttgctgcgttctttcaatgctgactggactgtgtttttcctatgcagtgtcagctcctctgtctggttgtttacctgttcctgttcgtgcttgtaatgctcacttatgttttctctgtataacttgtgattccagggctgtttgtcaacagtatacaaaagaattgtgcctctcccaagtccagtgtgactttatcttctgggtggtttgatagtgtttttaaaagtaatatataatgtggggtgaaatgggagtaggggggtggacaggggagaaacgaaaaccacaaaaagaaaacccaactcctctcctccccccaagctcagttaaatcccccacctccaactttccctccaccagtgtgcttgggatcttcaatgaactgtgcttttcgctttctttctgcatgactattgtaactagatagaacattaagagattttcaagatcaaacttccatagcttcatccactgaatttgaaggcatccacctttttctccatttgctaaaatttggtgcagtttgagtttatgtgaataggctggctgtgcctgtagagctcttgtgtttttagtgatgacatgaaatacaaagaacaagctatttccaggaatgtgttctgtattttacatcccagtgtaccctttattttattattaactaattaactatgagatttttaaaaaatggggccgctgatgtgcaatatcaaagtgaacttgtgagtattttgtgtgtgttgatctcagttgtttcttcattgttgctgtttctggatccagccatgtgtgcgcttgtgtggacctgaggctgctttctgttcccaaagcttgacctgtgtacagagataattccttggcaatgttggacatagaatgcagggagctactgaaggtctgtcagggatttgtccattctgctcttggcctctcctgaggcctcataatgggagaccaaatcaaaaatgtcccatgtcacttgagtgggtacactgcctacagaaccttgaggttgactcctgcttcagttctcagctgtttaccacagccctccagggtccaaagattgaggagctttctctttcctgggaggaactgtctcagatttagcttgtgtgtgttttggacagaggctccacagcggtggctcttgaggaatcctcaccagtttgttctcttccctctgacaagcagcacctgagcagatgctgaggcagttcattaaaccaggcctcagcttcagtgcctcatcttgccatctcccggccaggctgggaacgggcaccaagcagccgcctctaacaaacaccatggtccgtggaagttcatgccagcagcttgcctttgagaagaaatgctgctggctctatttttacattcccttccacctctatactgtcatgtcaccgttctgaactcccagatctgagaaggaactagtgttggtggtatgtaacaagagttacgtatccaggggcttgtgccttggtttctcctttgattgctggtaaattctgaggccacagagaaatgcattgagtgtgaatgttgtcatctgtaatccctccctcagctgataatggtagttgatctgttgtaaatatatacatatatgcatatttgcacttccagatgggttgcataagaatcaggtccttaaatacctcccaatctgatgaaacgatagaataaagtaacatttcccagaatggaggaatacattattttatcgtatatttttgtccaagcgatgagctgacggtggtattgcttctctgcatgttatcagtgtgtacatctggtgcttttcatgtgtcatttgtgagccacaaatgcaaagttgccatttgaattcagtcaggctacagggtggtgtcagtcaaggtctttcaggtgggggagaaattggttagggctcccactgccaaatgcaagcagatagcataacctgactgttatgtgccctcaggcagcatgcttagggacaactctgtggcctgggggacatctgtgtcacagtataggattgccattcaggtgttttgtacctatttctttcctgacgttgtcccctttttttgtactgatccaactgggagaacctcagccaatgctggaagtatgattgaagtacctctcttttgtgactcttgtacagcttaatgtgcaataaaggaaaagttatatctgtc

SEQ ID NO: 11829 - DNA, 2396 bp, Homo sapiens; identical to SEQ ID NO: 11828

SEQ ID NO: 11830 - DNA, 671 bp, Homo sapiens
tgcaggctggtgacgcgccctctgtgggtgggagctgccgctcggaggggacgcgcgcctggtacatgcacggcgaacgggcccactactcccacaccatgcccatgcgcagccccagcaagctcagccatatctcccgcctggagctggtcgaatccctggactcggatgaggtggacctcaagtccggctacatgagcgacagtgacctcatgggcaagaccatgacggaggatgatgacatcactaccgggtaagcgcaggggcttcttggatggcgggggaggatggtggaaagaccactgggatgcgacgccttaaaagtggagtggaacccaaaacgggttttggtttgctgtgctgctatgaaagtacacaaaagtgtgctgtgtacactttgtgattgcctctgaaattcgatgtggtttattctagacttgggtgtggtgtaggcagggcctacatccaaggagctgattggtcaatgaaggcgcctccctctcattggtctctgtggctgtcattctgtcaccctcctccctggctctttgccctcaataaactggctcaaagagccttggaaaagcattttattcccagctcttatgcgaactctgtgtagaccctggacaactaaatctgctttcccatttgcaaaaaaaaaaaaaacc

SEQ ID NO: 11831 - DNA, 2234 bp, Homo sapiens
tgatcaccaagtgtgaacagaatccggaatgcagtttcagcgtgacctgcagtcattcatgttcattggatttgacagatggaaaccaaggttatcgaagattggaaggttatcattgtgaagaagtagctcaaaggactccggtttctgtctacaagtgtgatgtctccatgaagaagacttagtatggatttgggtgggtaagaaagcatttaaacgcccaggaaaggacatgattaaagttgaccttttaatactgtagtaccttgctgttaagtaaccccactattgtatctgcatttatcttttgttcatctactttcacttacatacagtattatataagtagagaaaaatgggaaaatgcaagcaaattcaactttattttatacattgtatatatgtacaccctacactattcatttgggttttattaaagagatagtcacaaagggcttacgaaaatcatttttgaattgataattagaatattgaataagcaatcctatgatccactaatttgttttatcagttaataatattaatcaaagacatttactgtatattctagtcattttgatttgagttaaccccaaatataaaattacctgtagtgatgtctctctcccagcccttatatgtggatattttttaagtggacttgtatgctgataattctagaccaaagtaaatatggcagaatatttatacatgaaaaaataattttgcaaatattttctataattgtattcatttaaaatgttgatagcttgtgttagtttcagggaggggtgtatattttgataaaaaaatacttgactttgtaattctgtatattctatacaatttatagcagagccgttttaagacagccttgtcacatttttttgttaattgtgaaaattttattgagtgatgtttaagtatgcattgagtacatgaccaactagaattaaagtaagtgtaaacagtgaacatactgtatgctgtacaagatataatgtaacttgctgttttagcatctgtattttggttagaagatattattaaatgcagatgttaaggattggaaaagtctaattttatttttagaaataatggatataaatttgtttttgcttgattaaaatagcttattcctacattaagtctctttttaaatgttttcatgttatttcttttgtgcagctatttcatctgtgtgagtcacagctttgtttccacgtattattcagtttatttctgtttccttacttgtttacattccgtggtacctacttacatgcttaggagtcaaatggattatgacattaggaaaaaagcagaataaaagagattgaagtcttctgatgattgagtgttttggataggcctgatcttataatgataaatcagagaatgaaatgctctccaggaagcattctgctccactcatccgtgggaaacaaattacatttattgagtaccaggcactgggcaatgtctttacataggctatttcattaacacacacgcaccagaattcgacctcattatcctcgttttatagtgactttgagaaggtctcacaaccagacaaagccaggatgctaacctaggtctgcctgactccaaagcccatgtttttgttccttctcaacactgtagagaaaaatcatttatagaaactgaacagagtatgaggaaaggagatatgataaagtaatgcagctttaggatggcagttagtgactgccctggaacaggattaaaggaggctgtgtcaggttcagcttcccctgaattgggcttcccttatatctcaggagattgccctataaaatcagtaaaatttgtgcacttttttaaggatatggagtaaaattgtaatagcattataagctggtaattttcacacaaagaaaaaaatacgttccgtcgtcacagactctactcctaaacttagctaactaactatcttgcaaatgcctgcagtttgtcccagtgggcaatgtgagaggggatgtcggtggctcaggcagcacagtccatcaccaacacagagaaaattactgccaggcctaccggtggctggccagtagcatcaattttgtattggaagggcaatccaaaccagattcaccaaaaatttgataactgttatctgctaaaactaacttcattatgtacaagaacaacagatttaatattgaaagcatctgtaacaattgggaaagtaaaagcataaaacaaaa

SEQ ID NO: 11832 - DNA, 19509 bp, Homo sapiens
  SITE (19397): n equals a,t,g, or c
taagtagctgggactgcaggtatgacgaccacgcccagctaattttcttttattgtttttatagacagtgtcttactatgttgcctgggctggtctcaatctcctgggctcaagtgatcttcccaccttctcccaaagttccaggattataggcatgagccaccacgcccagctaaaaggtgtttattttttattgtaattttgttttgtcattgacagattttgaatttctctttcttaccctcttcagcacatcccgctctgggctttaaacgtgacccctcgcctcgactcgccctgccctgtgaaaatgttggtgcttcttgctttcatcatcgccttccacatcacctctgcagccttgctgttcattgccaccgtcgacaatgtaagtttcctttcctgccactcacgcagaaacctgggtcctgcagtcaatagaagtgggttgtattggtctgttctcatgctgctgataaaggcataccagagactaggtaatttataaggaaaatgaggtctaatggactcacaattccacatgtctgggaggcctctgcagaaggcaaaggaggagcaaagccacatcttacatggtggcaggcaagagagcgtgtgcaggggaactgccctttataaaaccgtcagatctcgtgagacttattcactaccacaagaacagtatgggataaacttgctcccatgattcagttacctcccaccgggtccctcccacgacatgtgggaattatgggaatacaatacgagatttgggtggggacacagccgaaccatatcacaggttgagaaccctgccaaagttctcaatgttgaacctgccaaggttcaaccacgattcggggttgtcctccctgcgaaggcacacacatcttctgacccaagggctgaggactcttggcctaaatgtgaaggttcaggccgtcccatgttcaggttttggtggcaggtcctggcaggcagggacgtttgtcctcccatctgtgattctttcatagagcctggctctaggaagccctttgaggatgttgtgtgacttcagctttcctctagatcagagttctcaaccttgccactattgtcattttgggctggataatcctttgttgtaggggcctccctgtgcattgtaggaagttcagcaacgtgtctggccttatctgctagatgcagtagctcccccacccctggttatgacaatccaaaatatcttcagacattgttaaatgtcccatggagaacaaaatcaccctctgttgaggaccgctgccctagatcttccaggtgacccatcccaggtgacctctgcccccaacccctgacacctccttatcaaccagggtcccttgttgctagcccacccggccatgtcctccccagcagagctcatgcatggaactttccagactctacctatgcccctatgaaaaatttaatgtttccctttagtatccagcttgcagccatatggcaggaatgtattggataaataacctcttggcatagattaatatccctccaaacagggagtgacatcagggaagcttcttaacagcctatacactgttccaaagacctggcttccatcctgctcattttagactgcagagataattaaagggcagaaacattgctcagaaagccaaaaagtacaccatacgagtggccaccaactctgcctacatatacggctcccgttgatggatcatcatgacaatagtaacataaactataatgcctgtcacttagcgatcactgtggcccttttatgcatgtcatctcatgtgatccccaccccagctgtaccaggtagggcaccgacatctccttgcaccgggttacaggtgaaggaactgcgcctcagggccattcgggcacttggcagagtttacagtgcagtaagcagcagagccaggatttgagccattccagaggctcctggtcctagagcctgtcaggggagatgagcacaataatcgcatttgggttctggagcttcttgctgagctgctgtgagtggcctgggcagggaccacattgctgctatggattatagcagtggtccccaacgtttttggcaccaggaaccggtttcatggaagacaatttttctacagactggggagggggcattgcagggggatggtttcagaatgattcaagtgcattacatttattgtgcactttattattattacattttaatatataatgaaataattatataactcgtcataatgtggaatcagtgggagccctgagcttgttgttctggactagacggtcccatctgggggtgatgggagacagtgacagatcatcaggcattagagtctcataaggagcgtgcagcctagatccctggcatgcacagttcacaaggttgacactcctataagaatctaatgcccctggtgacctgacaggaggcagagctcaggcagtaatgtgagtgatggggagcagctgtaaatacagatgaagctgccttcactggctgctcacctcctgctgcgtggcctggttcctaacaggctacagacaggtaccagtccatggcccatgggttggggagtcctagattatagtatttggacccaccattccaggagctcactgtgaaataaatgggaccgaatgttcttttagaatctcctttttctatttcttcccatctagtcctttgggatcctgaaaaggtcccagacttagtgaaaaggatagacagacattaggggcaggaaaaccatcagccttagtgaatcgtatccagcacccccagggtatattatcatggcacatactaagaagatgcagatggactttttgtccatcggtgagtctgagggtattcattatgtatttggaattgtgcttggcaactggaaagtagaaggaaggccatcttgggcagtgggggaagggcagcagccaccaaagcacacagggaaatgaatgcttttggctgaagacaggagaatcttgtctggtcatcccatccattgcaatgtttgtttgtttgtttgtgacagggtctctctctgtcacccaggctggagtgtagtgttgcgatcatggctcactgcagcctctactgcccaggctcaagcgatcctcccacctcagactcctgagtagctgggactacagtcacacaccaccatgcctgactaattttttgtatttttttgtagagatgggttgccccggctggtctcaaactcctgggctcaagcaatcctcccacctcggcctcccaaagtgctgaaattataggcatgagccactgtgcccacccctgactgctattacttccagcaactcagcctcatcttttctcccatactctctgagggcctggaccacctcttatcctttgggagaaagtagcagggcatcacctggagccggttagaaatgcagaatcctggccaggcgtggtggctcacgcctgtaatcccagcactttgggaggccaaggcaggtggatcacctgaggtcagaagtttgagactagtctgaccaacatggcgaaaccctgtctctactaaaaatacaaaaatgagccaggtgtgctggtgcatgcctctaaatcccagctactcgtgagactgaggcaggagaattgcttgaacccagtatgggagggttgcagtgagccaagatcatgcatcgcactccagcctgggcaacaagagtgaaactctgtctcaaaaaaaacaaaaaaaggaaaaaaaaaaagaaatgtagaatcccggctgagcgcagtggctcatgcttgtaatcccagcactgtgggaggctgaggtgggcggatcacctgaggtcaggagttcaagactagcctgacaacatagtaaacactgactctacaaaaaatacaaaaagtaggcgtggtgatgtgcacctgtagtcccagatactcaggaggctgaggtgggaggattgctcgagcccaagagatggaggctgcagtgagccaagactgtgccactgccctccagcctggatgacagagcaagaccctgtctcaaaaaaataaataaatagaaaagaaagaaatgcagaatcccagtccccaccccagacctcctgagtcagtctgcattagaataagctcctcaggcaattctcacatgtgttgcagtttgagaatcctggaagcccaccatgcctcgtgcctaattagcagtcagtgtttgcatcatgaacggacggcctttctctctatttccattttgtgttacaggcctggtgggtaggagatgagttttttgcagatgtctggagaatatgtaccaacaacacgaattgcacagtcatcaatgacagctttcaaggtaagtgtgaatgaaggaagctgactgagaagcactgagggaggaaggaacggtcaggagtgaggcttcgggttccccgactccgtaccctctcctccactcactgcatactccggtgggcctggccgcgtttgctcagtgtgtgctggagcggaggacagcacaagctggagatgccaggggtgtggagaagccggaggctggagggagaccaactccagctaagttggacctcatgccttctcttctctgcctcttggcacagccgagtttcccgttctcatcctttctccagcttcagctctcatctagaattttctcttcccttctttttttatccaagccttgcctctaaatgggctcagagaccataatttactctccagtcacttttccctgtccagcagtaagaaatccgagatctggcggggctcagtggctcatgcctgtaatcccagcactttgggaagcagaggcggatggatcacttgaggtcaggagtttgagaccagcctggtcaatatggcgaaaccccatctctactaaaaatacaaaaattagctgggcgtggtggtgcacgcctgtaatcccagccactgaggaggctgaagcaagagaattgcttgaatccaggaggcggaggttgcggtgagccgagatcacgccactgcgctccaccctgggtgacagagtgagaccctgtctcaaaaacaaacaaaaatccaagatctggcttccgttcctagacaagctgtgtagccttgcattgggcatgtcaatttcaacatcctcagctgtagaacagaagtaataatgatgcctttgctgtgcccacctcttcaatgagctaaaatacatgaaaaggctttaaaatacagaaaatcccattcaaaaacatgctaaccactgtttttcattatgaagtgaatggttctgtttttcctcatagaactgatgaaatagatactttgggatcccagttgcctgataaaatacagtatacccggttaaattagagatttcagataaacaataagtactgttttttagtatgactatggcccaaatattaatataacatgggacatacttatgctaaaaaatatttggttttgttggtggggggggagggtttagttttttggtttttgtttgtttgtttgtttgtttttgagacagggtctcactctgtcacccaggctggagtgcagtggtgcagtcacgactcactgcagccttgacctcccgggctcaagtgatcctcccatctcagcctctcaagtagctgggactacaggcactcaccaccatgcccagctaattttcgtaatttttgtagagatggagtttcaccatgttgcccaggctggtctcgaactcctgggctccagagatctgcccacctcagcctaaaggaggaggaggagccaccatgcctctcctaaaatttatttgttgtccatcggatattcatgtactgggcatcctgtctttgtgtttgttttggtttgtttgccaaatctgacaatcctattagggagcaaaggagcctactccctgggtcccagattctcaccacactcagtaacaatatccatattcatcataaaagcagcaaaaataccagtagaaggcaccatttacttaaagtttactgtgaggcatgggtctaagtcctttacataggtgatctcatagccccatcaggcagggaccataggccccattttaagatggggaaactgaggcagagagcagttaagttacccaaggccgcatagccaggagcgaatgatggcggcaggattccagtctaggtgtgaccagctctaaagccagtacccttaaccacggaacaccatcggtgctcccttccatctcgtctgttattctgtcatgctaacctctggccctgggaacagccctccttccctgagctctgcaagccccagctgtcgccagtgtgcaaggccagctgggagggcttgctgtgctctgtggctgtttttctgaatcctccacatgggattattcacttatttttctttaaaacaggggttggcgaaccgctggccaaattcagtccaaggcctgtttttgtttggccggggagctaagaacagtttttacatttttaaaagttgtttacacacacacacacacccctaaaaacaaaacaaaaagaacattcaacaagagaccatatggttcacaaaacctaaaatattcactgtctgtccctctactgaaaaagtttgccaactttttttactttaaaaagtttacttttaaaatagcccacttttctgtacataaatctactgtatttagtggagacagggtcttgctgtgttgcccaggctggtttttcacgcctggcttcaagtgatcctcccaccttggcctcccaaagtgctggggtttttaggcatgagcctctgcactcacccataaatctattttcttttttttttttccgtttgaatcagggtctcgctttgtcactctggctggagtgcagtggtgcaatcacagctcactgtaacctctgccccccaggttcgagtgatcctcccacctcagcctccccagtagctgggattatgggtgtgtgccaccacacctggctaatttttgtattttctgtagagacagggttttaccatgttgcccatgctggtcttgaactcctgagctcaagcgattctcccacttcacccactgtggcctcccaaaccataagtctatgttaaagagaatgtcacatccctcccatgagtgttatcactcgtataaactagtatcacttgccataaaagaagggaagctttctgaaaatactagatggaaagcccaatgatgttatcaaagtctgggcagacacacttccctcctgaagcctctaagcctgtttctggtccttttcatgttaaaaaacaaacaaccccaaacacccagatattagtgggtgtttttaaagcacaaaagcagctggtggagaactcctccttgaggtccttagagaaatctatttatttatttgtttatttatttatttatttttgagacagagtctcgctctgtcacccaggctggagtgcagtggcgcaatctctgctcgctgcagtccccgccttctgggttcaagccatcctcctgcctcaaactcccaagtagctgggattacaggtgtgtgccaccacacccagctaatttttgtatttttagtagagacagggttttgccatattggccaggctggtctcaaactcctgacctcaggtgatccacctgcctctgcctcccatagtgctgggattacaggcgtgagtcaccatgcccagcccttagaggaatttaaactgagcaaagtgagcatccctctcattccgtgaatttgtgtagtttcccgtcctcactgggttccacatacacccatctcaggggctgcctggcaggcacatcctgcaccccctcccagctttgagaaaccctgttctaggaacatctattcatcctttcccccaaagccatgttttccccatttgccccatcatgggtcacttgttgctgaaaatacagattcctggtgcccactccaggacaatggtagcagaatctccagggggagaggcctaagaatctgtatttttaataagcaatcccaggtgatccctgggattgggcagatttgggaagtactgctgtaagccagagggtcaccacttgggctccatattggaattccctcggtggctttacgaagccctcgtgcccgctctcaatgcccgacgttctgatttatttcatctcagtagagcctgctgggttttctttttctttttctttttttaatggagttataatttacaaacaaggaaacgcaggcttcttaagggctcagtttggtgggttttgacaattgtataaacacccacgtaaccaccatccaaaagaagacagagaacattgccaactctccagaaagttcctcgggcccccttccacacagttgctaccgctttctgccccgagggcaaccacttctgacttctgtcactataactcacttccacctgttcctgggcctcatgggaatggggtcatgtggtgtgtgtcatagtgggggagccggtctgactcctttcgctccccataaggaattgggggaaaggctagatgctctccaagcaaccgtaatctgtagccagaatggattaaatccacagctctagacgtttcattaagtacttaccaattatgttcactccagtgagttttcaggcaaaactgcaaaattgaaggaaaaaaaagacagaaagaaaaagaaaaggaaggtgtgtccttagattttctgtgcagcgtggacgctgtcccctcacgttatcttttggcctcatcctggtggtaacattcagcattcagctcttacacaggactcccaccttgcctgcaccctccaaacccccttatgtagatgagtttactctaccttcctagcccgatgaggaaggagctattagtatccccattttagagttcaagaccaccgtgagcaacatagcgagactccatccctacaaaaattttttaaaaattagccagacatgcctgtagtcccagctacacaggaggctgaggcaggaggatcacttgggcccaagagttcaaggctgcagtgagctacggttgtgccactacactccagcctggttgtcagagtgagaccctgtctcaaaaaatatatctatatccccattttacaggtgaggaaactgaggcccacgaaggtaacccatgtgcaggatgccttccctatggccacatagctttctacacattagcctcactgtgacctgcccccatgtgacaccctccaccctaggcctcccttctccactgaaacttctctgtactgagccccaaaccttcataccccagtctctgttaaggctgacctgaaaagaaaggagctttcctcctctttgtaagtagtgaccgtgaagatcagcctccgatacctacaggctagtgtggagtccacagagcacctcacaaggtcacagtcccatgagccctgagtccatgggaatccctctctaaaatggagacccccaaggccccatcctgatttcttgagtcacaatctaccacgttggaacctgaggtttgtccttcaaaagattcccctgtccatgagccaagcatgtggggtctgtgacccagaccaggaagaatgcagagcaggtggttcttgcctcgtcttccagataaggggtcgaggattgtccagtcaaatggacactggaggtgaggggcagggggtctggaagacgccttggctgcccttgtgctcagaccatgtagacgaccgcctgaaccccttcctgtttgcctcctgtcacacctactctggagctgctgcggtcgctgtgtaccccacagtgccggctggccaaggtcctcagtcctgcgcccctgcccttttcccgcagagtactccacgctgcaggcggtccaggccaccatgatcctctccaccattctctgctgcatcgccttcttcatcttcgtgctccagctcttccgcctgaagcagggagagaggtttgtcctaacctccatcatccagctaatgtcatgtaagtacatcaacgggcttccctaacaaggggctttctggaataagcactcccttcccagccgccaggagggaagccaggaggagggagaatttggaaaggagaaattggcagccgcgcggtgctgtgtgccggtgtgtgtttgcgtgtgtgtgtgtgtgtgtgtgggcgcatgcatgctgtaccacagtgggacgtttatatttgggagtttggattgagttgggagtccagggaaggcatcctggagacatgaagccagaggatctggagggtgagtaggagtcgctgtcgacagtgttgtgtctcaatagagagaggagggaacagtgtcctgggtagagggaacagcatgacggaagccctgtgacaggagggacggagagctgcccagtggggctggagtgcagtgggaagtgaaccagcagggcaggcagggccacgccccatggagtcttgcaggccatagaaaggatttggggtctttgttctaagctgatgggaagccatcaacaggtttcaagctggtgggtgacagaggtgcccacgttgcaccaggcctgtgctggctgcaggggctcaagagatgaacaaggcacagcctcagtcctggaggaacttggaggaagcagaggtctcagagcatttttttctacttaggaattttagcaaggcttaagtcagatcagaagtcagaagccacaccatgatcatttgttgtttctcagtgacgatttaaagctttctgatgacaaaatacagaagtcccttctagggtgctttccaatcaggagttgacgagtggcttgatgaaggcaagaaatctgggtgtgggagccaacttaggctgcttggccctaaccactctaactaccacctccttccagccctccacctcccgggccagggtcaagtccaaacctgccatgccctcaggatgaccctgagatgtgtcatcagtgcagtgcagtgacaacttgttctagtttgcctgggaccatcctctggtttaaaactgaaagtcccggtcaggtgcaggagcactttgggaggcccatgcaggaggactgcttgagcccaggagttcaagaccagcctgggcaacatagtgagacctcctctatacaaaaagaaaaaaaattagccaagcatggcagagcacacctgtagtcccagctacttgggaggctggagtggaagatcatttgagcctgagaggtaaaggctgcagtgagctgtggggtgctgtaccacttgtattagtccattctcaagctgctaataaagacatacccgagactgggtaatttgtaaaggaaagaggcttaatggacttacagttccacatggctggggaggcctcacagtcatggcggaagacaaaggaagaacaaaagggcttacatggcagcgggaaagagagcgtgtgcaggggaactcccatttataaaaccatcatatcttgtgagacttactcactaccacaagaacagtatgggggaaccgcccccatgattcaatgatctccacctagccccgtccttgacatgtggggattattacaattcaaggtgagattggggtggggacacagccaaaccatagcaccactgtactccagcccgagggatacagtgagactcttccttgaaaaaataataagataaatagagtagaataaaatacaatataaaataaaaacactgaaagtcccgcatcctaggaaaccccagtccagggcaaagtggggtggttggtcacactcagcgtcccctccccttggggcacttttactggacagccaggtaccaccccttctaggtacaggtggagaatgagagtgttttcaagtgcaaaagactccggagggtcacttgatcttgagaaccccccaagtccaccacagtccttccggggacctttctaaagtgcagactcccaaggccccagcctgccctcttgaatcagcatctgctgggttagagcctggggatttgtactcctgtccctgagccaagcgttggagagcaacaagccagaacaaatgaggcctaaagggagaatgcgttcttcccaaggaccctgggcgaggtagtcaggaggtgtctgatccccctcctttactgtctctgtatctgccagttagaggcgtggaccccccaccctcaccgaccccattaaaggcaattgaatcctgtcatttaacttggggtggggggacttgggtggttactctgttgcccgggctgaagtacagtggcgtgatcatggctcactgcagcctcggcctccagggctcaagcaatgctcccacctcagcctcccaaggaactgggactacagacatgtgccattatgcctggctaatttttgtagagatggggtttcactatgttgtgcaggctggtctcgcaatctgccagcgtcagcctctcaaagtgttgggattccgagcatgagccaccgcacccagcttctgaagtttattttctgttattgtctatgtttgtctgttgatctgtaagcctgcttagtcaaaattgattaccctaatatatgtatttaggaattttatatatataaattttcacatatatgaaaattcccccgtattttaatatgaaagtcacgtcttcccattttccttgcatagcatcccattctccccaactcctgtggccattttctggtccaaagacctggccctccctgttctgcttcaaactgcagagtgtttaatgctgtatcaggcagggatctttagacgcaagcagcagatactctaactcatgtgagagatgggattctgggggtagcctgcaagaatcaaaggaaaagctgaaaaaccaggtcttggaaagaagatccaggcaccagcaactgataggcagcggctccagggaggtgctgtcagaatcaaggaaccctgacagggtcactgtttagactcaggtttccaggagtgagagtctgattggcggagattgtctacgcgcttggcccctggccagagaatgtctgagcatcttgaaggatagtcccaccaaaactgcctggccaggagagagataggtcccccaaggaaaaccacagaacctaagctcatcttagctctaatgtctgtaaatattgggacagcaagtatttctttttttattttttgagatagggtttcgctctgtcgcccaagctggagtgcaggggtgcgaccttggctcgctgcaacctccgccttccgggttcaggcgattctcctgccgcagcctcccaagtagctgggactacaggtgtgcaccatcacacccagctaatttttgtgtttttagtagaggtgaggttttgctatgttggccaggctggtctcgagctcctgggtgcaagtgatctgcccgcttcaacctcccaaagtggtgggattacaggcatgatccaacgcacccagccaaggaccacaagtactaaaattagggtgcttttggccttatgtgagagaaaatcgaattaactgtgatttcagccacaaagatagttactatttttacataacaagtactctggaggtagaaaagtttctagagctgatttagcagcgtctgcgtcaagcacttccgctcattccatccttctattctgtcatctttagtgttggtgttgacctcttcgtggctccaaaaagtttgctgcaactccagatatttcatcctgccccgacaatatttaaagcagtcagcaagagaaaggagagcaatttaaaaaagctttctcctccctcatcgctctcttttcaggcagtcatatttttctttttttttttgagaggaagtttttgctgttgtgcgggctggagtgcagtggtgcgatctcggctcactgcaacctctgcctcgtgagttaaagcgattctcctgcctcagcctccctagtagctgggattacaggcacctaccaccacacccggctaattttttgtatttttagtagggacggggtttcaccatgttggccaggctggtctggaactactgacctcaggtgacccacctaccttggcctcacaaagtgctgggattacaggcatgagtcaccgtgtccggcccagggagtcatatttttcactgaaggttttctgtggtcagaactgggatacatactgacccatcagctataacaagtaaacaggaaccagattgccaagaagaaggttggcaaactatggcccataggtcaaatctggcctgccacatgtttttgtaaataaaatcttattgtaacactgccactattattcatttttgtattgtctataggtggtgtcatgctactgtggcagacttgtgtgaccatggcccacagaaaacctaaactgcttactgtctggccctttacagggtacgtctgtggacctctggcttagaccaattatgttcaccctctgggttggtgatgtggctgcccaaacaaaactgggtttagttagcaagaatgggaagcaaaatagctacagggtaggtgacaatatccttccacaaaatatcagttgtaatttttccaatagactaaaataaatacctattaataataagagcttaaggctgcacgcggtggctcacgtctgtaatcccagcactttgggaggccgaggcaggaggattgcttgagctcaggagttcaagaccagcctgggtgacatggcaaaatcttgtctctacaacaaaataataataaacaaagaataaaagctgaagtttgtcttcaactctggccgtatgcccctgggctacccagggtgcactgtggtccatgatttattgaaaattcacctttcttcctgacaggtctgtgtgtcatgattgcggcctccatttatacagacaggcgtgaagacattcacgacaaaaacgcgaaattctatcccgtgaccagagaaggcagctacggctactcctacatcctggcgtgggtggccttcgcctgcaccttcatcagcggcatgatgtacctgatactgaggaagcgcaaatagagttccggagctgggttgcttctgctgcagtacagaatccacattcagataaccattttgtatataatcattattttttgaggtttttctagcaaacgtattgtttcctttaaaagcccaaaaaaaaaaaaaaaaaaaaaaaaaaagaaaaacgaaaaaaaaattccaaaagagagaagagtttttgcattcttgagatcagagaatagactatgaaggctggtattcagaactgctgcccactcaaaagtctcaacaagacacaagcaaaaatccagcaatgctcaaatccaaaagcactcggcaggacatttcttaaccatggggctgtgatgggaggagaggagaggctgggaaagccgggtctctggggacgtgcttcctatgggtttcagctggcccaagcccctcccgaatctctctgctagtggtgggtggaagagggtgaggtggggtataggagaagaatgacagcttcctgagaggtttcacccaagttccaagtgagaagcaggtgtagtccctggcattctgtctgtatccaaaccagagcccagccatccctccggtatcggggtgggtcagaaaaagtctcacctcaatttgccgacagtgtcacctgcttgccttaggaatggtcatccttaacctgcgtgccagatttagactcgtctttaggcaaaacctacagcgccccccccctcaccccagacctacagaatcagagtcttcaagggatggggccagggaatctgcatttctaacgcgctccctgggcaacgcttcagatgcgttgaagttggggaccacggtgcctgggccaggtcagcagagctgcctcgtaaatgctggggtatcgtcatgtggagatggggaggtgaatgcaacccccacagcaggccaaaaccttggcctccatcgccacagctgtctacatctagggccccaaaactccattcctgagccatgtgaactcatagacaccttcagggtgtggggtacagcctccttcccatcttatcccagaaggcctctcccttcttgtccagcccttcatgctacacctggctggcctctcacccctatttctagagcctcagaggacccatccaccattcattcattcattcattcattcattcattcattcattcatcaacataaatcataacttgcatgcatgtgccaggcacaggggataccctctagagacaatctcctcctagggctcatggcctagtggaggagacagattaaaacttaattagaaaaactggctgggtacagtggctcatgcttgtaatcccagcactttgggaggctgaggcgggtggatcacctgaggtcaggagttcaagaccagcctggccaaaatggtaaaacctgtctctactaaaaatacaaaaatgagctgggcgtggtggtgcatgcctgtaatcccagctatcaggtggctgaggcaggagaatcacttgaaatgggaggtggaggttgcagtgagccgagaccgtgccactgcactccagcctgggtgacagagtgagactccatctcaaaaaaagaaaaaaaagaaaagaaactaattacacactgtgatggaggctgcaaagaacaccactaagaattcaaaatcagctgggtgcggtggctcacacctgtaatcccagcactttgggaggctgaggcaggtggatcacaaggtcaggagttcaagaccagcctggccaacatggtgaaaccccgtctctaccgaaaatacaacaaaattagcccggtgtggtggcaggtgcctgtaatcccagctacttaggaggctgaggcaggagaatcgcttgaaactgggaggcggaggtcgcagtgagccgagattcaccactgcactccagcccaggcgacagtctgagactccgtctcaaaaataaaacgattcaaaatcgaggcctgtggcatggtagggaggctgctttacgcgtgcctattattaaatgctcctggaggcatttaggtatttagatcagtctaaatatagctccattcagttcgtgcagatgacagttattgggcagtacctgtctgtgtaacacccagaaaacatgtctgtggaggggcccatggtcccgacagtaaatgcggtgagagggtcccatagagctggagttttcaagctttaggggttcccgtgctgcttgggacaggctgattcagagggtctgggtgaatgatttccaggtgattttaagactgtgctgagaaatagggcttttggggccttgtccttcaggatcaaagcatgatgctgtgtggcaatgcagaccacccaggaaccatcccaggagataagctctttgcacctcattgtctttttctgcttatgttggagcaggatgctgggggctgtcctgggatggggtgtgggacctcgtgctatttaaatacttttgcacttgaccttctgctgagtggagtggtggtttgccatcagctcagttccagtggagctgaagagacatctggtttgagtagttttagggccaccatggatatctcttcaatgcaggattggctctttccatctgctctttcattcatttgtttttgacagatagtattaaatgtttaccatgttccaggcactgtgtgaggctctgaaaatacaggggtgagcaaatccagatatcctccctgccatcatgaagtttggagtctatgagataggaccccctccctatggagaagccaccaatgcagtacagggtgacctggggccagagacaggacaaatgtcacctcctgcctccatgagatactctcactagtcatattgtgggcaagaatgtggcttacacccctagggttaacaggatgctacccaagctcatggaggaagttgaatcttaagttcccttgaaactttctaccttggtggcttttctataattttcttttttctttttcttttttttttttttttttgagactgagttttgctcttgttgcccaggctggagtgcagtggcaccatcttggctcaccgcaacctctgcctcctgggttcaagtgattctcctgcctcagcctcccgagtagctgggattacaggcatgtcccaccatgcccagctaatttttgtatttttagtagagatggggtttctccatgttggtcaggctggtttcgaactcccaacctcaggtgatccgcccacctcagccttccaaagtgctgggattacaggcatgagccactgcgtctggccttctataattttctggtagtcacgatggaaacaaacaaaacaccttagaaccagagatcgaccccctcaagcaatacatcaattcccttcacaagaaacgtcggggctacatgagtatctgtgttgaatgcggtctgaaatgatcctatggattttcccggctggttgccactgctgtacaacattcagtgcccacatccacctgtgccattaagcttttttgagacatgagagatgcctcttccctgctgtatgacatgcatttgggaagttggaaagaaatgacaaaatcagggagaaaacatccaagcttcttacctgtagatagaatcagccctcacttggtgcttattaccagttattcaagaacaataacaacaacaaaattagtagacatccaagaagcacatattaggaccaaagatagcatcaactgtatttgaaggaactgtagtttgcgcattttatgacatttttataaagtactgtaattctttcattgaggggctatgtgatggagacagactaactcattttgttatttgcattaaaattattttgggtctctgttcaaatgagtttggagaatgcttgacttgttggtctgtgtgaatgtgtatatatatatacctgaatacaggaacatcggagacctattcactcccacacactctgctatagtttgcgtgcttttgtggacacccctcatgaacaggctggcgctctaggacgctctgtgttcactgatgatgaagaaacctagaactccaagcctgtttgtaaacacactaaacacagtggcctagatagaaactgtatcgtagtttaaaatctgcctcgcgggatgttactaaactcgctaatagtttaaaggttacttacaatagagcaagttggacaattttgtggtgttggggaaatgttagggcaaggcctagaggttcattttgaatcttggtttgtgactttagggtagttagaaactttctacttaatgtacctttaaaatagtccattttctatgttttgtataatctgaaactgtacatggaaaataaagtttaaaaccagattgcccagagcaagactctaatgttcccaacggtgatgacatctanggcagaatgctgccattttgaggggcagggggtcagctgatttctcatcaagataataatgtatggtttttacactaagcaactgataaatggacaatttatcactggacaa

SEQ ID NO: 11833 - DNA, 277 bp, Homo sapiens
ttttaaattattttatatgtatttcttgtagagacagagtctcgctgtgttgcctacactggtctagaactcctggcctcaagcgatcctcctgcctcggcctgccaaactgctggaattgcaggtgtgagccactcactgtgtccggcataaagtagaacattcttacaagaaataaatatttcgtagtcatggagaagaacgctcctaaaatgtatgtatccgttcattcatccatccattcattcattcttttatggggcggggggtctgttgc

SEQ ID NO: 11834 - DNA, 395 bp, Homo sapiens
gaaatgagttaagactttggggactgtgggaagggcattgttgtgttttgaaatgtgaggacatgaaatttgggagggaccaggggcaaaatgatatggtttggctgtttccccacccaaatctcatcttgaattgtagttcttatagtccccatgtgtcatggaagggacctggtgggaggtaattgtaggtggtttaccccatgctattcttgtgacagtaagttctcataagatctgatggttttataaggggcttcccactttactcagttctcattcttctccttcctatcaccatgtgaagatggacatgtttgctttcccttctgccatgattgtaaatttcctgaggcctccccagccctgcagaactgtgagtcaattaaagctgt

SEQ ID NO: 11835 - DNA, 395 bp, Homo sapiens; identical to SEQ ID NO: 11834

SEQ ID NO: 11836 - DNA, 2111 bp, Homo sapiens
gagagggatttgtgcatgcctgtgacacctttctcttcattcttctgtgcctctatgattgttacaccttttttattttttttcttttttgagacagaattgctctctgttgcccaggctggagtgcagtggtacgatctcggctcactgcaacctctgcctcccaggttcaagcgattctcccgcctcagcctcctgagtagctgggattacaggcacatcccaccacgcctggctaatattccttttttcgtttttgagacaagattttgtcatgttgcccaggctggtctcaaacccctaggctcaagcaattcacttacctcagcctcccaaaatgctgggattacaggcatgagctaccgcatccggcctccatttattatttaagtattggtgtttttctgggtctggatctcgccttgaccctcattagtcttcctttccttcggcaaacccttgtggtgtcaaagatgatgatgacttccagatccctggcaccagcacacacctctcttctgtgctccatgtttcaaatgcctgctgatcatctctcccacatgtctcacatggacctcaaacttaacttacgcctaaggtaaacttgttaaagcctattttaaaacaagtcttaatcttcattaaggcttctccacacacttattcacccaaattcgaaatctgagagctgttttcaacctccccctgttcctgttcctgacttcaacattccattgattagtaagttctgtcaattctacctttaaacatcaaagtctgttctcatcatccctactgacactgccttagtttgagtttctccatttgtaatttaagccagaaattctcaaactttagcttgcacaaacatcacctggagagcttgttaagacaccagagattctgagtctgtgcttctggggtggggcctgagagtgcatttccaacaagaccccaggtaatgctgatgtttgggtccatggaccacaggtttcgcacttcaatttattctaattgcttcttacctgtcctcctgctttggcttcacaagctccaatgtggttaatgaagttatcgttccaaaacaatttttactgtgtggcttttctgcttatgtattttataggactctgcattgcctgcaacacaaagcccagatacctttcctggcatgcaaggcctttggcagtctgactccagcttagttttccaatctcatctcttgccacttctccctgtaccttaagtaatttaaattatggccaggagtggtgcctcatgcctgtaatcccagtactttgtgagaccgaggcaggcagatcacgaggtcaggagttcgagaccagcctgaccaacatgacgaaaccccgtctctactaaaaatacaaaacttagccaggcatggtggcatgtgcctgtaatcccagctactcaggaagctgaggcaggagaattgcttgaacccgggaggtagaggttgcagtaagctgagattgcaccattgtactccagcctgggcaacagagcgagactccatctcaaaaaaaaaaaaaatatatatatatatatatatatagatagatagatagatagatagatagatagatctgtgcttccttgttcccatgttttgtacatgctatttctcgcatctgcaatgtccattctcttcttccattccccaccttttcctcactcccaaatggataactcacacttgctctttaagattcaacttacatattattttctttgtgctccagtagctctttgcatttctcttataggaattaccatgttgtgtcttgtctgtctgttagtttctctcataagaatgtaagttcatcaaaggaatggactgtgtctcattttagctttgtttctgagcccaaagctagaattgtgtttgtttagcacaatgcttggccacagcaagcatctatgatgttgtttaaactgactttaatcctataaatcaatgtctcccctcaaatgtgtcccactagtaccaggagatttttcaggaaaatgtcctatagtctaataatttggcaaatcacaaattctatgtaatagtgtatataggctctagaaagactagcaaaaaaaaa

SEQ ID NO: 11837 - DNA, 445 bp, Homo sapiens
ctctaatgagactatattagactctgaacttacagtttccccgaaagaggttgccctaagtatagggatacagaggaaggggcatgggttgctgagacaagtgtcctgagtttgagtcccagctctgctgcttactgactccatagccactataagtttactctgagcctcagtttcctcattgtgaaatgcagcaataatttcctcaccaagacaccgtgaggattgcacaaagtaatagcaaagtcatatactcaacaaatatttattctattcctattgtgtgtcaggccatattttcagtgctgggctacattcattgacaggacagacaaaaatatctacccttatggagttgggaatggttggagagaaagacaataaacaagataaataagtaaaatatagagagtgttaaatgacgttaagcgctatggaaaaagac

SEQ ID NO: 11838 - DNA, 12079 bp, Homo sapiens
agccccattgacaaaccttcagattctctcagtatagggaacggtgataattcccagcaggtaagatttgaatacagtatcacttgatttatttgccatactccgaaagcaaggtattccatgcaggtgaattttctaaaaatactttactgacacaatttaaaaacacttttgatgctcatctttattaatcatattataattagccttttccccccagaatatatagagcatagtttaacccttttttaatgactcagaattatcattatgaccagatactattatctttagagtctgctaatgttattggtctttttgaccctgtgccaaatggtcccaggctagcatgccttctgagttccttgcttttaagaattgtattcctaccacatactccccttgccccttgctctctactttaattttctatttcagtcaagtgtatttgtccctaacagtttcccttcttattttccccaaatgactatcagctttgaaatgataagccagataaactgttcaaagttgaatttactatgaaactgagtggagtgctgaccgttagagcatgctttatgtcatcttgtcttattgctcagggaacttttttttttttttggctagtttttcactccttgagtttctatacatcttcttacattggtaaaataaatgtaatttagtatctcccgtaaagaatagccagtcctccacagtatttatgaaaaacttagagatctaaaatataatgcttttctaaacgttttaatgacacattttgtaaaagaatgtggaaatctgtatatccccttgtgtattttagttgcccattaacattttttacaggttaaaagtagttgcaaaggatgtaatttccagcatattagaaatattggtatctgaaaaatttaatgttttgatatcccatcataatgttttgatcataattctgttttattatcctgtcatccatttaaaaaaatacacatgctctcctttaacaatcagaagttttacattatttttttctctgtgaactaatttttctctttctgttattatagagttttatcttaatgcaatatagtttttgcttgaaaagcatatacttctcttaaaaataggcatataaatttttggattgaaataatgtttttgcggtcacagacttcaaatgccaatttttgtcttctgaattttattagtagtattgaggtgacactatacataaatgtagattttaattttaaaaaccatgaaacaaatagtaataaatggtaaaattatagtaaaataaatagtaaaattatattgaaaattcatctcttaatgaagaatagggccattttaaaattggtttgtatgtatctctagattaatgttacctattggtaaaagagccaagtttcagcagcaatctagtcgtgttttttatttttctaagatgtaagtgttgagataagatactttgttcatataaataggtagatggaaggaggagtattatatcagtaccactcaagtctttcaatttcttctgaattaaatacctaagaatcatacaaagatttattatacaaaattatttttaatgatgtgtttggaaacaacttaattagatctttctttaataatctagccattacagtcagtttctctcttatcaccaatccatgtatttctaataatttgtgtttggcctctggaaagttttcactcttgagcaaaatactgtagtaaaatcccagaatgagaaatattattttcttggtaaagtgagagaagtaaagttgtaaaaagagaggagatggccgggcacggtggctcatgcctgtaattccagcactttgggaggccgaggcgggtggatcacgaggtcaggagatcgagaccatcctggataatgcggtgaaaccccgtctctactaaaaatacaaaaaattagccgggcgtggtggcacgcgcctgtagtcccagctacttgggaggctgaggcaggagaattgcttgaaccccggaggccgaggttgcagtgagccgagatcaagccactgcactccagcctgggcaacagagtgagactccatctcaaaaaaaaaaaaaaaaaaaaaaaaaaaagggagactagtttaatcttttcaagcagattaatatttttttaaagagtatatatgtaagttaatgatttaattgattttctgaaacttcatgctttcattaaaacatcttcaagtaccagtttgtgaaacactattctaatacatttagttgcaaactttttaattgtggcttattaaaatgtataaacatgtagttattatttgttttccttttttattcagatatctaacagtgatacgccttcaccaccacctggtttgtcaaaatccaatccagtcatccccatcagttcatccaatcacagtgcacggtccccttttgaaggggcagtaacagagtcacagtcgttattctcagacaattttcgccatcccaaccctatcccaagtgggcttcctcctttccccagctccccacagacatccagtgactggcctacagcaccagaaccacagagcctcttcacatcaggtatataacaatagtaccaagtattagtaattatgctcttaacgtattgttgacagactaacatgaaactcattagtggatatatttttatcttttgcctctctgttctcttttaataaaaatgcaaatatttaaactacatggaattaggtggttaaatacattgttgtgtgacctagaaattactgtgttaaaagatttctccagaagtaaagggttatattgttttcccaatagtaaaaagcttattccattgggaattttttttttcatttttactttttggaggtgggggtcttggtctctcgcccaggctggagtgcaagtagtgtgatcttagctcactgcagcctcacaccctgggttcaagtgatcctcccacctcagcctcctggttaatttttaaattttttgtagagacagggtcttgctatactgcccaggtcttgaactcctggcctcaagtgatcctcccacccaagccttccaaagtgctgggattacaggcatgaagcactgcacctggcaaggacttagatttttaattagatttgtatttttatttaattagatttgtgtttaagattttccacccccagctgacaaagatgcaagttatttagtagtaacagttatgttactactaaatggtatttttgagccatttccatttttatccattctaaattctctcattactatgaaaggtggcataaaagtaacattgacaacagcacctgtggagcagaaaattccaaaaaactatgaggattaatataaatactttttaattaaattatatttttcttagtatagaaagcatgtattcaaaattatttgtactttgataaatacatttaaaaatcaactttactaattaaaatctgttatatttatttgatggaagtgacttaggttggttttgattatgaatggttgagagtataattggagtgtcaagtacatttttttcctttgattagcaaaatcagtctatatcattcagtttttgaagctagtagcttaagagttaagtaactgctagaagtacataaggccttttgtaattatatgatcttaatgtgctaagaagtcacatagattttgcacttacttaatttgtaaaatgacatgtttaactttcagtagcatggatacttattaagtatgaaaatgagctatgtatctgatattcatcactatttttcttcccaacagaaacaatcccagtatcatcctctacagactggcaagcagcttttggctttggttcttctaaacaaccagaggatgacttgggttttgatcccttcgatgtcactcgaaaagccttagcagacctgattgagaaggaactgtccgttcaagaccaaccttccctttcgcccacatctcttcagaactcctcttcacacactacaaccgccaaaggtccaggctctggattcctgcatcctgctgcagctacaaatgccaattctctcaatagtaccttttcagtcttgccccagaggttccctcaatttcagcagcaccgagcggtttataattcattcagttttccaggccaggcagcccgctatccttggatggcctttccacgcaatagcatcatgcacttgaaccacacagcaaaccccacctcaaatagtaatttcttggacttgaatctcccgccacagcacaacacaggtctgggagggatccctgtagcaggtaggttcatttaaaacctttgagaatttttgaataactcatattttcaggttgttgggtggatagggaagtaactgttgaataacagagtactaatatcttggaaatgtctatgaaagattagtctttatcataatctaaaatatatttttcattagatggatgccttgtaatattgagctttataaggatggtggagtattatacttagttattgtttggaagcattttacttaataggataattaccaaactttcatatggtatacaaatgcaaaatgaaaaagaagaaaatggtctctgaagttatggtactataaagtccaacaccgtggtgaaaattatgattttatattctaaagtaaaatggttaaaaaaaatttttttaatgataattaatgagagcatgagggataaagccactctctacctacttttggcagttacttgttttgactgatacacatatacacacacatcaaaactgagctataaatatacttgagaactctgattatgaatgttttacaagcatatcatatgtctcagacatacaccttttgtgaaagagaaattgttcaaggaaagatactttcccatttgatctgccatgtttttatttctggggaaaaatatgaagtatatataaggtaatgtaagtttgatgccaaaatacttctggttttgtactgctacccttgaaggtttcagaacttttgggttttaagattctatataacattttttagatgaagtatcttctatatccaagggaattattcttgttaatagtgttctcgtttaactttggctttagagatgatgttaaaaaaagtttgttcctctcctgattctctcaagtgaaatagaatcatgattctctcaagtagaatacaatagtttctcactctgttagaatagttcttcacataattcatacaatttattgttatcccttgttagatatggcatggcacagtattattgtaataggatacttttatcagcagcaaggcagaagttcacgctcttgtttttagcaaggctgatagatgaatttacagaggtctatcaaagttctttatccctgttccctttgggaccgacaatatttcatgttttagacgagtagctaggttaagagaatatagtttgtggctgttgacatagtgaaatttaccgttgatacagtgaagttaatttacataagcctggtagcacgtaatgtagttatttgcacagtgttgggactcttatttgttcatttaattatggtagttagtaggtaaccagagtgacatttttcagtcctcttcttctacatgatacttacttgtgaaacaatgtgttcagttccaaatactccttttatttccttccattcaagatagcatattagaatgtaattttctttgattttactttgctttaatcattgagaaatgtggcattttaattactagtagtgtatctcataattgattataacattcattaaaagttaaagttaagttctcccaaatcatcaaaacatttaaagattagaccaattacagtgaatatgagggtttctatttgcccatcaatgaattaggacatgtgggacatattaaagaagtttaagatatggataaaatttccacatacttaaagtatagttgaagagactaaaataatgtgtgaaagtggtaactatatgtctgatactggaatctgagagacatcaatgtaccctgtaattcttggggaggcttcattgaataagtaggaattgatccctactatcatatcttagatttgggttagcagcaggggaagagaaaaggccttttatgttgatggaaacctcctgagtaaaggcatagaggcaggaattagtatgtcattacactgagaagtaatacagctacctcctataacaggaggtgcttcttaaattgtatagatataatggatgagaagatgagaaactctgacaatgaggcaaaatggcatggacttggtatgataggaagtaggatgcctttatgggattctagttattagctgtcttctttttgtgcttttatttgacttattacatgacgatctttgattttcttccaatttcatagtcatcatattatcccttaacactgaagagtagttttaacccatatatttcaaaccaatagttattctcagaatgctgcactggtaatgagaaatcgctgattagtgagtttagttgtccttgtgttagtcatttaaaatcttcgtctaaagtagatgctttatggaaaaaatgtgacattaaattatggtcctatctttggggattttgttttaatttttaaaacttttaccatatactcaaccatagagcattaaaacctttttttttcagagatgctaaaaatgtagtcaccaactttaggttctgaatcgttgtactatttggtagggggtgggagagtttattttggattttcaatttcaggctatgcagacttgcttggtatttaaatggtgacttatggttaagcttattattaggttatttttaaggctctgatgactagagaaattttagttttaatgtaccaaaatttaaaaatttttatcaagagtctcacacaccagaatcctctcatggattataaatatttggtagatgccccagaaaactgaatgtgctaagcctcagagcagaatagctgtgtaattgtagccagaagatttaggattttcagtaactattagaaatgacagaaagtgaaaatctggaaaactatatatacatcttaactatgtctaatttgaagcaatttaatacctaggtaactcacttgcacctgttgtaactcacttgcacctgttctaactcacttgcacctgagttgaactattggcaaggattcaactttgtatcttttagcagttatcatgataccttacacagggcagctgtcactaaatgcttcagtaatggagagagtacatacctgtttcagtgggacctgctactttaagatatacttagacaatattttaaactaattctacactctggaaaggcatatatatttattctctaaatatgtagagcaaaatatggtctctgacctgtaagagcaaatcagagatggcagtcacctacatgtcatacagatagaatgtctacttactatacatttgtacttaaatttttatttttggtttgttcagtgaattattaaagattgatatatctgaaacctatcatgggaaaaacagttgccagaggtttgacagaaatgcagcttcctttttttttgatctaattgaaaactgtttttgtgtttaaaattagtagttatttccttaattaggtgaaacctttttagcagcatttggtttactaagtttagaaatatttttgacataaatattcttgggggaaattttgattcgtgggcagttacagtaaattcattcagatctttttttttattattattggaaccatatgccttctttctacaaagtgatttaccttgtcctaaaacgtgactttgttttgtccaattccttcattttaggaatagcaaagctgtgttccagaaagcttaaataatttgttaaaggtcacatattcaattagtagtggaattagggtaagaacttagatctcaaattcaacaatggaaatgtttttgcactacaacgatgccctccttcataaatgaagatcactggcatgtgctttaacttggctttcttcccgtggcaattgtttttgctctcacacacttggaagtccctttttatcaacagtatcaactcatgagacaaattggcccagctcaggggtatatggcctattgttacaaaatagaataaagtgtatcgacttgatagaaatcagtctgtttcttagtccttattaatatcattttcttgctaagaactctagtctaaaatttgctttacagagcctcattgctatgttcttggggtttataagaatctttgccaatttactgaaaaactacaaaatcacctgttatatggattgacagactctttttctgctttgtcagttatccttccacatgtaattttgcagatttgttttaaaaaaatattctgccaagttgtttttattccatgatgttaaaaattatttggaaaacataagtcagtaagcattgttgtttcaagatatacctcaaaaaatatttgaaactgtttaggattggatttttttttcatgtttttgttaatttaaactttacttttgagagggcatttttctttaaattttctttgtttctatatgaactgttttaacagtgacttgattgaattttgagtcatgtgtgaaacaagtcacttgtagtcaaataattttcagttataatcaggagaaccgatctcattcatctataattctctgacctagaagtagtcatctcattttcagtcaattggatcattgtactgttaacattttactatttttcaattacttcaaaggtaaacttgaattttcagatgctgtatgttaatttactagttaatatttatagctttcatttttttctagtacataatttatgctttcaaaacatggatttgtaatttttctcttttaaaaatcagttttcacttctgtaaatcaaggtttaattttttcacaaaatactattaatatttaccatttactaggagtatctataagggtccaattggcttggaaaagaatggctttcctggtctttttttttttttttttttttggtagtatgtttataatctaaatctattgtatttgttcttatctctgaaacaatattactcaggatatatttagaatataactactttccaagtacttgataagtttatattttaaaattcatgtcttgtttcacacctggattccaaacattaagcatgtattttatatatgtatcagtattccaaatattgaaatcatttttaaagggactgttaacaaatctagtcacccataactagaccatgactgacttttccacaggggaagaagaggtgaaggtttcgaccatgccactgtcaacctcttcccattcattacaacaaggacagcagcctacaagtctccacactactgtggcctgacaacagaactgagaggagaggattagactctggggtgcttgcatgggcaactggatttttgcatgattcctttatgattttgcttttaatgtatacacccagaagagccaatataaacgttcctcatgcctacagctagcgtgttacctcatagttgttgaagtatttcttcattaggcctttaacataatttattagtgtaataattttggcattgtttctcatgagtgatactatttctaactcataaaaataaacttgtagtactaagatcccaggtgagattagctagaattgttgttattttggctctattattgaaaaattatacaaaggtaatggtagtatcttgttttctggtttgtgaaaaaataatatcctaatctcctgaaaaatttgcaaattaacaagataatgtctattgcattctttgaatacttgagaagaaagaatacatataaaacaaaattggtggtgtcatttaatgctcagaaggatattgttggcgattgtttttagttgtctagatttatatcctataatatgcattacatgtgtagaaactgttttgttctctctcttttgcacttttgcactttctttttgaatggttgttaattatgcatagatggttaaaagataattattgtagcctaaatgcaatataatctcttttctaatgcactgcctagtataccaggaaatgcctcaaaaacagaacttcagtttatagttgacttatctgaaacttgaatacggagtaaacattgtatgtgaaaagcaaccatagtagtgtaacattgttactgaacaaacagtaattctgtgggatattgttttggaaatttcattgtttaataattaaaatgtgataataagataatattataagtacctgaccagaatgagactaaggcagaagagaagagattggatgtcctctaaaattaggccacctaaattgtaacagataattttaatcaagagaatagtggagtactttattaggacataatgtgaagtgatatttctgaaaacacatttcttgaaatagttttaaaactgataataaaggaaaagaaactgtacttagtttggagcagtggacaaaagctgattcagaaaacatgaccatattctgcctacatgaagcatctgggaagaaagggaaagtcacacctcctcttgagattttaaccattatgataaaaggtatgctttaatttgttaaaaaaaaaagtatgaaaggggataatgtgaatacaaaaaagaagcctagagattgaaaataataataatagaacatgttattaggagatggtacttaatgtcatgttggagttggagttttcaaggttacctctatataaaattggattattttctgttagatataatgtgacaaattaaatgactttatcccaaggtacagtgaggtaaacaaaaatctattcttagatatccttagatttggttaactgaggctgtagaagcagcgaattgtctagccatttaagttatttttgtaaaattcagcataaacatcaatctctaatttctatctagaagtgactttaagacattacaagaacattgccaatttggaaaatgccaataaaatactgtagacttattaatattgtagacttattatcagtcttttactatagcttaatttaattatggttttcatttttactgtaagaggccaagacttcacttatgtctcctgtggagctgaggctcctgggccttgttattataacaaactctggctccttgtaatgatgcttactagctcaaagccttctccagcattcagtgttagcctttcattgcctggatcttcttacaaagccatagcaagtggttagtgccatttgctccttggtgttgagagatatacctgttaaatgaggcttctttcctttctcattcatagccagcgtggaaaaatcatcaggtagtttgcccagatttgccagagccctaaataaaatggcaaaacgatctccctgcctgcttctcctccccacccccacttacatgcacaccgtaaatcaagaaatgctttttgggcaattagactttatcttctaaatttttgcatagaatggctaaacatgatcttttgcctcactttgtaattcctacaccttccttgtaagcttcaccttttgcttacctaatattttatttaaacatggttttttaaaaaacctgaagctttaaaatcatagtcataattaattttacactaaaggacagaagaaattatacaacacataaaagaagccactacttcacatagcaagcaaattgaaatcaaaatgacagaagaatgagaaattctttaaaagcttcaggttttttttgttgttgttgttaaattcctgcatgatgcatcatgtgcaagggaaacttaatatacttttacacccttaacctttataaagtgactagcttttcccttaacataggaatttttaacctggagcccagatttttgagagtacacacaaaattgtgggtttgtgtgcatgtacatatgtccatttttttctagggagaagatccatagttattagatttgtgaaggatttggtgatccccttctcccatcaaaaaaaaaaaaaaaaagaac

SEQ ID NO: 11839 - DNA, 455 bp, Homo sapiens
aatttttttcctataacacagtatcagaacaatacatttgagtaacgatagtcatgtaccacatatcaatgttttgttttggtcaacaatggctggaccacatatacaatggtggttctatataattagaaataacttttttactgtaccttttctatttttagatatatttagatacacaaatgcttacccttatgttacattgcctacagtattcaaaacagtaacatgctgtacaggtttgcagcgtaggagcactaggcactatatagcctcagtgtgtagtaaaccatgccatctaggtttatgtgagtgcacactttaatgtttccacaatgacaaaatcacctatcaatgcatgtctcaaaatgtatcccatcattaagcaacccatgactatttttgttcatgtgctgagttaaataaagttagttataggaatgatatcagtacac

SEQ ID NO: 11840 - DNA, 530 bp, Homo sapiens
atgctttccttttcattctattattgaattttggttttccatgtgttacttttgtgtactctccccttatttcaacaaagcattaattaaatatttgagtacctattctgtatagtgacttgaactagatctttagagatacaaggttgaataaaatacagaccctatcatcaaggataattctagtgacaattatatttcacattatttctgtcaggtcttgataatattttaatcacaggaaccaccatagcagtccagactcattttattatttatcatctctcagtaactgctccgacagtggcaacaaagggtattgaatacttatatttcaaattttaaaatttatgataatttggagggaggtgaaaaaaccttactaggaaagacaaacattcattattctacgtgtgtgtgagctcatgtctcttactcttagcatcctgggaattaagtacagccttctgtgtaggtgttcctttaaagaaaacaactttaatgcattttacctctgcacatttccactg

SEQ ID NO: 11841 - DNA, 24770 bp, Homo sapiens
atatttgaagtacagtttgctgttttcttcttaggtttatcggcgggggcttcaggcaatacctcttagtgttgacctttggatacattatataaacttcttaaaagaaacattggaccctggtgatcctgagacaaacaatacaataagagggtatgtggaacattgatactgaaatgttttttatgatataaataattattctgatgttgataatagagctcatgaaagctaagctggaagtttaacttctattccattgttaaaaaaatgatacatgtaataaacttaagctttatgatttgaaaatgcagataataaagccctcctacagtccatgcctcttatgtccccaattccactcctcaaggttaatagcttggtgtgtgttctttcagatatatgtataagtacatgtttatgcgtatgctttcatactgctctttgactttttttttttaataatgtttgggaatctcttcctgccatattttttaacaattacaaaaagtattttataatactttataaaaagtatcttataagccaaagtactctatttcaccaaatccttatttataggaaataatcagtgctacagtgaacatctctgtacaagtcaatattttttgtagaatgcactagaaatggaacttctgtcaaagggaacacacagctcagttttatcaaatgttccttcaaaaatggtatcgattctaaactcccacagtgtatgaaaataatcattttcccacagctgtgccacattttttgtttgttttacctccagtggcatctcttttaatttgtttatgtcttgattgctcatcctggtttaccatgttctcatatgcttatataagccattttttaaattacctgttgatattatttgctcatttttctattacattatctttttcttgattacagtagtttgctaatgtacttgtttttggttttcaaaaaaaagcatgtgcatattgcttaagaagttagctaatgttaaactgcttgtaacaaaaagtaccacctccacctcccttcaaatattttagctctttcttctggtattttccaccatgtgtttaacagtagatctatgttgctttctttctttctctgttagctgtagacattatgtatctgttacggtaagtgagaattttaacccacttacactttgttttctcattccttatctttccaatatagctacagaataggtttcaataatcagcttcagtatttttttttaatcattgtaaatccataaataaggatgggcacagtggcttatacctgtaatcccagcactttgggaggctgaagtgggaggagcgcttgagcctgggaggttgaggctgcagtgagctgtgattgcaccactgcactctagcctgagtgacagagtgagaccttgtctcaaaaacaaaaaacattagctgggcatggtggcgcatgcctgtagttctagctactcgggaggctgaggcaagagaatcgcttgaacctgggaggtggaggttgcagtgagccaagatcgatcgtgccactgcactccagcctggatgacagagcaagaccctgtctcaaaaaaaaaaaaaaaagagagagagatcaaaaacctataaatatttttcatcatactgtcttttcattttataacctttttggtttttaattgctcctcccctgcccctcatttttcccgtttgtctaattttctttgaacatttaaggttttttcatactctccagcagctttgtagaaggctttaaatatagctttctatacaatcagatctgttaaaaaatgtgtaagtcccattttttcctctcctttgagctgtctcctggaaaccttcctactataatctggactggtcttctagttctgctgtacaagagttgtcttgggattttcttatcatcatggttctaggagatgtctttacctcacttctgggtgagtttattattagatctcactcttttcttgatttcatgtccaacttttagaagagtgtgtcctataacttcttgttaaaggatgcttggatgaaaaaataattttaaggtttggtaagctgtagaatttggagttgaaaattattttctccatagagctttgaaggcattatttattcctttatagcttctgctattgcttttgagaagtccaataccattcttgcagaatagattctctttctataatgtgtttttcctctgtggaagctgttaggatgttctctttgggtctgatgtaaatgaagttttataaaaatgagctttgatgtggattttctttttcttattgtgattattgggtgattgggtgagtcttttcattctgagattctaatgtccttctattcttagaaatgttattattatggatattcttattttgacagtttccttgccttgattttctctgttgtttttaatagttggatgttggacctcttcttttaattactgagtttttcttttcttcttcctatttttcatatcttagactttgtctggctttttgaggtatttccttgacccttgtattggatttttaacatcttccatcagattattattatttttttttttgagacagagtctccctctctcccccagggtggagtgcagtggctcgatctcggctcactgcaagctccacctcctgggttcacgccattcttctgcaccagcctcctgagtagctgggactacaggcacctgccaccacgcctgactaattttttgtatttttagtagagacagggtttcaccgtgttagccaggatgatctgcatctcctgacctcgtgatccgcccgtcttggcctcccaaagtgctgggattacaggcgtgagccaccacgcccggcccagattcttaatatccaagaatctttcttgttctctgagtgttcctttttttatactctccaattcttgtttcatggctgcatatctttttgttatttctttgatgatactaaggatagttgagattttcctctgttcccaggacggtttcctctcaaatttttctgtttacccattttcatctctgagatatgtgatctctggatttttgttcctattacagattagatattaacaagctatatgagccaggcacagtggatcacttgaggtcaggagttcgagaccagtctggccaacatggtgaaaccctgtctctacttaaaatacaaaaaaattagctgggcatgctggcaggagtctgtaatcccagcttctcaggaggctgaggtaggagaattgcttgaacctggaaggcagaagttgcagttagctgagatcgtgacattgcactccagcctgggtgacagagcgagaccctgtctcaaaaacaaacaaacaaacaaacaaacaaacaaaacaaaacacaagcatatggaagcactgtgtgttttgtatggggcattgtcagttggcctatggtgtttcacagtagtgtaatcatgtggccactctttttgctggtggattcccagtgatagtaaccttatatcttattcctgagccaagcagtttgtttagaaaaggataattttatttacttggggaatggacacctagcttctgaaatccccatagctgggcgggaaagttgaagatttctcacgattcattaagtataccttcttctaaacgttctgtcttcatttcattaccttcttgtcttcttccccttttctccatacttttttcagtgtctggttaattttctgaatcatttggggttctgtagggacagtaacatctattttattcttttgaaaaccttacaccaaatatgcacatgcatgcatgcacagacacacatgctcttcaatcttttatttctatattaaacatatttcctccaatgttggtatgtttttaactttgtttatggtgtcttttatcatatggagttttatttttccttaatgtgcttctgttttaattcttactggttcctgagttttgtgcctattttaccaaaaatatataaatcctgtattttgttctaacttttctatagttttttgcttattcatttatctgaatttaatttctatctgtcgtgagatagacattagccttttatatactcccactgttgaattaaagtatctcctatatcatacaccaaatactcacacacattgatctcttttttgttttcttggctctgtactgttcatccatttttctgttacctggccagtgccaaacgtgtaattactatagcttcctagtttcttatattatctttcaggaaaatgcctgctgcattatccttttacaaagtcattttgcatttttgtattctagatgaatagtagaatttgattttttcttgttccactaaacattttttagcgctttattgaaattgtgttaaaattgtggtttaacttaggggagtgtagttttatactttttaaaaatctctcttgattctaagatacttatcttgaaagtatgtatctaaaagctttatcccattggagtattaaatccagtgattaaaattgcttacagaaatctcttgacatgactaggtattttaaaatactttgtaacaaactttttttttttctttggagacagagtcttgctctgtcatccaggctggagtgcagtgttgagtggtgcaatttcagctcactgccactttcgcctcccaggttcaagtgattctcatgcctcaaactcccgagtagctcggattacagatgtgcaccacaacgcctggctaatttttgtatttttagtagagatggggtttcgccgtgttggcaaggctggtctcaaactcctggcctcatgtgctggaattacaggtgtgagccatcgtgcccagcctgtgataaaactttaatgatagaattttagaattgagaggggcttttgagaggtttaaagtatatgtatactttttttttttttttgagacagagtcgcgctctgtcgcccagtctggagtgcagtggtgcaatcttggctcattgcaacctccgcctgccgggttcaagcaattctcctgcctcagcctcccaagtagctgggactacaggcatgtgccaccatgcctggctaattttttgtatttttgtagagatggggtttcaccatgttggccatgttgatcttgaactcctgacctaaggtgatcctcccgcctcagcctccctaagtgctgcgattacaggcatgagcctgtaatcacgcctgtaaccatttcaccatgcctcatgaaaatattcttaaattgagataaaatttgcctctctttaacttcctacttgttttaattttgtcttctgtcataaatcaatctatacaatagacatttcagatttaacaaatacttacatgtctactcttacctatttgcaatgtgtacattttgtatttaattttctatttgataaagttacataaaaagtacatttatctattctctttgttttctcactctttttaagcagctgttgtatgctttctgttattctgtctaccctttaatccctacttgcataggaagcagttgaatataatttttgaagttagcattatcttctaaatttagaaataatattttaaaagtgattttatcttggaaagataacttaagagtaatttaatttttcagaacttttgagcatgctgttctagctgcaggaacagatttccgttctgacagactgtgggaaatgtatataaactgggaaaatgagcagggaaacctgagagaagttacagctatatatgatcgtattcttggtattccaacacagctgtatagtcatcattttcagaggtaggtgggaaattctgatcattgaaacatctttgattactcagatagttggtaatattaagtattataattatcttggaatgttatgtaagcttttattatgtggaaagaggaataaattttgttgctaatcacaacctacatgcttgcttttgacattttttcatatgccttatgaaatgtttagaaattttactgtttttagatagaagtttctccttattcattttaatggataaagagaaacaggaattctgtcttgtctaaggtagttcagagtaatgaaggaatgagaaaatagtacctaagttgagttatttatttatggcattaaattgacacagtgcctggcacatgatagatgcttattttttttgaaacttaatgatttgctaaatatacattattgtgattgctataacaccttatatccaaaacagtgaaggatgcattttatatagtaagtagtatctattttcaaacactcaggtatcattccattttaattttctaaaatgatttttctgttacaattggtatccttttattttaatgattactgttaaaacaactaattctgtgtcattatttttgtgttctgttttctgctttattcagagtatcccataaataaggatccagaaagtctttctgaacgagtatgaggactgtgtctttgcttttaaattggcatgttttctattttttgttataatttttatgagtagtattgtataaacttagtattttctattttttgttataatttttatgagtagtattgtataaacttaggtactttttaagtgagtgattttctaaattttttttttagtaccaaaagtagaagacttttatgaagcatttgtaaagtactaaggatcaatgtgctaaaggtagaagttatacagactcaggttagaaataggaagcatatagataggaatattctctctgctcttgatgaaatagaggaagcaggcaggtttctaaggtataacgacctaggaagacacttgctgaaagatgttaacacaagtaagaattggcatatggaaatgcttggtaaatagttaccaaacacataagtacaaaagtacttaaattacctgatgggccaaagagggtgtcttttcatagactagttcttctgtgatttaaagtataggaaaaatctatgactacaagaactttactgatgatggaaaaaaaatatttgtaggaaacacacatagcattttctatatcccagacactgtgctgagtgctttgtaactcacttaatcctcccagtaacccagtgaggcaagtactattgttcccattttatgaaaggggagacacagggagattagcatatttatctaaggccacagagtttgtaagtgattggaagctacttggaacttagacagtatggccctgaagtttttgatatgttctcctacaaatcttttttatttctaaataaatatcccactaggcttttatttatttatttttctttaagttgtcagttaccctaggcttttaaaaatgcatatatacttacaatagatattagtgggattatattacacatactgatctataatctgatatttttcacttaatgcatttagaaccactttccttatcagttatagtgaactcacaagtaatctttatgcagttcttatagtttatataagttaattcacatgactaactgctttgagaaccactgaatgttttgttttttttttccataacacatgcctctttcttaaagtcatttatttagcatttgctgtgtacctgttgataggctatttaagttgtaggaatgaaggcccaaagaagccatgtgtaaatagcgttgcctgtgagttggtcagaaggatagaggaggaggcgtgtgttaaaaaagatattctaagtggtatacagtaataatggaaatatttttattgtgcttgtgcattaggcttgtaccattggatgtaccctgcacattatctctgagataatgtctaatttaaatccttctttagcatgaggactttgtgatctggtctaacatccaggtccaatccctggtggttcctgagctctagacacacctaagtctgataacttcccaaagggcagtgttgttttatatctttatgactgtaataccttttcctctttccacttgtctagtggacttatattccctgagaccacacagttttgtgtcttctctgtgaaattttctctggttctcctatactgagatacctagtctgttatttgtgccatgactttacctacatttatttacatttatattagcaccagtaacactgctttgaatttatgtctcttatatcctcaacatgcctgtcagtttctgaggcttaattctttgtatctctaatatttaggaatagagctcaatatatattaggcagtcagccagtctttactgaataaatgttagctttataatacaaaaaactgctgaaaaaatactgcttaatattatgcacattttgtcactgttttaaagaagttgttacatgatgtagcaataagtcattttagatttatgtactgtatgtagttattttgaaattttaccttaagtttttaattcatttgttgaccattctgagttttaatattcatctgtaattaaatctgttttttcatactacatatttgagagttacttccttatttttaattttttaacataaggcaatctttgttaatttttttccacctggtgctgaaatgggccgttagcctctgtatccattgactttgcaaaatttaaattagattccaatgttatttatatactttttttttttttttttttgaggtgaaatctcgctctgttgcccaggctggattgcagtggtgcagtcttggctcactgcagcctccacctcccaggttcaagtgattctcctgcctcagcctcccgagtagctgggattacaggtgcccgccccgacacggagctaatttttgtatttttggtacagatgggtttcagcgtgtttgccaggctggtctcaaactcctgacctcaggtgatccgcccacctcagcctcccaaagtgctgggattacaggcgtcagcaggcgcctgacctgtttgcttactttttagtaacatttctgatagtagtatagaggtgggaatgggagttgtgagactagaggctgcaaggtcattttatgtttatccagcttaaaagtcccgaggtgatgaacatgtatttaaaaggtacagtcagtaggacctggtatctaatgtaaatgaaaagctaggtggaagagattgagagatgtagtggttgacagtaccattaatcaatattagaaatgctgagggtggcggggcacggtggctcacacctgtaatcccagcactttgggaggctgaggcgggtggatcacctgaggtcaggagttcgagaccaggctgccaacaaggtgaaaccccgtctctactaaaattagaaaaattagctgggcgtggtggtgcgcacctgtaatcccagctacttgggaggctgaggcaggagaattgcttgaacccgggaggtggagcttgcagtgagccaagatagaacgattgcactctagcctgggcaacagagcaggactccatctcacacaagaaaataaagaaagaaatactgagggtattcattttcagatgaagatgccatacttattttaaaatatttcatatttgaggttccaaaggtatattcaaattgtgatagtgtagatattttagctcctcaacctggtatttttgattacaatttgtatgtatacaaattattgcatgtttttataaaatagtgaaatgatatttttttcaaaaatctttttatagattagcttaaaactaatccacatttctttgtgcagagtattggcagttgtatatgctaatgtgattaggagaaaggtttggacttgtgttgtagttttgagagtcatcatggtatacttatttcaagctgtatgaatgagattggccagaagtatgtattaataaaaatagatgagaaccaaatggagagtggaatacttgggtatagtagcatttagggcaggtaagaaggggaataagacatagagcagcagtcagaggcttggaggaccatactacaaaacaagtgtccatttaattttatatatgaggtaattgataatcttaattgggcagtttcattggatttttgcgtactcacatgtggatgaggagtatttgggaggtgggaaggaaatgctatatttgttggttatttacaagtgatcatttagaatttaaatatggattacagtatttaattttactgtaacttttatgtctttgtagtaaaatagattctatgacacacgaataggtattatcatcttattttacaattgaggaaactaagatttagagaaaagaaaaccttccctagtcagataaccagtaacagacagaactgaggtttgaatttatgcccgtccatgccttctccattccactgtaaaggtaggaagaaattgaagatgtctatagactgttttatcatatggtagtgttttatcatatatggtaggattttactatagaaaagaaggagaaaaggtatgatattttggtttcttttttaaatcaaatcctttgaaagagtagtatatagtaggaatctcaatatgagatctaaaattatgattcaaatacatatatttttattgtcttcctttagatttaaagaacatgtacagaataatttgcctagagatcttttaactggtgaacagtttattcagttgcgaagggaattagcttctgtaaatggtcatagtggtgatgatggtcctcctggtgatgatctaccatcgggaattgaagacataaccgatcctgcaaaggtaaccagtcttattctaaagttcgtcagtggccaggtatggtggcttatgcctgtaatcgcagcactttgggaggccaaggtaggcgggtcacctgaggtccggagtttgagacccatgtaggcaacatggtgaaaccctgtctatactaaacatacaaaaattagccaggtgtggtggcacatgactgtagtcccatctacttgggaggctgaggtgggaagattgcttgaacctggaaggcggaggttgcagtgagctaagatggcaccactgcactccagcctgggccaaagagcaagactccatctcggggggaaaaaaaggtctttagtgcagaagaaactggacctgttatcccttgactccatgagtggcacagtgatcacttatataactggccatttacccagtgacttgtagcttgtttgaagttaatttctgattaaggcaagtggggattcagtagcttgtatgtatagatttaaggtagagaatctattttactacaagacaccccaaaaaaaacttagcttagaaggaatattttgcctaggttgtgtatctactagcccaatttaagaaaaaaagaaaaaatatgaaagtggttaattaggaagttgtgtgataagttttagtgttgttaattggattttgcacataattgccaacagttaaaaatctaccactattctaagactaaaatatctgtgaataatacttaaatataagcagtgatattgaaaattttcagtatacagtttgtgagatttatttttttccctttttcttcccaagctaattacagaaatagaaaacatgagacatagaatcattgagattcatcaagaaatgtttaattataatgagcatgaagttagtaaaaggtggacatttgaagaaggtgtaagtgtttttgttttgtaatagtctttaaaatacaaagtaggaataatttatttttctttcaattttgatagtactatctctgttgtaactttatttttgcatatttaagccataacttcagatgtttgtctcatttattgtaatcattatcagtttttccattttccctgatgagttttagaatgtttgaatccagatttacttgaattgcaagatatctgcttaatctgaacaattttattctaattgttcaatttttaaaagtcaacttcttggggttatactttacatacattacaattcacccattttagatatatagtaaaatgaggtaatttcccacagttttaattctttggttttttttgactgctttactgagatataattcacatgccatataattcacccatttaaagtatacagttcaatagttcttagtatattcacagatatgtacaaccatcaccacagtcaattttaaaacataatcaccacctcaaaaaataacaccttaacttttagttgtcactacccctacctcctcagctgcgaccctctacccccagtgctaagataccaccaactgctttttgtttctgtagatttccctataatggcctttcatatgaatggaatcttagaatatggaatcatttcacagatatatgtatatacattgtagtcatcacagcaatcaagatacagaactcttttagcactccaaaggtccccttggcccctttccagccagagttcccctctccactcctagcactaggcagccattgatctgctttctgtcactatggttgttcaattttaaaatattcaacaaagtataaaatgttctgtacattaaaaagcatgtaattggcaaaatggcagaatagagagaaaatgtattatttcatttgtttgtaaagcttaaggaatttaagggttaattttaaaagttttttaaattatgaaatatgattaaaaattttaatcatcaattatatttaaaattatttgtattaacactgtacatgtgcatattttggtgatattggtttactttcattggcatgttacaatttcatttcagattaaaagaccttactttcatgtgaaacctttggaaaaggcacaactaaaaaactggaaagaatacttagaatttgaaattgaaaatgggactcatgaacgagttgtggttctctttgaaagatgtgtcatatcatgtgccctctatgaggagttttggattaaggtaagaaaatcatgtgctcttaaacttgaatatattataaacattgatctagtgactaaccttttttgtacttctgttgaatgttgttcatataactatatctgttgcattaggagatggtctgcttgcaaccagatttgactgctgcatatgccaacctcgttgcctctcttcgtccttccttacagaaactagtctagtggttcaataaaggtgctgaatgggtttaaaaatagaattttatcgttctgtcacaaatttaatggcttgttcaactgtaaattattcagtatttcctcttttctgtatgtagtatgccaagtacatggaaaaccatagcattgaaggagtgaggcatgtcttcagcagagcttgtactatacatctcccaaagaaacccatggtgcatatgctttgggcagcttttgaggaacagcagggtaagagtggagaaattcagttgacatttttgagattttaagttatttcaggaaacagtgacaaattgagtggtaagggatggtgtaaagcagagtttggcaaactttttctctaaagggccagatagtaaaagccacgtgttctgactttcaggctttgtaagccattgtagccccgaaacagccataggcagtgtgtaaatatgcatggctgtttcccattattagttgctggatttagcccatgggtgattgttgccagtatctggttataaacgttattttggttgtttaaaccaaagcataaacatttaattactgtttctaggtaatattaatgaagccaggaatatcttgaaaacatttgaagaatgtgttctaggattggcaatggttcgtttacgaagagtaagtttagaacgacggcatggaaatctggaagaagctgaacatttgcttcaggatgccattaagaatgccaaatcaaataatgaatcttcattttatgctgtcaaactagcccggcatcttttcaaaatacagaaaaaccttccaaaatcaagaaaggtgcttttggaagcaatcgaaagagacaaagtatgcatttgtatttttaagagtatcttctattaaaaaaaccagtggtcagtgtattttcactgtggcaactgtgatgaaagatttggtctgtatgtaatagattttattactaaatgaggacaacagtccctctaaactgatgttgccatttaaaaatttttttcaaattgttttgaattaaaagttttagacattaagattattgggttaaaattgttgtagacattgtgatactttatattttccctttagaaattatcaacaaatttactgattactaagtagaacagaggacttgggagaatacttcataaacaaaagcataggcgttgcctatgttgtaagcacatttagaagtgagatgattttgcttctccatagagtactttttatattttttatatatcaattgaaaaaggcagtgtataggtaataggtaatttctcaagttttaggattttagttattgccaggtctgtttaagatacagatttatagcagtttgcttctagctgcagtttaagatgtttatctttttttttttgagtctgtcgcctaagctggagtgcagtggtgccatcttggctcacttcaacctctgcctcctgggttcaagtgattctccagcctcagcctcccgagtagctgggataacaggcatgcatcaccgcgtccggctgatttttgtatttttagtagacacagtttactatgttggtcaggctgatcttgaattcctgacctcagatgatttgcctgcctcggcctcccaaagtgctgggattacaggcgtaagccactgcacctgggctttttttttttttttttttttttttttgagacagagtttcattgtcattgaggctggagtgcagtagcgtgatctcagctcactgcagcttccacctcctgggttcaagccattctcttgcctcaggctcccaagtagctgggattaaaggtgtgcaccaccacgccagttaatttttgtatttttagtagagatggggttttaccatgttggccaggctggtctcaaactccagacctcaagtgatcctcctgccttggcctcccaaagtggtgggattataggcatgagccaccacgcccggttaagatgtttatctatagttgtagtaaagatttaaattatttgaagcatagagatttttttttatgttttgttttctaattgtcatggtaggtcatgtcatactaaatacaagataggctatagagttttaatttactgtcattgaacaatttgcattgtttaggaggtactaggatgatcaactgattgaaaaattcatcagtgtgttaatgaattttttcacccctttagatatatgctgaaaacatttagcatgagttgtattttaatacaattttcaatattttttcaaattgagacataaaaactaaggcattttaaatatctgtgctctaataaaaatattttagaaatattcattgatgctgctttttacacaggagaacacaaagttatacctcaatttacttgaaatggaatatagtggtgacctcaaacaaaatgaagaaaatatcctaaattgttttgacaaagctgtacatggttcattacctattaaaatgagaattacattttctcagagaaaagtggaatttcttgaagattttggttccgatgttaataagtaagatattagttatattacctatttgaatgataaatgagcattgatatttttgtatggggatttgatgattagtatagattaatacattgttaaattttaaaatgttcgcttagtttactttttcctcagatatatatgggggtaaattcaattttgtaaatgtatatgtacttaacaggaaggcataaggtttgtctttccttcaaaactgttttcccaattttagaatgacaatttaaaccatgactgaatgagagaaggcaggaaggagcaatcctgtgaaaagggaaatgggataaggattgaaccctgaaacccaaatatttaatatataggtcaataaagatggatgggattaatctccagtaggagtgctattttctgagattggagaagaggatggatatggtcccacagaacatgcctagtggcctcatcttccttcattgtaaaagccgaaagttgaggatggttgaagagaatgctccagtggatttgggaaaaggacaagtttaagattaaatttactaagagtacaaatattggctagagcattgctgaagttccagtcttatctgattgtagtaagcaaatacaccagttcctgttaggcatgtgccttttatgattattcgcatttagatttctgttgaaaccactgtagataaactgagaattagttgtgtctgggtgtttgtatatgtgtgtatatatttttgatggctgtgtaaaatttcagtgcaactaatataacagctaatgtttatattagtgtattttaatgtattaatgtatatatttgcgtgcttggcatgatgccaaatgttttatattagctatcttgcagaaaattcatagcagtagaatgagggtgtagggttctgttctcttaatagatgagaggattaaacagagattaggcattttttctgaggtcatgtagctattatcacattgtggagcgaggactgaacctacttcagagtttctgctcttaactgcttgtgtgctgtgtatttagtgtcttatgtttacactgaagaaggtacacaaaagatgagatatgtaattctagcttctagtctggttgaatgatatgattaacaggaagtaagtgtatgaggtagcaaataactgctaggagggctgtgatgtctctcgatcagaatggatttgtcatgcttcatagaggaggttgggcttcatttagttattactggattctgataaactgagcagaggacacagtggcggaagcaagttgaatctcatctaaaagtaacatctgcttgattggaggtttttgtgaagtagtggaagcgtgatcttgactgtgttgtgcattgaaagctagactgaattgatagcacatgcagtaggtagctgacagtagtaagctattggaattttgaccagtgatgttaaatgacattattttaatttggtaaaaacaggcagacaaatcggagattcaacacaagtgtcatttagtccattataagtatagggaatggagtgtctgagtatcaggactatgattttagtagtagaaattttaaaaataaaggagccgcttagaaattttcttaggcagtttcctaagtaaaaacaactttaaatatttaataaagtttgttttttgtatattccagaggatatttttttctttcctttcaggcttctgaatgcttatgatgaacatcaaacactcctgaaagaacaggattctttaaaaaggaaagcagaaaatgggtatgtcactttttgctaagtcaagaaggcgtgcttcattatggaaatgccttcaaagacaaatgtttttaagtgttacttttatgttgtaatttacatactttattttcatgatttgaaaaagtcttgagtgattcagaacttcagtaaaacaaatatacagataacattcatctattcgttaaagttcttacctgtgggagttttgaaagtttccattctgacgttttatatagatcagaagaaccagaggaaaagaaagcacatacagaagatacaacttcatcatctacacagatgattgatggtgatttacaggcaaaccaagctgtatataattatagtgcgtggtatcaagtgagtctgcataattataattctttgttcatagatgttattagcataaattaggatagtttctttttttttaaaaaaagtttttgttccaattgtgtaatacattctttggtggttaagtactagaattttagcagtgaacacttgcttgttttcttaaacatagctgctttaattatacttttacatatggaactctgccacagttctaatatgctaacatacttactttttcctttcagtacaattatcagaatccttggaattatggacaatattatcctccccctccaacctgatgggaaaaatgtaaatttcaaatgcagtgtgtgaaaagtatgaaattattattttttttaatgagggatgtaaacagtataagcttgttgtatttgataacctgtcttccttgtttctgtgtaacatgatttgtttagtaatagggggaaaatgtcaattagtagcttaccacagatactgtttcctaccatttataaaatttactttttattgaaaaactattttttgatttttgcattaagtggtctagaattcttttgcaatgcatttgcaacagaattttgtagccttaaggggtaggaagaaaaacctgactgcaaatcatgtcagtgtagtacaaaattctgaaaacacataagggctggttatttacctccttttttttttttttttttaaagaaaaaaggacttttaacctttgctgacaaggttttgtctgtttcagttatacttgtgaattgtgatctaactgcagaaaggatacattattaaaatactttgccttggaatagattataaatgagaaaatggaatgtttgcatccctttaaaaatgaaaatcatatcaaaagtatgttgtttcaggagactttgtatttagaatattcatgtaaaacttgtgaacaagctttcattttgatcaaactgatcttcatttttgtaataaaacggaagactcatccagtaattgtttatgaatttattttggggggatcaattagtaatattaaccttatgttcacctttattagtggctcattggttttgaagtacaccttttctaaattcaggtcttgatcttcctgccaagatatttctgcttttagcattttgtttcccctcaagccttatgcttttgccttctcattatacaggcaatctgtccagataattttactgggagttactccctggtttgatgaggtccttagttccaattccctaatcagaacaataatatattaacaccaaacaaatcacagtcagatcaagacagtggatcaatttttattgagccacttaagtttacaacatgaggtaaaaggaaaaagttctccttgaccagtattttacacagctgtaggaaagtattttagaccagggattcataagggatttatctctcaaaagctgggaccaagtaaacaaattttattaactccttgaattttccagttgactcttcctttacaatagtaacaagttctaactagttgtgtaaatttcttcaaggccaagttttatcattgttgctaatatccttagagctgaagcactgctatttcaatcaatatccactaattccacttcaaaagtgagttttgcatttggtggaattctgttgaagaagtcaaggtacatttgataaaaagtgcctctcccctacccccataaccttagtgtaggataggctgactagataggctcactagataaattgagcttggactaggatcctccttacctggatgctttacaagtactcctaaattagccaccacttaatgaagactattaagtactccaaaacaaaagtaatgtcattctagctgggggggggtggaacaaaaaaaatatatatacatatagagagagagtattaaagtttttatgaggtagtacataatatttactgtgcattttaagatgctaagttcaaggccaggtacggtagctcacacctgtaatcccaccactttaggaggctgaggcaggtggatcacctgaggtcaggagtttgtgaccagcctggccaacacagtgaaaccctgtctctactaaaaatacaaaaattagccaggcgtagtggtgcgcacctgtagttccagctaccagggagggtgaggcaggagaattgcttgagcccgggaggcagaggttgcagcaagctgagatcacgctgctgcactccagcctgggtgacagagcgagaccctgtctcaaaaaaaaaccaaaacaaaatatgctaacttaagagttatataatttatatgtgcatcagattggtcttgagatgcttcttcacatgggagagggagctgcagctgaccatttgatttccccgccccccccaccgagacagagcctcactctttcctccaggctggagtgcagtggcatgatcacagctcactgcaacgtctgcttcccaggttcaagtgattctcctgccacagcctccagggtagctgggattacaggcctgcaacaccacgcctggctaatttgtgtatttttagtagaggtagggtttcaccatgttggccaggctggttttgaactcctgacctcaggtgatctgccctccttggcctcccaaagtgctgggattacaggcattagccatggtgcccagcctgttcatttgattttgaaaagctaagagagctattatattcccaaatatgtttatctgctaagactacagaaagctgcctcccaaaggacttgttttttcaaacttaatctgatgggtccaagaggaatggaaccaacaaaagccataaacttaccttccctcttacctattggattggtctggtcttaatggtctggagtcattccttattttttttttaaatgttcacaaactggacttatcagtgagtattgtcattagtagtaataataaatgcttacactaacactgttgattctgtggtctccttcagttcacaactggtaatctcccacatctattccatttctaagctttgaatttaattgcctgaaattatactgtaccataaaattaccatgagccatatttgcatcgtagtttgctacagtttgtactgggcatggtaacttttcttaaactcttaaaaacattaagaattgctgtttaagcttaaacttcacagttaaggtcttgaaagttaagaatttgaataagagaaacaaaaattctagctgaggtttgaactttatatcaatagaaaatactattgcctattggaggtgctgacacataagcatctaaagatcaggaagactagtctggacaggattcttgatccagaagtttgcctagacagcatctttcacatcctcaaaggtgatctagacgttttttttttttcaactttaattatgaaggggaaaaaaggatacttggcatcaggctgtcctttctttccgtaagcccattctggttcaatctccagtcgagccttttctcctttactcatagtcaagagagcttcatcccactaaaggcaagaacaaaataaaaactaatggtattttgcaaaaagcacatgcaataccaggacagtcaagacaagattgtatgttaaaacaaacacagaatctattactatagatttcactatattctaagataatgtacttcagtgagtccctaaatctttgtcttccatttcttcaatagaaaaaaaagggtattttaagcagggcttttttaatgtgaaaagaaccttttggggctcatacctataatcccagcactttgggaggccgaggtgggcagatcacttaaggtcaggagtttgagaccagcctagctaacatagtgaaaccccatcttctactaaaaataaaaaaattagctgggtgcggtggtgggtgcctgtaatcccagctactcgggaggctgaggcaggggaatcacttgaacccagaaggtggaggttgcagtgagccaggattgagccactgcactccagtctgggcaacagagtgagactccttctcaaacaaacaaacaaaaaacaaaaaaaaaactttttgtaaactgtaacatgccatacattatgaaaaccagttagttattagcaccatcataaacctgcaacacttttacatcacaggacaaacgagtttatttttattggaatacactggcaagtactcactgtaaaattgttttaagattaccagattgtaatagtggagtcacgttggcacataaaatacatttttttctttttttcttttgagatggagtttcgctcttgttgccctggctggagtgcaatagcgtgatcttggctcactgcagcctctgcctcccgggtttaaccgattctcctgcctcagcctccctagtagttgggattacaggcatgcccagctaattttggaaatacaatttttaaaatgttacggcactaagatcttttgcaaaaggtaaaactaacttttcaaagaaacaataaaagtcttctgggttggcctctccatattttccaaatttggatcttaaagctagtttccacaaacagttaaatccacatcaccaaagggataatattcctaatattatatgctgtattgaaatgcaacaatcatataaagcacaagggacaaagttagggtggtcacatttggaaaataagaatatggtagactagccgggcaaggtggctcgtgcctgtaatcccagcactttgggaggctgaagatgaagagggcgatcacttgaggtcagcactcaagaccagcctgaccaacatgatgaaaccccatctctactaggaatgcaaaattaggtgtggtggcgcatgcctgtaatcccagctattcgggaggctgaggcaggagaatcgcttgaactcaggagacagaggttgcagtaagccgagattgcaccattgtactccagcctggacaacaagagcaaaactccgtctcaaaaaaaaagaatacggtagactagaagaaatttaccagtatgcaaataagttacagaaatagaaaaatggcccaatttgataatatacttgctatcaacttggtacgggcaggtaacaattttttttttttttttgagatggagtcttgctctgttgcccaggctggagtgcagtggcgtgatctcagctcactacaacctccacctcccaggttcaagcaattctcctgcctcagcctcccaagtagctgggactacaggcaagtgccaccatgcccagataattttttgtatttttagtagagacgggtttcacagtgttagccagtatggtctcgatctcctgaccgaccttgtgatccacccacctcggcctcccaaattgctgcaattacaggcatgagccaccacgcctggctggggcaggtaacaattataagttatgctcaactaaacctttagttttaagatgttttatattctgtatatgattgtctgaaccatatcttaggacctactgattgtacagagagtaatatattgaaggttcctataactgcatttaaataggcatttcagttattgatgtctgatgttctgagaataacaatttaaaacaaacaatgggcacaatgggcaggccttagcatgaaaacctgattcatagaaggtgacagtctgccctactcttttatcttcttttgtacagtataatggtcagtacgggtcaagcctaacttcctcttttctcaaagtttctttctgttatctctcacatataagtgtaggttaaagcatgctcatgtttgaatgattttctggtattgcagcctatgttgtatgaggtgaaaaggctgcagaaacaaactctgcttctgtgaatacttcagtgggacagatattttacctttgcaaattatatgtaaatggtacaacagttataagacattttacaggaaccttaaatttagagggccaaacattctgacaaagacttactttatgaagaaaaataataaaatgggtacacatggaagggactaatatttaagcccctactgtattaggtacttcaagttatgctcatttaatcttctaaaaaccttgaggtaggcagtactgtcctcattttatatgtagcgaaactgagaccgagataacttgtgcaagatcagctaacaatgattatacccaatctgtcagactccaaagtctgtttcctttgtattatatccccaaacctaattctttacagcaccataccagaagcagcatatgccagaatatctactgattcattggcattctttacttactcctctgataactttgcctactccgaccttaaaacttaaaggcttggcatttttcttcttctttgcacctgtaaaacagattttccttatcattaatgatatactctaatttattattaagaaatttccattggaaattattaaattccagtggaaaaatatagtggtttgatttcagaattacaatactatgtattttaaaagaaggaaaaaatttacaaagatcatccatcaataaaattctggctgtaaaaataattacattcttaacaaagggtagaggggtaggacctatacttatatcacaaaacagcatactatcctgccttttctattcaaatactaatgccttactttgggacattaaccaggtttagactgagattccttatcttttgctttccaaagaacaagaggtctttagccagccaataatcagtgaactgaagacctcttccaagtagatcttgggggaaagtatgtctggatgaaagtaggtgacagtcaggaaaaaggtactgctaactactcatctgtctgccacccaagtatttagaatctctttaagccaaaaacataagattccatttagacttacttgtttgaatattagtatcaaaaacagtcccatcttgtagtgttcctgtataccagcagtgaacaacatctccctttttgggaaagttggttttatctccctttttcagaacagatttagtatattttggtggaccct

SEQ ID NO: 11842 - DNA, 8850 bp, Homo sapiens
tgatctaccatcgggaattgaagacataaccgatcctgcaaaggtaaccagtcttattctaaagttcgtcagtggccaggtatggtggcttatgcctgtaatcgcagcactttgggaggccaaggtaggcgggtcacctgaggtccggagtttgagacccatgtaggcaacatggtgaaaccctgtctatactaaacatacaaaaattagccaggtgtggtggcacatgactgtagtcccatctacttgggaggctgaggtgggaagattgcttgaacctggaaggcggaggttgcagtgagctaagatggcaccactgcactccagcctgggccaaagagcaagactccatctcggggggaaaaaaaggtctttagtgcagaagaaactggacctgttatcccttgactccatgagtggcacagtgatcacttatataactggccatttacccagtgacttgtagcttgtttgaagttaatttctgattaaggcaagtggggattcagtagcttgtatgtatagatttaaggtagagaatctattttactacaagacaccccaaaaaaaacttagcttagaaggaatattttgcctaggttgtgtatctactagcccaatttaagaaaaaaagaaaaaatatgaaagtggttaattaggaagttgtgtgataagttttagtgttgttaattggattttgcacataattgccaacagttaaaaatctaccactattctaagactaaaatatctgtgaataatacttaaatataagcagtgatattgaaaattttcagtatacagtttgtgagatttatttttttccctttttcttcccaagctaattacagaaatagaaaacatgagacatagaatcattgagattcatcaagaaatgtttaattataatgagcatgaagttagtaaaaggtggacatttgaagaaggtgtaagtgtttttgttttgtaatagtctttaaaatacaaagtaggaataatttatttttctttcaattttgatagtactatctctgttgtaactttatttttgcatatttaagccataacttcagatgtttgtctcatttattgtaatcattatcagtttttccattttccctgatgagttttagaatgtttgaatccagatttacttgaattgcaagatatctgcttaatctgaacaattttattctaattgttcaatttttaaaagtcaacttcttggggttatactttacatacattacaattcacccattttagatatatagtaaaatgaggtaatttcccacagttttaattctttggttttttttgactgctttactgagatataattcacatgccatataattcacccatttaaagtatacagttcaatagttcttagtatattcacagatatgtacaaccatcaccacagtcaattttaaaacataatcaccacctcaaaaaataacaccttaacttttagttgtcactacccctacctcctcagctgcgaccctctacccccagtgctaagataccaccaactgctttttgtttctgtagatttccctataatggcctttcatatgaatggaatcttagaatatggaatcatttcacagatatatgtatatacattgtagtcatcacagcaatcaagatacagaactcttttagcactccaaaggtccccttggcccctttccagccagagttcccctctccactcctagcactaggcagccattgatctgctttctgtcactatggttgttcaattttaaaatattcaacaaagtataaaatgttctgtacattaaaaagcatgtaattggcaaaatggcagaatagagagaaaatgtattatttcatttgtttgtaaagcttaaggaatttaagggttaattttaaaagttttttaaattatgaaatatgattaaaaattttaatcatcaattatatttaaaattatttgtattaacactgtacatgtgcatattttggtgatattggtttactttcattggcatgttacaatttcatttcagattaaaagaccttactttcatgtgaaacctttggaaaaggcacaactaaaaaactggaaagaatacttagaatttgaaattgaaaatgggactcatgaacgagttgtggttctctttgaaagatgtgtcatatcatgtgccctctatgaggagttttggattaaggtaagaaaatcatgtgctcttaaacttgaatatattataaacattgatctagtgactaacctttttgtacttctgttgaatgttgttcatataactatatctgttgcattaagagatggtctgcttgcaaccagatttgactgctgcatatgccaacctcgttgcctctcttcgtccttccttacagaaactagtctagtggttcaataaaggtgctgaatgggtttaaaaatagaattttatcgttctgtcacaaatttaatggcttgttcaactgtaaattattcagtatttcctcttttctgtatgtagtatgccaagtacatggaaaaccatagcattgaaggagtgaggcatgtcttcagcagagcttgtactatacatctcccaaagaaacccatggtgcatatgctttgggcagcttttgaggaacagcagggtaagagtggagaaattcagttgacatttttgagattttaagttatttcaggaaacagtgacaaattgagtggtaagggatggtgtaaagcagagtttggcaaactttttctctaaagggccagatagtaaaagccacgtgttctgactttcaggctttgtaagccattgtagccccgaaacagccataggcagtgtgtaaatatgcatggctgtttcccattattagttgctggatttagcccatgggtgattgttgccagtatctggttataaacgttattttggttgtttaaaccaaagcataaacatttaattactgtttctaggtaatattaatgaagccaggaatatcttgaaaacatttgaagaatgtgttctaggattggcaatggttcgtttacgaagagtaagtttagaacgacggcatggaaatctggaagaagctgaacatttgcttcaggatgccattaagaatgccaaatcaaataatgaatcttcattttatgctgtcaaactagcccggcatcttttcaaaatacagaaaaaccttccaaaatcaagaaaggtgcttttggaagcaatcgaaagagacaaagtatgcatttgtatttttaagagtatcttctattaaaaaaaccagtggtcagtgtattttcactgtggcaactgtgatgaaagatttggtctgtatgtaatagattttattactaaatgaggacaacagtccctctaaactgatgttgccatttaaaaatttttttcaaattgttttgaattaaaagttttagacattaagattattgggttaaaattgttgtagacattgtgatactttatattttccctttagaaattatcaacaaatttactgattactaagtagaacagaggacttgggagaatacttcataaacaaaagcataggcgttgcctatgttgtaagcacatttagaagtgagatgattttgcttctccatagagtactttttatattttttatatatcaattgaaaaaggcagtgtataggtaataggtaatttctcaagttttaggattttagttattgccaggtctgtttaagatacagatttatagcagtttgcttctagctgcagtttaagatgtttatctttttttttttgagtctgtcgcctaagctggagtgcagtggtgccatcttggctcacttcaacctctgcctcctgggttcaagtgattctccagcctcagcctcccgagtagctgggattacaggcatgcatcaccgcgtccggctgatttttgtatttttagtagacacagtttactatgttggtcaggctgatcttgaattcctgacctcagatgatttgcctgcctcggcctcccaaagtgctgggattacaggcgtaagccactgcacctgggctttttttttttttttttttttttttttgagacagagtttcattgtcattgaggctggagtgcagtagcgtgatctcagctcactgcagcttccacctcctgggttcaagccattctcttgcctcaggctcccaagtagctgggattaaaggtgtgcaccaccacgccagttaatttttgtatttttagtagagatggggttttaccatgttggccaggctggtctcaaactccagacctcaagtgatcctcctgccttggcctcccaaagtggtgggattataggcatgagccaccacgcccggttaagatgtttatctatagttgtagtaaagatttaaattatttgaagcatagagatttttttttatgttttgttttctaattgtcatggtaggtcatgtcatactaaatacaagataggctatagagttttaatttactgtcattgaacaatttgcattgtttaggaggtactaggatgatcaactgattgaaaaattcatcagtgtgttaatgaattttttcacccctttagatatatgctgaaaacatttagcatgagttgtattttaatacaattttcaatattttttcaaattgagacataaaaactaaggcattttaaatatctgtgctctaataaaaatattttagaaatattcattgatgctgctttttacacaggagaacacaaagttatacctcaatttacttgaaatggaatatagtggtgacctcaaacaaaatgaagaaaatatcctaaattgttttgacaaagctgtacatggttcattacctattaaaatgagaattacattttctcagagaaaagtggaatttcttgaagattttggttccgatgttaataagtaagatattagttatattacctatttgaatgataaatgagcattgatatttttgtatggggatttgatgattagtatagattaatacattgttaaattttaaaatgttcgcttagtttactttttcctcagatatatatgggggtaaattcaattttgtaaatgtatatgtacttaacaggaaggcataaggtttgtctttccttcaaaactgttttcccaattttagaatgacaatttaaaccatgactgaatgagagaaggcaggaaggagcaatcctgtgaaaagggaaatgggataaggattgaacccccccccccaaatatttaatatataggtcaataaagatggatgggattaatctccagtaggagtgctattttctgagattggagaagaggatggatatggtcccacagaacatgcctagtggcctcatcttccttcattgtaaaagccgaaagttgaggatggttgaagagaatgctccagtggatttgggaaaaggacaagtttaagattaaatttactaagagtacaaatattggctagagcattgctgaagttccagtcttatctgattgtagtaagcaaatacaccagttcctgttaggcatgtgccttttatgattattcgcatttagatttctgttgaaaccactgtagataaactgagaattagttgtgtctgggtgtttgtatatgtgtgtatatatttttgatggctgtgtaaaatttcagtgcaactaatataacagctaatgtttatattagtgtattttaatgtattaatgtatatatttgcgtgcttggcatgatgccaaatgttttatattagctatcttgcagaaaattcatagcagtagaatgagggtgtagggttctgttctcttaatagatgagaggattaaacagagattaggcattttttctgaggtcatgtagctattatcacattgtggagcgaggactgaacctacttcagagtttctgctcttaactgcttgtgtgctgtgtatttagtgtcttatgtttacactgaagaaggtacacaaaagatgagatatgtaattctagcttctagtctggttgaatgatatgattaacaggaagtaagtgtatgaggtagcaaataactgctaggagggctgtgatgtctctcgatcagaatggatttgtcatgcttcatagaggaggttgggcttcatttagttattactggattctgataaactgagcagaggacacagtggcggaagcaagttgaatctcatctaaaagtaacatctgcttgattggaggtttttgtgaagtagtggaagcgtgatcttgactgtgttgtgcattgaaagctagactgaattgatagcacatgcagtaggtagctgacagtagtaagctattggaattttgaccagtgatgttaaatgacattattttaatttggtaaaaacaggcagacaaatcggagattcaacacaagtgtcatttagtccattataagtatagggaatggagtgtctgagtatcaggactatgattttagtagtagaaattttaaaaataaaggagccgcttagaaattttcttaggcagtttcctaagtaaaaacaactttaaatatttaataaagtttgttttttgtatattccagaggatatttttttctttcctttcaggcttctgaatgcttatgatgaacatcaaacactcctgaaagaacaggattctttaaaaaggaaagcagaaaatgggtatgtcactttttgctaagtcaagaaggcgtgcttcattatggaaatgccttcaaagacaaatgtttttaagtgttacttttatgttgtaatttacatactttattttcatgatttgaaaaagtcttgagtgattcagaacttcagtaaaacaaatatacagataacattcatctattcgttaaagttcttacctgtgggagttttgaaagtttccattctgacgttttatatagatcagaagaaccagaggaaaagaaagcacatacagaagatacaacttcatcatctacacagatgattgatggtgatttacaggcaaaccaagctgtatataattatagtgcgtggtatcaagtgagtctgcataattataattctttgttcatagatgttattagcataaattaggatagtttctttttttttaaaaaaagtttttgttccaattgtgtaatacattctttggtggttaagtactagaattttagcagtgaacacttgcttgttttcttaaacatagctgctttaattatacttttacatatggaactctgccacagttctaatatgctaacatacttactttttcctttcagtacaattatcagaatccttggaattatggacaatattatcctccccctccaacctgatgggaaaaatgtaaatttcaaatgcagtgtgtgaaaagtatgaaattattattttttttaatgagggatgtaaacagtataagcttgttgtatttgataacctgtcttccttgtttctgtgtaacatgatttgtttagtaatagggggaaaatgtcaattagtagcttaccacagatactgtttcctaccatttataaaatttactttttattgaaaaactattttttgatttttgcattaagtggtctagaattcttttgcaatgcatttgcaacagaattttgtagccttaaggggtaggaagaaaaacctgactgcaaatcatgtcagtgtagtacaaaattctgaaaacacataagggctggttatttacctccttttttttttttttttttaaagaaaaaaggacttttaacctttgctgacaaggttttgtctgtttcagttatacttgtgaattgtgatctaactgcagaaaggatacattattaaaatactttgccttggaatagattataaatgagaaaatggaatgtttgcatccctttaaaaatgaaaatcatatcaaaagtatgttgtttcaggagactttgtatttagaatattcatgtaaaacttgtgaacaagctttcattttgatcaaactgatcttcatttttgtaataaaacggaagactcatccagtaattgtttatgaatttattttggggggatcaattagtaatattaaccttatgttcacctttattagtggctcattggttttgaagtacaccttttctaaattcaggtcttgatcttcctgccaagatttttctgcttttagcattttgtttcccctcaagccttatgcttttgccttctcattatacaggcaatctgtccagataattttactgggagttactccctggtttgatgaggtccttagttccaattccctaatcagaacaataatatattaacaccaaacaaatcacagtcagatcaagacagtggatcaatttttattgagccacttaagtttacaacatgaggtaaaaggaaaaagttctccttgaccagtattttacacagctgtaggaaagtattttagaccagggattcataagggatttatctctcaaaagctgggaccaagtaaacaaattttattaactccttgaattttccagttgactcttcctttacaatagtaacaagttctaactagttgtgtaaatttcttcaaggccaagttttatcattgttgctaatatccttagagctgaagcactgctatttcaatcaatatccactaattccacttcaaaagtgagttttgcatttggtggaattctgttgaagaagtcaaggtacatttgataaaaagtgcctctcccctacccccataaccttagtgtaggataggctgactagataggctcactagataaattgagcttggactaggatcctccttacctggatgctttacaagtactcctaaattagccaccacttaatgaag

SEQ ID NO: 11843 - DNA, 291 bp, Homo sapiens
ccttttttttttttttttttttttttttttttcagatggagtcttgctgtgtcacctaggctggagtgcagtggcatgatctcggctcattgcaagctctgcctcccgggttcacgccattctcccgcctcagcctcccaaagtagctgggagtacaggcgcccgccaccacacccagctaatttttgtttgtatttttagtagagacggggtttcaccatgttagccaggatggtctccatctcctgacctcgtgatctgcccgcctcggcctcccaaagtgctgggatt

SEQ ID NO: 11844 - DNA, 476 bp, Homo sapiens
ggctggcagtacctaccatttatggtcaaacaatttttatagggtatttatttgcatttgtcactcttgtggcatttgtagctaatattttctctctttgttggcaggtgcgttaaacctctacagtttgtcaagctttgcagtgcaagcctctgtattacactgcagcttaacaagtagggcagggcttttctctcacttacatttatttctcattttccaaacaatatagttggtttgctagtcacatttgctacgtcttattgcatttttggtcagacgctgtcattgatgctctaatgggtctgtgccctatggtctgtaacccaaagcctgcccacacaacccggtcagaatgcagggactgctgcgctttgaagatcaagactctgcacgtggggatcagaacattgccatgttctatccaacctccacccaaatggtaatggtagattatttaaacaaaattccagtaa

SEQ ID NO: 11845 - DNA, 335 bp, Homo sapiens
cccaaagtgctgggattacaggcgtgagccactgcctctggcctctgtgtttaaccatttgcggaactgccaaactgttttccaatttggtggcaccattcattgtagattcccaccagcaatgccccagggttctcatctctccatctcctcgttagcacttgtaattgtctacctttgattatagccaccctagtgaatgtggaatggcttctcatggtggttttgatttgcatttccctggtgtttagcatcttttcacgtgcttcttggccatttgtatatcttcttttttttggagaaatgtctattaaaatcctttgcccatttttaaa

SEQ ID NO: 11846 - DNA, 88 bp, Homo sapiens
ttttttttttttttgagacagtgtctcactctgtcacccagactggagggtagtggcacaatcttggctcactgcaacctccgcctcc

SEQ ID NO: 11847 - DNA, 6162 bp, Homo sapiens
tagtgattccacagcagagggcctgggctccagttccacctcatagagtccagcccacttgttctgggatggcagaagcatcactgaccttattccccaggtccgggacactctgatgctggcagacaagcccttcttcctggtgctggaggaagatggcacaactgtagagacagaagagtacttccaagccctggcaggggatacagtgttcatggtcctccagaaggggcagaaatggcagcccccatcagaacaggtgaggtcccacctgttgcacctgatgggggagaaaatcgggactctgggagatgtcttcaaggggtgctaaccatttgcttgtctcaatgcaggggacaaggcacccactgtccctctcccataagcctgccaagaagattgatgtggcccgtgtaacgtttgatctgtacaagctgaacccacaggacttcattggctgcctgaacgtgaaggcgactttttatgatacatactccctttcctatgatctgcactgctgtggggccaagcgcatcatgaagtgagcaaattgggatttcctggggacagggtgggtacaggcaatgggagagcccctatctgtccacatggactcagccttctcagcgcctgggtctggctttggtgctgacaaagcatagcctgtatcagacaacacggagcctgatgggctctcgaagtgctgtggacgacaccggcgtgtgcccaggggtgcacgtgttcctcctggtggaacctggatgcattttatttttatgactactttccactctagtaactacattttttcattgaaataggaagttttcctaagtagtcttctagtcaattttataaaaatgaacatgtgttggccaggcacggtggctcatgcctgtaatcccagcactttgagaggccaaggtgggtggatcacttgaggtcaggagtttgagaccagcctggccaacatggcaaaacctaatctctacaaaaatatgaaaactagctggacatcgtggtgcatgcctgtaatcccaactactcaggaggctgaagcaggagaatcgcttgaagctaggaggcagaggttgcagtgagccaagattctgccactgcactccagcctgggcaaaagagcaagactgtctcggaaaaaaaaacaaaaaaaagcacgtgtcaaagacttaattgaattcattaattaatgagagaactagcaagaagttacaatcagctcaaaggagatttcaaaatcccacatatatacaggtccaggaagaatgatgagataggttgagtgcagcagctctcacctgggatcccagcactttgggaggtcaaggcaggaggatctgttgagcccatgagtttgagaccagcctcggcaacacagtgagaccctgtctttatcacacgcccgtgtgtgcgcacacacacacacacacaaaatgctggcagtggtagtatgtacctataatcccagctaggtgggaggattgcttgagcccaggagtttgaggctgcagtgagatatgaccatactactgtgtactccagcctgggcaacagcatgagaccttgtctctaaaacgaagaaaaagagagataaatgtatacatacaaaattgggctttttcccctgtgggaatgggagggatgaaataatcttccctccatatgacagaattaatttgcaagtcttatggaccagagtcatttgtactatataatgaacttttcttaaaacttatttttgaaagtctaaccaaatgtctcaagaagcatgagaatatgtgaggttagaacccgctcccgcttccccatttcccctactttccaaacatccaaccccatgttaattgctttatgctatttcagccttatgaccctgggtggcaggtgcaatcccattttacccatgaggaagctgaagctcaaagctagagcagtttgctgaagttcacccagctaataagactggattaggacttaggcctgcctgattcaggttctgttctcagtacatgctcatgccaggcatggatgtcttcatgtccagcactctgaacatgagctagactgcaggtggcttggacaggcctcagagtctagaacagagtgtctcaaggtgcagaaccatgttatggagattaatctggttggtccaaagtagtagtagaaaaataaaagccttatgaaatgagctggggttttgcatgagaaagtagggaggttccgggcatctcagttaaggtggaattgcaggtcctcgcactaatcttgatcccatctgcagcatctgttcctatttgcacatcgctctagaattgatgaaatgcttttagtgctaccacctcagtggtattcaaatgttattaatgaagaaaacaaacataatgaaaccaatcccttccaggccagcatgggaataagggggtgcagggagggggtacactcttgtttttatttattatgtatttatttatttttgagacagagactcactctgtcacccaggctggagtgcagtggcacaatctcagctcactacaacctctgtctcccaggttcaagtgattttcgtgcctcagcttcccgagtagctgagattacaggtgtctgccaccacgcccggctaattttttgtattttttagtagagacggggtttcgccatgttggccaggctggtctcaaactcctgacctcaaatgatccacccacctcggccacctaaagttataggattacaggcatgagccaccaagcccagccttgtgttttttgtttgattgttttttgagactgaatcttgctctgtcacccaggctggagtgcagtggtgccacctcggctcactgtgacctccgcctcctgggttcaagcgattctcctgcctcaggctctggagtaactgggattacagtcacccaccactatgcctgcctagtttttgtatttttagtagagacagagattcgccatgttggccatgctagtctcaaactcctgacctcaggttacccgccctccatggcctcccaaagtgctaggattacaggcgtgaacgccatgcccgacctacttcgtggttttgacttgcgtgccctctcattccacccagggaagctttccgctgggccctcttcagcatgcaggccacaggccacgtactgcttggcacctcctgttacctgcagcagctcctcgatgctacggaggaagggcagccccccaagggcaaggcctcatcccttatcccgacctgtctgaagatactgcagtgaaagcccaagtccttggaagctttccccagtgaaggactgactgggggcctcacgcttaactggtagtgcccacaagcctggcagctgtagagccgcgaacctccccacacctccctcaccgcgcaggaccctgagtgaggaggaggagctggaaacctggggtgggttggccaaaggagaacctcaagctcctggcctgatccagctccttcctgcccaaggcagcttagcccatccagactggtcctgaagtctgtccctccattggcatgaagtctgccccttagcaatctggcctcgcaggctgtactttcatggtgctctctaccttctggcccccatcccggaacattcctgagtgaattcgcaagcgcactagcatgtgatattagggagtttgcaataaattattgaggctgatgtatcttctttgcctgtgttctttggggtggggttttatctggaaggttggagggggctaaaggaagagacgaatctattgtcaaagtattctctttaatgtaggattacagctaatggcactttttctaccaaagaagaaaaaaaaaaacagctgggcacagtgacacgtgcctgcagtcccagatactcagcaagctggggtggaagcatcccttgagaccaggagttcaaggccaggctggagcacaatagcaagaccccaggctccttaaaaaacaaaattgcagttgattttgaaactaaagtcagctgaatttgaggcttgagctgaccatgtaattgataccataagtaacaatttcctaattaaattcacctatcagaggagcttcaattgagcaggtgggattaagtcactcttctaatttctcagtgtcccattttataataaccgtttaagtggttaggtgaaaaagtactactcaagctgtaaggcatttctccatcaatgcccatcctaacttgccagacagcttatctttcatgttcaggactttcaacctcgggatttcaaagtgggctcataggtagccccaaagagtaggagcttctcatcagtgtgagctggcattttccagtattggacaactcaagacaagcatgaaaggctgaacttaggctgggcatggtggctcacgccgtaatcccagcactttgggaggccgagccaggcagattacctgaggtcaggagttcaagaccagcctgaccaacatggtgaaacccggtttctattaaaaacaaaaaaattagctggccagcatggcaggcgcctgtactcccagctgtttgggaggctgaggcagtagaatcgcttgaacctgggaggcagaggttgtggtaagccaagatcgtgccactgcactacagcctgggtgacagagcgagactccatctcaaaaaaaaaaaaaaaaggctgaacttgtagaacttgtaggtgactgttttatttagtctgtgactgaaagatttaaaaacttggccaggtgcagtggctcatgccggatatcccggcactttgggaggctgaggcaggagtatcgcttgaggccaggagttcaagagcagcctgggcaacatagccagaccctgtctctacactagataataaaaaaaaattagcagagcatggtggctgtagtcccagctactcaggagcctgaggcaggaggttcactggagcccagtaggtcgcggctgcagtgagctatgattgtgccactgcactccagcctgggcaacagagtgagagcctgtctctgggaaaaaaaaaaaagaggattcaaaaactctatcacagccagccgcagtggctcacgcctgtaatcccagcgctttgggaggccaaggcgggtggatcacaaggtcaggcatttgagagcagcctggccaacatggccaaatcccgtctctactaaaagtacaaaatattggccgggcatggtggtgggcacctgtaatctcagctactcggggggctgaggcaggagaattgcttgaacctgggaggtgcaggttgcagtgagccgagattgtgccattgcactctagcctggacgacagagtgagactccgtctcaaaaaagaaacaaacaaacaaaaaacgaaaaacaaaacaaaacctattgtttcactactcttactataaagcctatttggatgtagtaaatactaaggcaaaggcctatattaccaaagatggtctgggagctatttatggcagcggacccaaaccctgcagcctatgggcaaagcggctgaagctcgctgaagagggcctgctattccgggctctcctgctcttttgcagttatggctggaggctggcccggtgccaggctggctccatggggtgggctgtctggcagggaggcctgatgtttgtattagcacagaagctatcccagtccacccttgatgaagctgtggcggggcctacctgctccttccgtaaagtgctcagtaacagagttggagtgggggtgggaggctcggtatttgtcccaagcttccctcctcctgagatccggagtttcacaagtgaatcttgagcaactgcccatggtctcttggcattgagcccagggaaaacaaggttctttcttttcttccaggagctcgaggctaatggagtcaaagcagctgtggtcagtgaacagaaaaggcagcctctgatgaggcttgggggctggggagggaagattccaaacagcaaaggagtttgagcctctgtagggcctggcggtcctagtgggggaacggcctttcctggggccccccgcacagccaggagcagctgtcgtcaaggtggactgtgtcccagcccctccagctcagccttttcatctgttcaagctggtgctcgggagtgcacaggatgcctttcagaa

SEQ ID NO: 11848 - DNA, 5769 bp, Homo sapiens
  SITE (1540): n equals a,t,g, or c
acgaaaaagcgactttttatgatacatactccctttcctatgatctgcactgctgtggggccaagcgcatcatgaagtgagcaaattgggatttcctggggacagggtgggtacaggcaatgggagagcccctatctgtccacatggactcagccttctcagcgcctgggtctggctttggtgctgacaaagcatagcctgtatcagacaacacggagcctgatgggctctcgaagtgctgtggacgacaccggcgtgtgcccaggggtgcacgtgttcctcctggtggaacctggatgcattttatttttatgactactttccactctagtaactacattttttcattgaaataggaagttttcctaagtagtcttctagtcaattttataaaaatgaacatgtgttggccaggcacggtggctcatgcctgtaatcccagcactttgagaggccaaggtgggtggatcacttgaggtcaggagtttgagaccagcctggccaacatggcaaaacctaatctctacaaaaatatgaaaactagctggacatcgtggtgcatgcctgtaatcccaactactcaggaggctgaagcaggagaatcgcttgaagctaggaggcagaggttgcagtgagccaagattctgccactgcactccagcctgggcaaaagagcaagactgtctcggaaaaaaaaacaaaaaaaagcacgtgtcaaagacttaattgaattcattaattaatgagagaactagcaagaagttacaatcagctcaaaggagatttcaaaatcccacatatatacaggtccaggaagaatgatgagataggttgagtgcagcagctctcacctgggatcccagcactttgggaggtcaaggcaggaggatctgttgagcccatgagtttgagaccagcctcggcaacacagtgagaccctgtctttatcacacgcccgtgtgtgcgcacacacacacacacacaaaatgctggcagtggtagtatgtacctataatcccagctaggtgggaggattgcttgagcccaggagtttgaggctgcagtgagatatgaccatactactgtgtactccagcctgggcaacagcatgagaccttgtctctaaaacgaagaaaaagagagataaatgtatacatacaaaattgggctttttcccctgtgggaatgggagggatgaaataatcttccctccatatgacagaattaatttgcaagtcttatggaccagagtcatttgtactatataatgaacttttcttaaaacttatttttgaaagtctaaccaaatgtctcaagaagcatgagaatatgtgaggttagaacccgctcccgcttccccatttcccctactttccaaacatccaaccccatgttaattgctttatgctatttcagccttatgaccctgggtggcaggtgcaatcccattttacccatgaggaagctgaagctcaaagctagagcagtttgctgaagttcacccagctaataagactggattaggacttaggcctgcctnttcaggttctgttctcagtacatgctcatgccaggcatgggatgtcttcatgtccagcactctgaacatgagctagactgcaggtggcttggacaggcctcagagtctagaacagagtgtctcaaggtgcagaaccatgttatggagattaatctggttggtccaaagtagtagtagaaaaataaaagccttatgaaatgagctggggttttgcatgagaaagtagggaggttccgggcatctcagttaaggtggaattgcaggtcctcgcactaatcttgatcccatctgcagcatctgttcctatttgcacatcgctctagaattgatgaaatgcttttagtgctaccacctcagtggtattcaaatgttattaatgaagaaaacaaacataatgaaaccaatcccttccaggccagcatgggaataagggggtgcagggagggggtacactcttgtttttatttattatgtatttatttatttttgagacagagactcactctgtcacccaggctggagtgcagtggcacaatctcagctcactacaacctctgtctcccaggttcaagtgattttcgtgcctcagcttcccgagtagctgagattacaggtgtctgccaccacgcccggctaattttttgtattttttagtagagacggggtttcgccatgttggccaggctggtctcaaactcctgacctcaaatgatccacccacctcggccacctaaagttataggattacaggcatgagccaccaagcccagccttgtgttttttgtttgattgttttttgagactgaatcttgctctgtcacccaggctggagtgcagtggtgccacctcggctcactgtgacctccgcctcctgggttcaagcgattctcctgcctcaggctctggagtaactgggattacagtcacccaccactatgcctgcctagtttttgtatttttagtagagacagagattcgccatgttggccatgctagtctcaaactcctgacctcaggttacccgccctccatggcctcccaaagtgctaggattacaggcgtgaacgccatgcccgacctacttcgtggttttgacttgcgtgccctctcattccacccagggaagctttccgctgggccctcttcagcatgcaggccacaggccacgtactgcttggcacctcctgttacctgcagcagctcctcgatgctacggaggaagggcagccccccaagggcaaggcctcatcccttatcccgacctgtctgaagatactgcagtgaaagcccaagtccttggaagctttccccagtgaaggactgactgggggcctcacgcttaactggtagtgcccacaagcctggcagctgtagagccgcgaacctccccacacctccctcaccgcgcaggaccctgagtgaggaggaggagctggaaacctggggtgggttggccaaaggagaacctcaagctcctggcctgatccagctccttcctgcccaaggcagcttagcccatccagactggtcctgaagtctgtccctccattggcatgaagtctgccccttagcaatccggcctcgcaggctgtactttcatggtgctctctaccttctggcccccatcccggaacattcctgagtgaattcgcaagcgcactagcatgtgatattagggagtttgcaataaattattgaggctgatgtatcttctttgcctgtgctctttggggtggggttttatctggaaggttggagggggctaaaggaagagacgaatctattgtcaaagtattctctttaatgtaggattacagctaatggcactttttctaccaaagaagaaaaaaaaaaacagctgggcacagtgacacgtgcctgcagtcccagatactcagcaagctggggtggaagcatcccttgagaccaggagttcaaggccaggctggagcacaatagcaagaccccaggctccttaaaaaacaaaattgcagttgattttgaaactaaagtcagctgaatttgaggcttgagctgaccatgtaattgataccataagtaacaatttcctaattaaattcacctatcagaggagcttcaattgagcaggtgggattaagtcactcttctaatttctcagtgtcccattttataataaccgtttaagtggttaggtgaaaaagtactactcaagctgtaaggcatttctccatcaatgcccatcctaacttgccagacagcttatctttcatgttcaggactttcaacctcgggatttcaaagtgggctcataggtagccccaaagagtaggagcttctcatcagtgtgagctggcattttccagtattggacaactcaagacaagcatgaaaggctgaacttaggctgggcatggtggctcacgccgtaatcccagcactttgggaggccgagccaggcagattacctgaggtcaggagttcaagaccagcctgaccaacatggtgaaacccggtttctattaaaaacaaaaaaattagctggccagcatggcaggcgcctgtactcccagctgtttgggaggctgaggcagtagaatcgcttgaacctgggaggcagaggttgtggtaagccaagatcgtgccactgcactacagcctgggtgacagagcgagactccatctcaaaaaaaaaaaaaaaaaaggctgaacttgtagaacttgtagatgactgttttatttagtctgtgactgaaagatttaaaaacttggccaggtgcagtggctcatgcctgatatcccggcactttgggaggctgaggcaggagtatcgcttgaggccaggagttcaagagcagcctgggcaacatagccagaccctgtctctacactagataataaaaaaaaattagcagagcatggtggctgtagtcccagctactcaggagcctgaggcaggaggttcactggagcccagtaggtcgcggctgcagtgagctatgattgtgccactgcactccagcctgggcaacagagtgagagcctgtctctgggaaaaaaaaaaaagaggattcaaaaactctatcacagccagccgcagtggctcacgcctgtaatcccagcgctttgggaggccaaggcgggtggatcacaaggtcaggcatttgagagcagcctggccaacatggccaaatcccgtctctactaaaagtacaaaatattggccgggcatggtggtgggcacctgtaatctcagctactcggggggctgaggcaggagaattgcttgaacctgggaggtgcaggttgcagtgagccgagattgtgccattgcactctagcctggacgacagagtgagactccgtctcaaaaaagaaacaaacaaacaaaaaacgaaaaacaaaacaaaacctattgtttcactactcttactataaagcctatttggatgtagtaaatactaaggcaaaggcctatattaccaaagatggtctgggagctatttatggcagcggacccaaaccctgcagcctatgggcaaagcggctgaagctcgctgaagagggcctgctattccgggctctcctgctcttttgcagttatggctggaggctggcccggtgccaggctggctccatggggtgggctgtctggcagggaggcctgatgtttgtattagcacagaagctatcccagtccacccttgatgaagctgtggcggggcctacctgctccttccgtaaagtgctcagtaacagagttggagtgggggtgggaggctcggtatttgtcccaagcttccctcctcctgagatccggagtttcacaagtgaatcttgagcaactgcccatggtctcttggcattgagcccagggaaaacaaggttctttcttttcttccaggagctcgaggctaatggagtcaaagcagctgtggtcagtgaacagaaaaggcagcctctgatgaggcttgggggctggggagggaagattccaaacagcaaaggagtttgagcctctgtagggcctggcggtcctagtgggggaacggcctttcctggggccccccgcacagccaggagcagctgtcgtcaaggtggactgtgtcccagcccctccagctcagccttttcatctgttcaagctggtgctcgggagtgcacaggatgcctttcagaagaattctaaatcccgggggcctgtgatgccacagtcacatgtctgagcccaaaacaagagaaccacttgt

SEQ ID NO: 11849 - DNA, 6261 bp, Homo sapiens
aagaggtaccatgataaagtctctgggtagtgattccacagcagagggcctgggctccagttccacctcatagagtccagcccacttgttctgggatggcagaagcatcactgaccttattccccaggtccgggacactctgatgctggcagacaagcccttcttcctggtgctggaggaagatggcacaactgtagagacagaagagtacttccaagccctggcaggggatacagtgttcatggtcctccagaaggggcagaaatggcagcccccatcagaacaggtgaggtcccacctgttgcacctgatgggggagaaaatcgggactctgggagatgtcttcaaggggtgctaaccatttgcttgtctcaatgcaggggacaaggcacccactgtccctctcccataagcctgccaagaagattgatgtggcccgtgtaacgtttgatctgtacaagctgaacccacaggacttcattggctgcctgaacgtgaaggcgactttttatgatacatactccctttcctatgatctgcactgctgtggggccaagcgcatcatgaagtgagcaaattgggatttcctggggacagggtgggtacaggcaatgggagagcccctatctgtccacatggactcagccttctcagcgcctgggtctggctttggtgctgacaaagcatagcctgtatcagacaacacggagcctgatgggctctcgaagtgctgtggacgacaccggcgtgtgcccaggggtgcacgtgttcctcctggtggaacctggatgcattttatttttatgactactttccactctagtaactacattttttcattgaaataggaagttttcctaagtagtcttctagtcaattttataaaaatgaacatgtgttggccaggcacggtggctcatgcctgtaatcccagcactttgagaggccaaggtgggtggatcacttgaggtcaggagtttgagaccagcctggccaacatggcaaaacctaatctctacaaaaatatgaaaactagctggacatcgtggtgcatgcctgtaatcccaactactcaggaggctgaagcaggagaatcgcttgaagctaggaggcagaggttgcagtgagccaagattctgccactgcactccagcctgggcaaaagagcaagactgtctcggaaaaaaaaacaaaaaaaagcacgtgtcaaagacttaattgaattcattaattaatgagagaactagcaagaagttacaatcagctcaaaggagatttcaaaatcccacatatatacaggtccaggaagaatgatgagataggttgagtgcagcagctctcacctgggatcccagcactttgggaggtcaaggcaggaggatctgttgagcccatgagtttgagaccagcctcggcaacacagtgagaccctgtctttatcacacgcccgtgtgtgcgcacacacacacacacacaaaatgctggcagtggtagtatgtacctataatcccagctaggtgggaggattgcttgagcccaggagtttgaggctgcagtgagatatgaccatactactgtgtactccagcctgggcaacagcatgagaccttgtctctaaaacgaagaaaaagagagataaatgtatacatacaaaattgggctttttcccctgtgggaatgggagggatgaaataatcttccctccatatgacagaattaatttgcaagtcttatggaccagagtcatttgtactatataatgaacttttcttaaaacttatttttgaaagtctaaccaaatgtctcaagaagcatgagaatatgtgaggttagaacccgctcccgcttccccatttcccctactttccaaacatccaaccccatgttaattgctttatgctatttcagccttatgaccctgggtggcaggtgcaatcccattttacccatgaggaagctgaagctcaaagctagagcagtttgctgaagttcacccagctaataagactggattaggacttaggcctgcctgattcaggttctgttctcagtacatgctcatgccaggcatggatgtcttcatgtccagcactctgaacatgagctagactgcaggtggcttggacaggcctcagagtctagaacagagtgtctcaaggtgcagaaccatgttatggagattaatctggttggtccaaagtagtagtagaaaaataaaagccttatgaaatgagctggggttttgcatgagaaagtagggaggttccgggcatctcagttaaggtggaattgcaggtcctcgcactaatcttgatcccatctgcagcatctgttcctatttgcacatcgctctagaattgatgaaatgcttttagtgctaccacctcagtggtattcaaatgttattaatgaagaaaacaaacataatgaaaccaatcccttccaggccagcatgggaataagggggtgcagggagggggtacactcttgtttttatttattatgtatttatttatttttgagacagagactcactctgtcacccaggctggagtgcagtggcacaatctcagctcactacaacctctgtctcccaggttcaagtgattttcgtgcctcagcttcccgagtagctgagattacaggtgtctgccaccacgcccggctaattttttgtattttttagtagagacggggtttcgccatgttggccaggctggtctcaaactcctgacctcaaatgatccacccacctcggccacctaaagttataggattacaggcatgagccaccaagcccagccttgtgttttttgtttgattgttttttgagactgaatcttgctctgtcacccaggctggagtgcagtggtgccacctcggctcactgtgacctccgcctcctgggttcaagcgattctcctgcctcaggctctggagtaactgggattacagtcacccaccactatgcctgcctagtttttgtatttttagtagagacagagattcgccatgttggccatgctagtctcaaactcctgacctcaggttacccgccctccatggcctcccaaagtgctaggattacaggcgtgaacgccatgcccgacctacttcgtggttttgacttgcgtgccctctcattccacccagggaagctttccgctgggccctcttcagcatgcaggccacaggccacgtactgcttggcacctcctgttacctgcagcagctcctcgatgctacggaggaagggcagccccccaagggcaaggcctcatcccttatcccgacctgtctgaagatactgcagtgaaagcccaagtccttggaagctttccccagtgaaggactgactgggggcctcacgcttaactggtagtgcccacaagcctggcagctgtagagccgcgaacctccccacacctccctcaccgcgcaggaccctgagtgaggaggaggagctggaaacctggggtgggttggccaaaggagaacctcaagctcctggcctgatccagctccttcctgcccaaggcagcttagcccatccagactggtcctgaagtctgtccctccattggcatgaagtctgccccttagcaatccggcctcgcaggctgtactttcatggtgctctctaccttctggcccccatcccggaacattcctgagtgaattcgcaagcgcactagcatgtgatattagggagtttgcaataaattattgaggctgatgtatcttctttgcctgtgttctttggggtggggttttatctggaaggttggagggggctaaaggaagagacgaatctattgtcaaagtattctctttaatgtaggattacagctaatggcactttttctaccaaagaagaaaaaaaaaaacagctgggcacagtgacacgtgcctgcagtcccagatactcagcaagctggggtggaagcatcccttgagaccaggagttcaaggccaggctggagcacaatagcaagaccccaggctccttaaaaaacaaaattgcagttgattttgaaactaaagtcagctgaatttgaggcttgagctgaccatgtaattgataccataagtaacaatttcctaattaaattcacctatcagaggagcttcaattgagcaggtgggattaagtcactcttctaatttctcagtgtcccattttataataaccgtttaagtggttaggtgaaaaagtactactcaagctgtaaggcatttctccatcaatgcccatcctaacttgccagacagcttatctttcatgttcaggactttcaacctcgggatttcaaagtgggctcataggtagccccaaagagtaggagcttctcatcagtgtgagctggcattttccagtattggacaactcaagacaagcatgaaaggctgaacttaggctgggcatggtggctcacgccgtaatcccagcactttgggaggccgagccaggcagattacctgaggtcaggagttcaagaccagcctgaccaacatggtgaaacccggtttctattaaaaacaaaaaaattagctggccagcatggcaggcgcctgtactcccagctgtttgggaggctgaggcagtagaatcgcttgaacctgggaggcagaggttgtggtaagccaagatcgtgccactgcactacagcctgggtgacagagcgagactccatctcaaaaaaaaaaaaaaaaaaggctgaacttgtagaacttgtagatgactgttttatttagtctgtgactgaaagatttaaaaacttggccaggtgcagtggctcatgcctgatatcccggcactttgggaggctgaggcaggagtatcgcttgaggccaggagttcaagagcagcctgggcaacatagccagaccctgtctctacactagataataaaaaaaaattagcagagcatggtggctgtagtcccagctactcaggagcctgaggcaggaggttcactggagcccagtaggtcgcggctgcagtgagctatgattgtgccactgcactccagcctgggcaacagagtgagagcctgtctctgggaaaaaaaaaaaagaggattcaaaaactctatcacagccagccgcagtggctcacgcctgtaatcccagcgctttgggaggccaaggcgggtggatcacaaggtcaggcatttgagagcagcctggccaacatggccaaatcccgtctctactaaaagtacaaaatattggccgggcatggtggtgggcacctgtaatctcagctactcggggggctgaggcaggagaattgcttgaacctgggaggtgcaggttgcagtgagccgagattgtgccattgcactctagcctggacgacagagtgagactccgtctcaaaaaagaaacaaacaaacaaaaaacgaaaaacaaaacaaaacctattgtttcactactcttactataaagcctatttggatgtagtaaatactaaggcaaaggcctatattaccaaagatggtctgggagctatttatggcagcggacccaaaccctgcagcctatgggcaaagcggctgaagctcgctgaagagggcctgctattccgggctctcctgctcttttgcagttatggctggaggctggcccggtgccaggctggctccatggggtgggctgtctggcagggaggcctgatgtttgtattagcacagaagctatcccagtccacccttgatgaagctgtggcggggcctacctgctccttccgtaaagtgctcagtaacagagttggagtgggggtgggaggctcggtatttgtcccaagcttccctcctcctgagatccggagtttcacaagtgaatcttgagcaactgcccatggtctcttggcattgagcccagggaaaacaaggttctttcttttcttccaggagctcgaggctaatggagtcaaagcagctgtggtcagtgaacagaaaaggcagcctctgatgaggcttgggggctggggagggaagattccaaacagcaaaggagtttgagcctctgtagggcctggcggtcctagtgggggaacggcctttcctggggccccccgcacagccaggagcagctgtcgtcaaggtggactgtgtcccagcccctccagctcagccttttcatctgttcaagctggtgctcgggagtgcacaggatgcctttcagaagaattctaaatcccgggggcctgtgatgccacagtcacatgtctgagcccaaaacaagagaaccacttgt

SEQ ID NO: 11850 - DNA, 6232 bp, Homo sapiens
tagtgattccacagcagagggcctgggctccagttccacctcatagagtccagcccacttgttctgggatggcagaagcatcactgaccttattccccaggtccgggacactctgatgctggcagacaagcccttcttcctggtgctggaggaagatggcacaactgtagagacagaagagtacttccaagccctggcaggggatacagtgttcatggtcctccagaaggggcagaaatggcagcccccatcagaacaggtgaggtcccacctgttgcacctgatgggggagaaaatcgggactctgggagatgtcttcaaggggtgctaaccatttgcttgtctcaatgcaggggacaaggcacccactgtccctctcccataagcctgccaagaagattgatgtggcccgtgtaacgtttgatctgtacaagctgaacccacaggacttcattggctgcctgaacgtgaaggcgactttttatgatacatactccctttcctatgatctgcactgctgtggggccaagcgcatcatgaagtgagcaaattgggatttcctggggacagggtgggtacaggcaatgggagagcccctatctgtccacatggactcagccttctcagcgcctgggtctggctttggtgctgacaaagcatagcctgtatcagacaacacggagcctgatgggctctcgaagtgctgtggacgacaccggcgtgtgcccaggggtgcacgtgttcctcctggtggaacctggatgcattttatttttatgactactttccactctagtaactacattttttcattgaaataggaagttttcctaagtagtcttctagtcaattttataaaaatgaacatgtgttggccaggcacggtggctcatgcctgtaatcccagcactttgagaggccaaggtgggtggatcacttgaggtcaggagtttgagaccagcctggccaacatggcaaaacctaatctctacaaaaatatgaaaactagctggacatcgtggtgcatgcctgtaatcccaactactcaggaggctgaagcaggagaatcgcttgaagctaggaggcagaggttgcagtgagccaagattctgccactgcactccagcctgggcaaaagagcaagactgtctcggaaaaaaaaacaaaaaaaagcacgtgtcaaagacttaattgaattcattaattaatgagagaactagcaagaagttacaatcagctcaaaggagatttcaaaatcccacatatatacaggtccaggaagaatgatgagataggttgagtgcagcagctctcacctgggatcccagcactttgggaggtcaaggcaggaggatctgttgagcccatgagtttgagaccagcctcggcaacacagtgagaccctgtctttatcacacgcccgtgtgtgcgcacacacacacacacacaaaatgctggcagtggtagtatgtacctataatcccagctaggtgggaggattgcttgagcccaggagtttgaggctgcagtgagatatgaccatactactgtgtactccagcctgggcaacagcatgagaccttgtctctaaaacgaagaaaaagagagataaatgtatacatacaaaattgggctttttcccctgtgggaatgggagggatgaaataatcttccctccatatgacagaattaatttgcaagtcttatggaccagagtcatttgtactatataatgaacttttcttaaaacttatttttgaaagtctaaccaaatgtctcaagaagcatgagaatatgtgaggttagaacccgctcccgcttccccatttcccctactttccaaacatccaaccccatgttaattgctttatgctatttcagccttatgaccctgggtggcaggtgcaatcccattttacccatgaggaagctgaagctcaaagctagagcagtttgctgaagttcacccagctaataagactggattaggacttaggcctgcctgattcaggttctgttctcagtacatgctcatgccaggcatggatgtcttcatgtccagcactctgaacatgagctagactgcaggtggcttggacaggcctcagagtctagaacagagtgtctcaaggtgcagaaccatgttatggagattaatctggttggtccaaagtagtagtagaaaaataaaagccttatgaaatgagctggggttttgcatgagaaagtagggaggttccgggcatctcagttaaggtggaattgcaggtcctcgcactaatcttgatcccatctgcagcatctgttcctatttgcacatcgctctagaattgatgaaatgcttttagtgctaccacctcagtggtattcaaatgttattaatgaagaaaacaaacataatgaaaccaatcccttccaggccagcatgggaataagggggtgcagggagggggtacactcttgtttttatttattatgtatttatttatttttgagacagagactcactctgtcacccaggctggagtgcagtggcacaatctcagctcactacaacctctgtctcccaggttcaagtgattttcgtgcctcatcttcccgagtagctgagattacaggtgtctgccaccacgcccggctaattttttgtattttttagtagagacggggtttcgccatgttggccaggctggtctcaaactcctgacctcaaatgatccacccacctcggccacctaaagttataggattacaggcatgagccaccaagcccagccttgtgttttttgtttgattgttttttgagactgaatcttgctctgtcacccaggctggagtgcagtggtgccacctcggctcactgtgacctccgcctcctgggttcaagcgattctcctgcctcaggctctggagtaactgggattacagtcacccaccactatgcctgcctagtttttgtatttttagtagagacagagattcgccatgttggccatgctagtctcaaactcctgacctcaggttacccgccctccatggcctcccaaagtgctaggattacaggcgtgaacgccatgcccgacctacttcgtggttttgacttgcgtgccctctcattccacccagggaagctttccgctgggccctcttcagcatgcaggccacaggccacgtactgcttggcacctcctgttacctgcagcagctcctcgatgctacggaggaagggcagccccccaagggcaaggcctcatcccttatcccgacctgtctgaagatactgcagtgaaagcccaagtccttggaagctttccccagtgaaggactgactgggggcctcacgcttaactggtagtgcccacaagcctggcagctgtagagccgcgaacctccccacacctccctcaccgcgcaggaccctgagtgaggaggaggagctggaaacctggggtgggttggccaaaggagaacctcaagctcctggcctgatccagctccttcctgcccaaggcagcttagcccatccagactggtcctgaagtctgtccctccattggcatgaagtctgccccttagcaatctggcctcgcaggctgtactttcatggtgctctctaccttctggcccccatcccggaacattcctgagtgaattcgcaagcgcactagcatgtgatattagggagtttgcaataaattattgaggctgatgtatcttctttgcctgtgttctttggggtggggttttatctggaaggttggagggggctaaaggaagagacgaatctattgtcaaagtattctctttaatgtaggattacagctaatggcactttttctaccaaagaagaaaaaaaaaaacagctgggcacagtgacacgtgcctgcagtcccagatactcagcaagctggggtggaagcatcccttgagaccaggagttcaaggccaggctggagcacaatagcaagaccccaggctccttaaaaaacaaaattgcagttgattttgaaactaaagtcagctgaatttgaggcttgagctgaccatgtaattgataccataagtaacaatttcctaattaaattcacctatcagaggagcttcaattgagcaggtgggattaagtcactcttctaatttctcagtgtcccattttataataaccgtttaagtggttaggtgaaaaagtactactcaagctgtaaggcatttctccatcaatgcccatcctaacttgccagacagcttatctttcatgttcaggactttcaacctcgggatttcaaagtgggctcataggtagccccaaagagtaggagcttctcatcagtgtgagctggcattttccagtattggacaactcaagacaagcatgaaaggctgaacttaggctgggcatggtggctcacgccgtaatcccagcactttgggaggccgagccaggcagattacctgaggtcaggagttcaagaccagcctgaccaacatggtgaaacccggtttctattaaaaacaaaaaaattagctggccagcatggcaggcgcctgtactcccagctgtttgggaggctgaggcagtagaatcgcttgaacctgggaggcagaggttgtggtaagccaagatcgtgccactgcactacagcctgggtgacagagcgagactccatctcaaaaaaaaaaaaaaaaggctgaacttgtagaacttgtaggtgactgttttatttagtctgtgactgaaagatttaaaaacttggccaggtgcagtggctcatgccggatatcccggcactttgggaggctgaggcaggagtatcgcttgaggccaggagttcaagagcagcctgggcaacatagccagaccctgtctctacactagataataaaaaaaaattagcagagcatggtggctgtagtcccagctactcaggagcctgaggcaggaggttcactggagcccagtaggtcgcggctgcagtgagctatgattgtgccactgcactccagcctgggcaacagagtgagagcctgtctctgggaaaaaaaaaaaagaggattcaaaaactctatcacagccagccgcagtggctcacgcctgtaatcccagcgctttgggaggccaaggcgggtggatcacaaggtcaggcatttgagagcagcctggccaacatggccaaatcccgtctctactaaaagtacaaaatattggccgggcatggtggtgggcacctgtaatctcagctactcggggggctgaggcaggagaattgcttgaacctgggaggtgcaggttgcagtgagccgagattgtgccattgcactctagcctggacgacagagtgagactccgtctcaaaaaagaaacaaacaaacaaaaaacgaaaaacaaaacaaaacctattgtttcactactcttactataaagcctatttggatgtagtaaatactaaggcaaaggcctatattaccaaagatggtctgggagctatttatggcagcggacccaaaccctgcagcctatgggcaaagcggctgaagctcgctgaagagggcctgctattccgggctctcctgctcttttgcagttatggctggaggctggcccggtgccaggctggctccatggggtgggctgtctggcagggaggcctgatgtttgtattagcacagaagctatcccagtccacccttgatgaagctgtggcggggcctacctgctccttccgtaaagtgctcagtaacagagttggagtgggggtgggaggctcggtatttgtcccaagcttccctcctcctgagatccggagtttcacaagtgaatcttgagcaactgcccatggtctcttggcattgagcccagggaaaacaaggttctttcttttcttccaggagctcgaggctaatggagtcaaagcagctgtggtcagtgaacagaaaaggcagcctctgatgaggcttgggggctggggagggaagattccaaacagcaaaggagtttgagcctctgtagggcctggcggtcctagtgggggaacggcctttcctggggccccccgcacagccaggagcagctgtcgtcaaggtggactgtgtcccagcccctccagctcagccttttcatctgttcaagctggtgctcgggagtgcacaggatgcctttcagaagaattctaaatcccgggggcctgtgatgccacagtcacatgtctgagcccaaaacaagagaaccacttgt

SEQ ID NO: 11851 - DNA, 6168 bp, Homo sapiens
aagaggtaccatgataaagtctctgggtagtgattccacagcagagggcctgggctccagttccacctcatagagtccagcccacttgttctgggatggcagaagcatcactgaccttattccccaggtccgggacactctgatgctggcagacaagcccttcttcctggtgctggaggaagatggcacaactgtagagacagaagagtacttccaagccctggcaggggatacagtgttcatggtcctccagaaggggcagaaatggcagcccccatcagaacaggtgaggtcccacctgttgcacctgatgggggagaaaatcgggactctgggagatgtcttcaaggggtgctaaccatttgcttgtctcaatgcaggggacaaggcacccactgtccctctcccataagcctgccaagaagattgatgtggcccgtgtaacgtttgatctgtacaagctgaacccacaggacttcattggctgcctgaacgtgaaggcgactttttatgatacatactccctttcctatgatctgcactgctgtggggccaagcgcatcatgaagtgagcaaattgggatttcctggggacagggtgggtacaggcaatgggagagcccctatctgtccacatggactcagccttctcagcgcctgggtctggctttggtgctgacaaagcatagcctgtatcagacaacacggagcctgatgggctctcgaagtgctgtggacgacaccggcgtgtgcccaggggtgcacgtgttcctcctggtggaacctggatgcattttatttttatgactactttccactctagtaactacattttttcattgaaataggaagttttcctaagtagtcttctagtcaattttataaaaatgaacatgtgttggccaggcacggtggctcatgcctgtaatcccagcactttgagaggccaaggtgggtggatcacttgaggtcaggagtttgagaccagcctggccaacatggcaaaacctaatctctacaaaaatatgaaaactagctggacatcgtggtgcatgcctgtaatcccaactactcaggaggctgaagcaggagaatcgcttgaagctaggaggcagaggttgcagtgagccaagattctgccactgcactccagcctgggcaaaagagcaagactgtctcggaaaaaaaaacaaaaaaaagcacgtgtcaaagacttaattgaattcattaattaatgagagaactagcaagaagttacaatcagctcaaaggagatttcaaaatcccacatatatacaggtccaggaagaatgatgagataggttgagtgcagcagctctcacctgggatcccagcactttgggaggtcaaggcaggaggatctgttgagcccatgagtttgagaccagcctcggcaacacagtgagaccctgtctttatcacacgcccgtgtgtgcgcacacacacacacacacaaaatgctggcagtggtagtatgtacctataatcccagctaggtgggaggattgcttgagcccaggagtttgaggctgcagtgagatatgaccatactactgtgtactccagcctgggcaacagcatgagaccttgtctctaaaacgaagaaaaagagagataaatgtatacatacaaaattgggctttttcccctgtgggaatgggagggatgaaataatcttccctccatatgacagaattaatttgcaagtcttatggaccagagtcatttgtactatataatgaacttttcttaaaacttatttttgaaagtctaaccaaatgtctcaagaagcatgagaatatgtgaggttagaacccgctcccgcttccccatttcccctactttccaaacatccaaccccatgttaattgctttatgctatttcagccttatgaccctgggtggcaggtgcaatcccattttacccatgaggaagctgaagctcaaagctagagcagtttgctgaagttcacccagctaataagactggattaggacttaggcctgcctgattcaggttctgttctcagtacatgctcatgccaggcatggatgtcttcatgtccagcactctgaacatgagctagactgcaggtggcttggacaggcctcagagtctagaacagagtgtctcaaggtgcagaaccatgttatggagattaatctggttggtccaaagtagtagtagaaaaataaaagccttatgaaatgagctggggttttgcatgagaaagtagggaggttccgggcatctcagttaaggtggaattgcaggtcctcgcactaatcttgatcccatctgcagcatctgttcctatttgcacatcgctctagaattgatgaaatgcttttagtgctaccacctcagtggtattcaaatgttattaatgaagaaaacaaacataatgaaaccaatcccttccaggccagcatgggaataagggggtgcagggagggggtacactcttgtttttatttattatgtatttatttatttttgagacagagactcactctgtcacccaggctggagtgcagtggcacaatctcagctcactacaacctctgtctcccaggttcaagtgattttcgtgcctcagcttcccgagtagctgagattacaggtgtctgccaccacgcccggctaattttttgtattttttagtagagacggggtttcgccatgttggccaggctggtctcaaactcctgacctcaaatgatccacccacctcggccacctaaagttataggattacaggcatgagccaccaagcccagccttgtgttttttgtttgattgttttttgagactgaatcttgctctgtcacccaggctggagtgcagtggtgccacctcggctcactgtgacctccgcctcctgggttcaagcgattctcctgcctcaggctctggagtaactgggattacagtcacccaccactatgcctgcctagtttttgtatttttagtagagacagagattcgccatgttggccatgctagtctcaaactcctgacctcaggttacccgccctccatggcctcccaaagtgctaggattacaggcgtgaacgccatgcccgacctacttcgtggttttgacttgcgtgccctctcattccacccagggaagctttccgctgggccctcttcagcatgcaggccacaggccacgtactgcttggcacctcctgttacctgcagcagctcctcgatgctacggaggaagggcagccccccaagggcaaggcctcatcccttatcccgacctgtctgaagatactgcagtgaaagcccaagtccttggaagctttccccagtgaaggactgactgggggcctcacgcttaactggtagtgcccacaagcctggcagctgtagagccgcgaacctccccacacctccctcaccgcgcaggaccctgagtgaggaggaggagctggaaacctggggtgggttggccaaaggagaacctcaagctcctggcctgatccagctccttcctgcccaaggcagcttagcccatccagactggtcctgaagtctgtccctccattggcatgaagtctgccccttagcaatccggcctcgcaggctgtactttcatggtgctctctaccttctggcccccatcccggaacattcctgagtgaattcgcaagcgcactagcatgtgatattagggagtttgcaataaattattgaggctgatgtatcttctttgcctgtgttctttggggtggggttttatctggaaggttggagggggctaaaggaagagacgaatctattgtcaaagtattctctttaatgtaggattacagctaatggcactttttctaccaaagaagaaaaaaaaaaacagctgggcacagtgacacgtgcctgcagtcccagatactcagcaagctggggtggaagcatcccttgagaccaggagttcaaggccaggctggagcacaatagcaagaccccaggctccttaaaaaacaaaattgcagttgattttgaaactaaagtcagctgaatttgaggcttgagctgaccatgtaattgataccataagtaacaatttcctaattaaattcacctatcagaggagcttcaattgagcaggtgggattaagtcactcttctaatttctcagtgtcccattttataataaccgtttaagtggttaggtgaaaaagtactactcaagctgtaaggcatttctccatcaatgcccatcctaacttgccagacagcttatctttcatgttcaggactttcaacctcgggatttcaaagtgggctcataggtagccccaaagagtaggagcttctcatcagtgtgagctggcattttccagtattggacaactcaagacaagcatgaaaggctgaacttaggctgggcatggtggctcacgccgtaatcccagcactttgggaggccgagccaggcagattacctgaggtcaggagttcaagaccagcctgaccaacatggtgaaacccggtttctattaaaaacaaaaaaattagctggccagcatggcaggcgcctgtactcccagctgtttgggaggctgaggcagtagaatcgcttgaacctgggaggcagaggttgtggtaagccaagatcgtgccactgcactacagcctgggtgacagagcgagactccatctcaaaaaaaaaaaaaaaaaaggctgaacttgtagaacttgtagatgactgttttatttagtctgtgactgaaagatttaaaaacttggccaggtgcagtggctcatgcctgatatcccggcactttgggaggctgaggcaggagtatcgcttgaggccaggagttcaagagcagcctgggcaacatagccagaccctgtctctacactagataataaaaaaaaattagcagagcatggtggctgtagtcccagctactcaggagcctgaggcaggaggttcactggagcccagtaggtcgcggctgcagtgagctatgattgtgccactgcactccagcctgggcaacagagtgagagcctgtctctgggaaaaaaaaaaaagaggattcaaaaactctatcacagccagccgcagtggctcacgcctgtaatcccagcgctttgggaggccaaggcgggtggatcacaaggtcaggcatttgagagcagcctggccaacatggccaaatcccgtctctactaaaagtacaaaatattggccgggcatggtggtgggcacctgtaatctcagctactcggggggctgaggcaggagaattgcttgaacctgggaggtgcaggttgcagtgagccgagattgtgccattgcactctagcctggacgacagagtgagactccgtctcaaaaaagaaacaaacaaacaaaaaacgaaaaacaaaacaaaacctattgtttcactactcttactataaagcctatttggatgtagtaaatactaaggcaaaggcctatattaccaaagatggtctgggagctatttatggcagcggacccaaaccctgcagcctatgggcaaagcggctgaagctcgctgaagagggcctgctattccgggctctcctgctcttttgcagttatggctggaggctggcccggtgccaggctggctccatggggtgggctgtctggcagggaggcctgatgtttgtattagcacagaagctatcccagtccacccttgatgaagctgtggcggggcctacctgctccttccgtaaagtgctcagtaacagagttggagtgggggtgggaggctcggtatttgtcccaagcttccctcctcctgagatccggagtttcacaagtgaatcttgagcaactgcccatggtctcttggcattgagcccagggaaaacaaggttctttcttttcttccaggagctcgaggctaatggagtcaaagcagctgtggtcagtgaacagaaaaggcagcctctgatgaggcttgggggctggggagggaagattccaaacagcaaaggagtttgagcctctgtagggcctggcggtcctagtgggggaacggcctttcctggggccccccgcacagccaggagcagctgtcgtcaaggtggactgtgtcccagcccctccagctcagccttttcatctgttcaagctggtgctcggg

SEQ ID NO: 11852 - DNA, 3811 bp, Homo sapiens
aagaggtaccatgataaagtctctgggtagtgattccacagcagagggcctgggctccagttccacctcatagagtccagcccacttgttctgggatggcagaagcatcactgaccttattccccaggtccgggacactctgatgctggcagacaagcccttcttcctggtgctggaggaagatggcacaactgtagagacagaagagtacttccaagccctggcaggggatacagtgttcatggtcctccagaaggggcagaaatggcagcccccatcagaacaggtgaggtcccacctgttgcacctgatgggggagaaaatcgggactctgggagatgtcttcaaggggtgctaaccatttgcttgtctcaatgcaggggacaaggcacccactgtccctctcccataagcctgccaagaagattgatgtggcccgtgtaacgtttgatctgtacaagctgaacccacaggacttcattggctgcctgaacgtgaaggcgactttttatgatacatactccctttcctatgatctgcactgcttggggggccaagcgcatcatgaagtgagcaaattggatttcctggggacagggtggttacagtcaatgggagagcccctatctgtccacatggactcagccttctcagcgcctgggtctggctttggtgctgacaaagcatagcctgtatcagacaacacggagcctgatgggctctcgaagtgctgtggacgacaccggcgtgtgcccaggggtgcacgtgttcctcctggtggaacctggatgcattttatttttatgactactttccactctagtaactacattttttcattgaaataggaagttttcctaagtagtcttctagtcaattttataaaaatgaacatgtgttggccaggcacggtggctcatgcctgtaatcccagcactttgagaggccaaggtgggtggatcacttgaggtcaggagtttgagaccagcctggccaacatggcaaaacctaatctctacaaaaatatgaaaactagctggacatcgtggtgcatgcctgtaatcccaactactcaggaggctgaagcaggagaatcgcttgaagctaggaggcagaggttgcagtgagccaagattctgccactgcactccagcctgggcaaaagagcaagactgtctcggaaaaaaaaacaaaaaaaagcacgtgtcaaagacttaattgaattcattaattaatgagagaactagcaagaagttacaatcagctcaaaggagatttcaaaatcccacatatatacaggtccaggaagaatgatgagataggttgagtgcagcagctctcacctgggatcccagcactttgggaggtcaaggcaggaggatctgttgagcccatgagtttgagaccagcctcggcaacacagtgagaccctgtctttatcacacgcccgtgtgtgcgcacacacacacacacacaaaatgctggcagtggtagtatgtacctataatcccagctaggtgggaggattgcttgagcccaggagtttgaggctgcagtgagatatgaccatactactgtgtactccagcctgggcaacagcatgagaccttgtctctaaaacgaagaaaaagagagataaatgtatacatacaaaattgggctttttcccctgtgggaatgggagggatgaaataatcttccctccatatgacagaattaatttgcaagtcttatggaccagagtcatttgtactatataatgaacttttcttaaaacttatttttgaaagtctaaccaaatgtctcaagaagcatgagaatatgtgaggttagaacccgctcccgcttccccatttcccctactttccaaacatccaaccccatgttaattgctttatgctatttcagccttatgaccctgggtggcaggtgcaatcccattttacccatgaggaagctgaagctcaaagctagagcagtttgctgaagttcacccagctaataagactggattaggacttaggcctgcctgattcaggttctgttctcagtacatgctcatgccaggcatggatgtcttcatgtccagcactctgaacatgagctagactgcaggtggcttggacaggcctcagagtctagaacagagtgtctcaaggtgcagaaccatgttatggagattaatctggttggtccaaagtagtagtagaaaaataaaagccttatgaaatgagctggggttttgcatgagaaagtagggaggttccgggcatctcagttaaggtggaattgcaggtcctcgcactaatcttgatcccatctgcagcatctgttcctatttgcacatcgctctagaattgatgaaatgcttttagtgctaccacctcagtggtattcaaatgttattaatgaagaaaacaaacataatgaaaccaatcccttccaggccagcatgggaataagggggtgcagggagggggtacactcttgtttttatttattatgtatttatttatttttgagacagagactcactctgtcacccaggctggagtgcagtggcacaatctcagctcactacaacctctgtctcccaggttcaagtgattttcgtgcctcagcttcccgagtagctgagattacaggtgtctgccaccacgcccggctaattttttgtattttttagtagagacggggtttcgccatgttggccaggctggtctcaaactcctgacctcaaatgatccacccacctcggccacctaaagttataggattacaggcatgagccaccaagcccagccttgtgttttttgtttgattgttttttgagactgaatcttgctctgtcacccaggctggagtgcagtggtgccacctcggctcactgtgacctccgcctcctgggttcaagcgattctcctgcctcaggctctggagtaactgggattacagtcacccaccactatgcctgcctagtttttgtatttttagtagagacagagattcgccatgttggccatgctagtctcaaactcctgacctcaggttacccgccctccatggcctcccaaagtgctaggattacaggcgtgaacgccatgcccgacctacttcgtggttttgacttgcgtgccctctcattccacccagggaagctttccgctgggccctcttcagcatgcaggccacaggccacgtactgcttggcacctcctgttacctgcagcagctcctcgatgctacggaggaagggcagccccccaagggcaaggcctcatcccttatcccgacctgtctgaagatactgcagtgaaagcccaagtccttggaagctttccccagtgaaggactgactgggggcctcacgcttaactggtagtgcccacaagcctggcagctgtagagccgcgaacctccccacacctccctcaccgcgcaggaccctgagtgaggaggaggagctggaaacctggggtgggttggccaaaggagaacctcaagctcctggcctgatccagctccttcctgcccaaggcagcttagcccatccagactggtcctgaagtctgtccctccattggcatgaagtctgccccttagcaatccggcctcgcaggctgtactttcatggtgctctctaccttctggcccccatcccggaacattcctgagtgaattcgcaagcgcactagcatgtgatattagggagtttgcaataaattattgaggctgatgtatcttctttgcctgtgttctttggggtggggttttatctggaaggttggagggggctaaaggaagagacgaa

SEQ ID NO: 11853 - DNA, 658 bp, Homo sapiens
ggaagctttccgctgggccctcttcagcatgcaggccacaggccacgtactgcttggcacctcctgttacctgcagcagctcctcgatgctacggaggaagggcagccccccaagggcaaggcctcatcccttatcccgacctgtctgaagatactgcagtgaaagcccaagtccttggaagctttccccagtgaaggactgactgggggcctcacgcttaactggtagtgcccacaagcctggcagctgtagagccgcgaacctccccacacctccctcaccgcgcaggaccctgagtgaggaggaggagctggaaacctggggtgggttggccaaaggagaacctcaagctcctggcctgatccagctccttcctgcccaaggcagcttagcccatccagactggtcctgaagtctgtccctccattggcatgaagtctgccccttagcaatctggcctcgcaggctgtactttcatggtgctctctaccttctggcccccatcccggaacattcctgagtgaattcgcaagcgcactagcatgtgatattagggagtttgcaataaattattgaggctgatgtatcttctttgcctgtgttctttggggtggggttttatctggaaggttggagggggctaaaggaagagacgaa

SEQ ID NO: 11854 - DNA, 6259 bp, Homo sapiens
aagaggtaccatgataaagtctctgggtagtgattccacagcagagggcctgggctccagttccacctcatagagtccagcccacttgttctgggatggcagaagcatcactgaccttattccccaggtccgggacactctgatgctggcagacaagcccttcttcctggtgctggaggaagatggcacaactgtagagacagaagagtacttccaagccctggcaggggatacagtgttcatggtcctccagaaggggcagaaatggcagcccccatcagaacaggtgaggtcccacctgttgcacctgatgggggagaaaatcgggactctgggagatgtcttcaaggggtgctaaccatttgcttgtctcaatgcaggggacaaggcacccactgtccctctcccataagcctgccaagaagattgatgtggcccgtgtaacgtttgatctgtacaagctgaacccacaggacttcattggctgcctgaacgtgaaggcgactttttatgatacatactccctttcctatgatctgcactgctgtggggccaagcgcatcatgaagtgagcaaattgggatttcctggggacagggtgggtacaggcaatgggagagcccctatctgtccacatggactcagccttctcagcgcctgggtctggctttggtgctgacaaagcatagcctgtatcagacaacacggagcctgatgggctctcgaagtgctgtggacgacaccggcgtgtgcccaggggtgcacgtgttcctcctggtggaacctggatgcattttatttttatgactactttccactctagtaactacattttttcattgaaataggaagttttcctaagtagtcttctagtcaattttataaaaatgaacatgtgttggccaggcacggtggctcatgcctgtaatcccagcactttgagaggccaaggtgggtggatcacttgaggtcaggagtttgagaccagcctggccaacatggcaaaacctaatctctacaaaaatatgaaaactagctggacatcgtggtgcatgcctgtaatcccaactactcaggaggctgaagcaggagaatcgcttgaagctaggaggcagaggttgcagtgagccaagattctgccactgcactccagcctgggcaaaagagcaagactgtctcggaaaaaaaaacaaaaaaaagcacgtgtcaaagacttaattgaattcattaattaatgagagaactagcaagaagttacaatcagctcaaaggagatttcaaaatcccacatatatacaggtccaggaagaatgatgagataggttgagtgcagcagctctcacctgggatcccagcactttgggaggtcaaggcaggaggatctgttgagcccatgagtttgagaccagcctcggcaacacagtgagaccctgtctttatcacacgcccgtgtgtgcgcacacacacacacacacaaaatgctggcagtggtagtatgtacctataatcccagctaggtgggaggattgcttgagcccaggagtttgaggctgcagtgagatatgaccatactactgtgtactccagcctgggcaacagcatgagaccttgtctctaaaacgaagaaaaagagagataaatgtatacatacaaaattgggctttttcccctgtgggaatgggagggatgaaataatcttccctccatatgacagaattaatttgcaagtcttatggaccagagtcatttgtactatataatgaacttttcttaaaacttatttttgaaagtctaaccaaatgtctcaagaagcatgagaatatgtgaggttagaacccgctcccgcttccccatttcccctactttccaaacatccaaccccatgttaattgctttatgctatttcagccttatgaccctgggtggcaggtgcaatcccattttacccatgaggaagctgaagctcaaagctagagcagtttgctgaagttcacccagctaataagactggattaggacttaggcctgcctgattcaggttctgttctcagtacatgctcatgccaggcatggatgtcttcatgtccagcactctgaacatgagctagactgcaggtggcttggacaggcctcagagtctagaacagagtgtctcaaggtgcagaaccatgttatggagattaatctggttggtccaaagtagtagtagaaaaataaaagccttatgaaatgagctggggttttgcatgagaaagtagggaggttccgggcatctcagttaaggtggaattgcaggtcctcgcactaatcttgatcccatctgcagcatctgttcctatttgcacatcgctctagaattgatgaaatgcttttagtgctaccacctcagtggtattcaaatgttattaatgaagaaaacaaacataatgaaaccaatcccttccaggccagcatgggaataagggggtgcagggagggggtacactcttgtttttatttattatgtatttatttatttttgagacagagactcactctgtcacccaggctggagtgcagtggcacaatctcagctcactacaacctctgtctcccaggttcaagtgattttcgtgcctcagcttcccgagtagctgagattacaggtgtctgccaccacgcccggctaattttttgtattttttagtagagacggggtttcgccatgttggccaggctggtctcaaactcctgacctcaaatgatccacccacctcggccacctaaagttataggattacaggcatgagccaccaagcccagccttgtgttttttgtttgattgttttttgagactgaatcttgctctgtcacccaggctggagtgcagtggtgccacctcggctcactgtgacctccgcctcctgggttcaagcgattctcctgcctcaggctctggagtaactgggattacagtcacccaccactatgcctgcctagtttttgtatttttagtagagacagagattcgccatgttggccatgctagtctcaaactcctgacctcaggttacccgccctccatggcctcccaaagtgctaggattacaggcgtgaacgccatgcccgacctacttcgtggttttgacttgcgtgccctctcattccacccagggaagctttccgctgggccctcttcagcatgcaggccacaggccacgtactgcttggcacctcctgttacctgcagcagctcctcgatgctacggaggaagggcagccccccaagggcaaggcctcatcccttatcccgacctgtctgaagatactgcagtgaaagcccaagtccttggaagctttccccagtgaaggactgactgggggcctcacgcttaactggtagtgcccacaagcctggcagctgtagagccgcgaacctccccacacctccctcaccgcgcaggaccctgagtgaggaggaggagctggaaacctggggtgggttggccaaaggagaacctcaagctcctggcctgatccagctccttcctgcccaaggcagcttagcccatccagactggtcctgaagtctgtccctccattggcatgaagtctgccccttagcaatctggcctcgcaggctgtactttcatggtgctctctaccttctggcccccatcccggaacattcctgagtgaattcgcaagcgcactagcatgtgatattagggagtttgcaataaattattgaggctgatgtatcttctttgcctgtgttctttggggtggggttttatctggaaggttggagggggctaaaggaagagacgaatctattgtcaaagtattctctttaatgtaggattacagctaatggcactttttctaccaaagaagaaaaaaaaaaacagctgggcacagtgacacgtgcctgcagtcccagatactcagcaagctggggtggaagcatcccttgagaccaggagttcaaggccaggctggagcacaatagcaagaccccaggctccttaaaaaacaaaattgcagttgattttgaaactaaagtcagctgaatttgaggcttgagctgaccatgtaattgataccataagtaacaatttcctaattaaattcacctatcagaggagcttcaattgagcaggtgggattaagtcactcttctaatttctcagtgtcccattttataataaccgtttaagtggttaggtgaaaaagtactactcaagctgtaaggcatttctccatcaatgcccatcctaacttgccagacagcttatctttcatgttcaggactttcaacctcgggatttcaaagtgggctcataggtagccccaaagagtaggagcttctcatcagtgtgagctggcattttccagtattggacaactcaagacaagcatgaaaggctgaacttaggctgggcatggtggctcacgccgtaatcccagcactttgggaggccgagccaggcagattacctgaggtcaggagttcaagaccagcctgaccaacatggtgaaacccggtttctattaaaaacaaaaaaattagctggccagcatggcaggcgcctgtactcccagctgtttgggaggctgaggcagtagaatcgcttgaacctgggaggcagaggttgtggtaagccaagatcgtgccactgcactacagcctgggtgacagagcgagactccatctcaaaaaaaaaaaaaaaaggctgaacttgtagaacttgtaggtgactgttttatttagtctgtgactgaaagatttaaaaacttggccaggtgcagtggctcatgccggatatcccggcactttgggaggctgaggcaggagtatcgcttgaggccaggagttcaagagcagcctgggcaacatagccagaccctgtctctacactagataataaaaaaaaattagcagagcatggtggctgtagtcccagctactcaggagcctgaggcaggaggttcactggagcccagtaggtcgcggctgcagtgagctatgattgtgccactgcactccagcctgggcaacagagtgagagcctgtctctgggaaaaaaaaaaaagaggattcaaaaactctatcacagccagccgcagtggctcacgcctgtaatcccagcgctttgggaggccaaggcgggtggatcacaaggtcaggcatttgagagcagcctggccaacatggccaaatcccgtctctactaaaagtacaaaatattggccgggcatggtggtgggcacctgtaatctcagctactcggggggctgaggcaggagaattgcttgaacctgggaggtgcaggttgcagtgagccgagattgtgccattgcactctagcctggacgacagagtgagactccgtctcaaaaaagaaacaaacaaacaaaaaacgaaaaacaaaacaaaacctattgtttcactactcttactataaagcctatttggatgtagtaaatactaaggcaaaggcctatattaccaaagatggtctgggagctatttatggcagcggacccaaaccctgcagcctatgggcaaagcggctgaagctcgctgaagagggcctgctattccgggctctcctgctcttttgcagttatggctggaggctggcccggtgccaggctggctccatggggtgggctgtctggcagggaggcctgatgtttgtattagcacagaagctatcccagtccacccttgatgaagctgtggcggggcctacctgctccttccgtaaagtgctcagtaacagagttggagtgggggtgggaggctcggtatttgtcccaagcttccctcctcctgagatccggagtttcacaagtgaatcttgagcaactgcccatggtctcttggcattgagcccagggaaaacaaggttctttcttttcttccaggagctcgaggctaatggagtcaaagcagctgtggtcagtgaacagaaaaggcagcctctgatgaggcttgggggctggggagggaagattccaaacagcaaaggagtttgagcctctgtagggcctggcggtcctagtgggggaacggcctttcctggggccccccgcacagccaggagcagctgtcgtcaaggtggactgtgtcccagcccctccagctcagccttttcatctgttcaagctggtgctcgggagtgcacaggatgcctttcagaagaattctaaatcccgggggcctgtgatgccacagtcacatgtctgagcccaaaacaagagaaccacttgt

SEQ ID NO: 11855 - DNA, 346 bp, Homo sapiens
tagtgattccacagcagagggcctgggctccagttccacctcatagagtccagcccacttgttctgggatggcagaagcatcactgaccttattccccaggtccgggacactctgatgctggcagacaagcccttcttcctggtgctggaggaagatggcacaactgtagagacagaagagtacttccaagccctggcaggggatacagtgttcatggtcctccagaaggggcagaaatggcagcccccatcagaacaggtgagggtccacctgttgcacctgatgggggagaaaatccggactctgggagatgtcttcaaggggtgctaaccatttgctgggctc

SEQ ID NO: 11856 - DNA, 309 bp, Homo sapiens
tttttttttttttgagacgcagtctcactctgtcgcctgggctggagtgcagtagtgtgatctcggctcactgcaagctccgcctcccgggttcatgccattctcctgcctcagcctcccaagtagctgggactacaggcacccgccaccacgcccagctaattttttgtatttttagtagagacggggtttcaccgtgttagccaggatggtgtcgatctcctgacctcgtgatccgccggcctcggcctcccaaagtgctgggattacaggcgcaagccaccgcgcccgacccatatatgtattttt

SEQ ID NO: 11857 - DNA, 290 bp, Homo sapiens
tttttttttttttgagacgcagtctcactctgtcgcctgggctggagtgcagtagtgtgatctcggctcactgcaagctccgcctcccgggttcatgccattctcctgcctcagcctcccaagtagctgggactacaggcacccgccaccacgcccagctaattttttgtatttttagtagagacggggtttcaccgtgttagccaggatggtgtcgatctcctgacctcgtgatccgccggcctcggcctcccaaagtgctgggattacaggcgcaagccaccgcgccc

SEQ ID NO: 11858 - DNA, 423 bp, Homo sapiens
ttcccatctccatacttttctaatgtaatgatcagggattttttttttacctaccagcctagacactctgaccccctaatccaaatacttcatattttgaatgattttctcttatctagtttccatttcataaatatctttttcccctttaaaatttaatctggaggcctggtgcagtggttcacccctgtaatccgagcactttaggaggctgaagtgggtagatcgcttgagtacaggagttcaagaccagcctgggcaacatggcaagactccatctctaccaaaaaaatatgcaaaaatagtcaggcatggtggcacatgcctgtagtcccacttctctggaggctgaggcaggaggatctcttgagcctgggaagcagaggttgcaatgagccaacattgcgacagtgcactccagcc

SEQ ID NO: 11859 - DNA, 309 bp, Homo sapiens; identical to SEQ ID NO: 11856

SEQ ID NO: 11860 - DNA, 1893 bp, Homo sapiens
cagagccaagtacataaacatttagtcagttacattactactctgttcaccaaaactagcctagattctctaatattctgccattgaatgatataagtacttattctagaatgaaatttcattttgatgaaatattttgttttcttatttttttgtttctttggtaaaatattttaaaattcagatttaggtaaatctgaataagagttttattccaaaggacattttaaaacttttgtaatatagctttaggatttctctgttagaccaaggataaacataagggttttttttaaaaaaccaggaatagataaagacgattcaggactcagcaggtggagagaggataagtagaatgaggaaaggcagcagtaggtgtgatctgtgtgacctgtaccctaatcccttaactcacctgtagttctgttccgaaacaccaatgtggaagatgtccttaatgcccgaaaactggagcgagactcacttcgggatgaatcccaaaggaagaaggaacaggacaagctgcagagggagagagacaaactagccaagcaggagcgcaaggaaaaggaaaaaaaaaggacacagagaggggagcgaaagcgataaccttggcctactctattctttccccccatgaacttatcaaagggagaactggttgtgtatttaagagaaatgagagtgcattgcaaagtagtttcccaaggcatttcccctattgtttacatggtcaaaaggaaaatcaaaatcacttctaattacaaaatgtgctgttttggtggggtgggcaatcagattattatagttgatgactgtaccaagatctggaatgggggccacctttatattttaatactcaagtcctgtgctccttttggccactttaaaaagtcttccctcaccttggataaataggattcagaaagctaacagttttcattctgaaggagcagaaacataatcaatccctccctgagataaaatgtgggcatgcacattgctttggagtcagtattcagctgtaagtgtagtattgttttatggctgaaatagaaagctaatgaagaggcctacctggatccagattttatgttaacatggcagcaaaactaggaaaatgggaagaaattacttgcggggtgttctagatctgattttttttttttttttgaaagtttcagcctgtgggaggaaaagaggtatcttttaaaatagagatagttacatattttcctcatctaggctgtgtcactattgggtgcaaggatatcattgttggctagattcattttgtataatcatgtatcctcttgtgtgctggtagagattttaatcctgatttttccataaaacatgagtattaagaaataattcctggtttggagaaactggagaaatcacccttttaaggaagaaacactggaaatttctgctaacaccaagatatttaagagtgtacatagtaggtgctcaacaaatttattgaatgaatgagtgaatggaaaaactgggagagtcaaaagtgagcagaagctctccatttctacttctgtcacaaaccacattaaattgtaaataaggcccttctccacttgacttcaggcagcagattgtctagaagcctaaggacagcaatttctctgacaagacaaagtagatattttataccaggggttggcaaactactgcccacgggccgaatttggcccagtctgtttttgtatggtgcaaactaaaaatgatttttacatttttaaagagttataaaagaaaaaaatatgtggtctgtgaaatctaaaatatttactacctggcctgttggaggaaaggtccgccaatctctgttttataccaaaaactatgagattaacaaaaacttttacctttgtg

SEQ ID NO: 11861 - DNA, 4498 bp, Homo sapiens
aaggaggaggcccttcagcaacggagtgggcctgcattctgcggagggtgagactgaggtggctgcagtcaaaggagaagggggcaggggtttgttgaggctgtgaccgtgggaaagcgcttctccagggcttccctcagcttcaaggagaaagagttcagaggccctgaggggatgaagggacttgtgaaggggcttcagggggatgggttggggggaaggaggttcctattcttactccccttctgcctatgctcccccaatgttcctgtctctcccctcccccaccttggccccctctttggcccctgtggccaaagttgttgaggaaggagggagtagatggagggctcttttcaccagaagacccccaggcacaagcagcccaccttactgatggtcagagcatccagaagaagtggcaagacttcagctgtcctcaaagcaggaagacagagtgtttctggcagaaagaacagcacaagcaaaggttaggcagtggggtctggagaggctggtggaggactggggcttggcttcaatggttatgagaggaggtgggcaggatgttctgtaccaagggccacactgtcccttcctggaagaaacagtgggtacccagcacccagagcttctcccacatgctggccaccgcctctggccccagtagacctggccctcaactgcctcagcaagcctcacaggttggggaccccaccctcattattctcaagtgcatcaaccccgaaggactgaagccccgagtcccaataaacaggtcccatccatccgtaggccagtccgctgggcccctagcaccccctatgggcaggaagcaacactaatggaggaggagcctccagcagcctggggtggggtgggggtgggagagtgagacgtgagggaggagagagacttgccctctaggaagcggacagaccatgcctcaggaaaccccagtgtcacaggtcacagacactgaccttgaagcgttactctcatgggtgaaatttagcccctgtcctcaggaagctcccagtctgacgggggacacatatagtgctctcagagctgccttctttagggtgaaactcagtatctgggcttcaggaaactcccagtgtaaggggagagacacgaccctgcccttagggatctctcaaatgaggcatacccactggactttcgggaaccatcaatctgtttccagacatggattagagatttcaatgcctcaagggctgccaggaaaaaaaatacaagacgtccaattaaattgaatatcagataaacaacgaataatattttagcataagtctgtcccatacaatatttgggacagacttacactatttaaagtatccagtttaactggaagtcttgtgtttttatttgccagatctggtaaccctaggtgcctccagtttgagggaggagagaggacaccccctccaccccagacataggaaagcaggtaaacacctcagcgtgctccggagggcaggggtggggcaggaggagagtcctggggctccggctcgcggcagtttaaaattccttccaggccagagccctaatccctcggtgcacaatggccgccttctcccccgccgcccgcgcccacgccctcccccgcggggccgtggcagtgccaccaagggcctctttaagcccctttgaagccgcggagccccgcgccgcaggaggccccgccgctatgccagctatgccagctatgtccctgctgccgccggccgccaccgctcccccattaatgctggctaatctggctaataaataaactcccctcccagccccagccccgcgccgactcctccccgcccccgcagaatcgatgtcagggctcgactagagcaagcgcccgcactccaccccactccctcgagatgtagctgacgttttttcttatggctgccctaggtctgtagcccgtcggggattctcggggagacgtgggatttgggaggtctccgcctagccactgcgtttgccttcctcttttccagtccacctgcgcaccaggggcaggacacgtggctgggtgcagacgctggcccggatgtcgcggaggactcgcgggccggtagagcgcgcggcggcggcggcggcggcggcggcgggaggagacgcaggtcacgcccccttcccaccacctcccgccgccgacggggcgcgcgcgccgaggagcccgggacaggtgactcctagaggactgcgtctgcgcctcccccggcgggagtcccttcttcgcggcctctgccgccccctgcgtcccctcctgggcttccgagagtctgactcagccaagccggcatcgcttcgcctcctacaacacaccccgagcgcgagaagaaattacaggattgcaggggcacggctaatgcgctctaattacccaccgccgctgtcatccgcggcgctccgcggcgctgggccaacgcgccgtaattaagacgccgctccccggtcccggaaccctcccttcgccaccctccacccacccacctcgcggtccccaggaccactggctgccaactcctgccgccctctgggactgcccctcagtcccaggagagctatgaggcctcactgggggcagaacttggggagaccgaagccggcccttccactcccctaaacctacagtcctggaaggtctctgctggaagagactgggagagtggggaggggccagggacctatttcgttgacagaaacagtgaggtctattggaaagttagccttcagtgggaggagtggcaaaggcacgcagggcagcagtacccccgtttggcacttgaggcacggagaagggaagggaagtccgcccagccagaactcccagacccgctcgtttaacagtggctttatgagcagcacgacggactccctcccctggcggggaaattaccttcctgcgaagaaaggtgacatccccgccacagacacggaggccccgcctgctggccagctgtggccgccataggggagctggtgaggagtgaggtggctctggcctcccatgtcaggtagggtgagagaggccctgaagatagaagccaggcccgaaggccagaattaaaggggtagcttggccatcagctccttcccccaaaaccaggctcagagctctcctctatcagcaattctttcctgaggtccagggtgttgcaaactcatggccttgggccacgttttaccttcagtgaggttttgtttggcttgcaatgagtacatgggttttaggttgaatgtgagagtctgcagacaatgtgggttctccgactgccctcccagtgaaggtggacctctgatttagaccggcccgctgggcccgtgcctacatccttttcctcagcgtcaggatcttagtccccatgattgctgcccctttgtggtctgcatgtttcttggtaagggtgcccagtcaagtgtctctgggagccccctcttctctgtcatcgtcaggctccccacttgcagtggccgtggtggctgcacatgctcccggatacccctccagcactcccttttgtcatcttgagtttcagtccgtgacttgggtggcaccctatcttctccatcagggatggtagctatttttctgccatgagactagaggttgcttgagaacaggaaattggatctctcccttcaggctgggatttcactaagggctggagaaggggggaatatgggaggattatctcctatcacagggagcgctctgagggcaaggctgtgtctccgattcagactgacggttccctgaggatggggctgtttctcccctccgactggggctccctgaggatggggctgtttctcccctccgactggggctccctgaggacagggctgtgtctcccctcagcctggggctccctgagtcagggctgtgtctcccctcagactggggctccctgaggacggggctgtgtctgcctcagactgggaatccctgaagatggggccgtgtctccctcaaagtggggctccctcaggacagcgttgtgtctcccctcagactgcggctccctgaggacggggctgtgtctccctcagactggggctccctgaagaaagggctgcttctccctcagactggagctccctgaagatggggctgtgtccccctcagactggggctgcctgaggatgaggctgcatctcccctcagactggagctccctgagggcagggctgtctccccccttcagactggggcctcccccaaaggacagggactgtgtctcccctgggactaggttctttgtgtcttctgcatcagacagattcccatgaggacagggctgtctccccctccatctggagctccctgaaggcaatggcctctcccctcaaatgggacatttgcaccccaccccaccctctggctccccatggcgcccaggcattcctcccaggacaccatttgtcacgctttgatgaatgaaacttactaagaataactcag

SEQ ID NO: 11862 - DNA, 1331 bp, Homo sapiens
gtgaggggcttagcacctgggccagcagctgctgtgctcaatttctccccgggccttagctgccttcccgcggggcagggctcgggacctgcagcctgccatgcctgagactcctcctggctccgtgggctcctgtgcggccagagcctccccgacgagcgccaccccctgctccatggcgcccagtcccatccaccacccaagggctgaggagtgcgggcgcacagcgccggactggcaggcagctccacctgcagccctggtgcaggatccactgggtgtagccagctgggctcctgagtctggtggggacgtggagaacctttatgtctagctcagggattgtaaatacaccaattggcactctgtatctagctcaaggtttgtaaacacaccaatcagcactgtgaatgcaccaatcgacactgtatctagctactctggtggggacttggagaacctttgtgtcaacactctgtatctagctaatctagtggggacatggtgaacctttgtgtctagctcggattgtaaacgcaccaatcagcaccctgtcaaaacagaccactgggctctaccaatcagcaggatgtgggtggggccagataagagaataaaagcaggctgccccagcccgcagtggcaacccgctgggatccctttccacgctgtggaagctttgttcttttgctctttgcaataaatcttgctactgctcactctgtaggtccacgctgcctttatgagctgtaacactcaccgcgaaggtctgcagcttcactcctgaagccagcgagactacgagcccaccgggaggaacagacaactccagacgcgccgccctaagaactgtaacactcaccgcgaaggtctgcagcttcacccctaagccagcgagaccacgaacccaccagaaggaagaaactctgaacacatctgaacatcagaaggaacaaactctggacacgctgtctttaagaactgtaacactcaccgcgagggtccgcggcttcattcttgaagtcagtgagaccaagaacccaccaattccggacacaggaggatcgcttgagcccaggaattcaagaccagcctgggcaacccagcaacactccatctctacagaagttgtaaaattagctgggcgtgatggggcgcatctgtagtcctagctacttatcctagccttggcgagaggatcacttgagcccaggaggttaaggctgcagtgagccatgattgcaccactgcactccagccggggtaacaaagtcagaccgtgtctctaaaaataaataaataaataaaaataaaataaatttgacaaccaa

SEQ ID NO: 11863 - DNA, 518 bp, Homo sapiens
tccctctgcccctcccttcagtggaggggagactttgaaatcaggtgcttggggggggggcgctgctcccagtgggggtgtgaggaacctggaggatgaatccctgtcccccgccctccccctactctattcttccttaccctgcccctttccactccaaaacctcaagcctctggttcacatctgagtgacctttccaaagcaactgttctcagggggtccttgggagccgggaggctgtgaccttaacccacttctttggacagtgccttcctggcactccacccccacctgccacctcctgagaggaacatttcggctggtcttggcaaaaacatcagtctatgatccaggcagcctggtacagtaccagctctgccactgacaccactgtgaccttgggaagccatttacacatatgggtctcagtttctccatatgtaaaatgacttttgtttagctttcctgattttcaaacctttttttcaaacagtgaatcctcttgtttaaattgtaaa

SEQ ID NO: 11864 - DNA, 2065 bp, Homo sapiens
gagaaagtccaggcaggaacctggttgtatatgggaaggaactgatccaagttgggagtttaaaatccaaggaaccagctcagatctgagacttgtgaactaaccttcggggctaacaggccagcaggtcagccaggatggtgagggtgactttgctcccaggcagttttccactccaccctcaggctggaggttgttttaaatattttatgtgagggaagaaagggaagccagcatgatcatctggggctgtctgctaatcgtgagcgtgtgtgtagaggggacagagagttttagacttggcaacagcaatcttttatttatgattaagtataagagtaggatgtaaagtccatttgcgttttagctgttatttaccatgctttaagttaggtgattttaaattattcacattaaattattcacattctcatcgctttagtttcttaaccttatacttctttcaagatgtccgccaacccctgaaaatatgtggcacagttgttggtgcacatatgtgtattttgttgggttagaggtgcacctgactcagtaaagattcagtctgctaattactgtattgctttctcttagctcagatggtataatgcaagcatatatatttcttcattgtaaactgttctcaagaggcgattttctactgattcaagtaaattatagagaggtgagacagatacatttaaaatttacatctttagtctaaccacaacattttttctcatattaatcagcaagcttttaatttttagttcagaaaggagaagtataaagttggaaaaaatgcatgtttgaaagcacacaatgctgccctatatagatagagagagagagagtataaaaatcaaaatgaaacacaacctgcaaatgtcagagaacatatttggaagaggaaatgcagctggatttgcccaaatttgcaaaacaccagatgttcccacagcttgtacatgatgttaaaaatgtaaaataaatgtgtactattcatacacagtgtgcagttttcaaatgtgtacccacatttaatttagaaagaaatttttggaaagaactggtaagctaattctcgagtgcataacaagaacaataagcaattgttcagatactagaattcagaaaggaatattcccaaggcctgaactgagtgcccaatccactggtaaaacataccagagaaggctcttcactttcatggtaacagtcattccattgccatttacatttgcagaattcctagaatctctggggaaaatatttacaaatagtattatgtcctgcagtcagagagtgaatttgtgtgccatttgagatgattaatatgcagaaggaaaaaggaagcaaatgtttaaagtgtatttgtaccaaatctaaatgcttttttttgttgttgttgttgttgaatcagattagagttgctcctctattgcttgtcaattcagctgttataagcatttttatagaagggacagagaacaagtgaatgggttagaaatccaggaaaatggttgtaaaagaggctgaaaggcaggtcagaacacaatttgcttggtattaggtggttagtaatggggagcatatgtataatcttagcctttgtgttttatactttccacttgctgtcaatagctagtactgctacatccatagataaatgcatggcaaatacttctctctcatatgaaatgctgtcaagaagtttgccaggatccttctttaaaaattcccaggtaatcatacagtttaaaaagtccttctggtaccttgcccagtgttactcaacctggaattagataggtatttacccactcccctttcccccaccttgcacgtgctgcctttccaactcccaccgtttgtgattcattgccatcgtaaaccactgcttctaatgggaaacatgttgtctcctttggattgtagcagaaaaattattgagaacctcttatctagcctactttctaaccttcaaactcatttctattgataattaagccagtatccctgcttacttgctttatttatttaataaaaggtatcttttgcctaa

SEQ ID NO: 11865 - DNA, 2066 bp, Homo sapiens
gagaaagtcccaggcaggaacctggttgtatatgggaaggaactgatccaagttgggagtttaaaatccaaggaaccagctcagatctgagacttgtgaactaaccttcggggctaacaggccagcaggtcagccaggatggtgagggtgactttgctcccaggcagttttccactccaccctcaggctggaggttgttttaaatattttatgtgagggaagaaagggaagccagcatgatcatctggggctgtctgctaatcgtgagcgtgtgtgtagaggggacagagagttttagacttggcaacagcaatcttttatttatgattaagtataagagtaggatgtaaagtccatttgcgttttagctgttatttaccatgctttaagttaggtgattttaaattattcacattaaattattcacattctcatcgctttagtttcttaaccttatacttctttcaagatgtccgccaacccctgaaaatatgtggcacagttgttggtgcacatatgtgtattttgttgggttagaggtgcacctgactcagtaaagattcagtctgctaattactgtattgctttctcttagctcagatggtataatgcaagcatatatatttcttcattgtaaactgttctcaagaggcgattttctactgattcaagtaaattatagagaggtgagacagatacatttaaaatttacatctttagtctaaccacaacattttttctcatattaatcagcaagcttttaatttttagttcagaaaggagaagtataaagttggaaaaaatgcatgtttgaaagcacacaatgctgccctatatagatagagagagagagagtataaaaatcaaaatgaaacacaacctgcaaatgtcagagaacatatttggaagaggaaatgcagctggatttgcccaaatttgcaaaacaccagatgttcccacagcttgtacatgatgttaaaaatgtaaaataaatgtgtactattcatacacagtgtgcagttttcaaatgtgtacccacatttaatttagaaagaaatttttggaaagaactggtaagctaattctcgagtgcataacaagaacaataagcaattgttcagatactagaattcagaaaggaatattcccaaggcctgaactgagtgcccaatccactggtaaaacataccagagaaggctcttcactttcatggtaacagtcattccattgccatttacatttgcagaattcctagaatctctggggaaaatatttacaaatagtattatgtcctgcagtcagagagtgaatttgtgtgccatttgagatgattaatatgcagaaggaaaaaggaagcaaatgtttaaagtgtatttgtaccaaatctaaatgcttttttttgttgttgttgttgttgaatcagattagagttgctcctctattgcttgtcaattcagctgttataagcatttttatagaagggacagagaacaagtgaatgggttagaaatccaggaaaatggttgtaaaagaggctgaaaggcaggtcagaacacaatttgcttggtattaggtggttagtaatggggagcatatgtataatcttagcctttgtgttttatactttccacttgctgtcaatagctagtactgctacatccatagataaatgcatggcaaatacttctctctcatatgaaatgctgtcaagaagtttgccaggatccttctttaaaaattcccaggtaatcatacagtttaaaaagtccttctggtaccttgcccagtgttactcaacctggaattagataggtatttacccactcccctttcccccaccttgcacgtgctgcctttccaactcccaccgtttgtgattcattgccatcgtaaaccactgcttctaatgggaaacatgttgtctcctttggattgtagcagaaaaattattgagaacctcttatctagcctactttctaaccttcaaactcatttctattgataattaagccagtatccctgcttacttgctttatttatttaataaaaggtatcttttgcctaa

SEQ ID NO: 11866 - DNA, 106 bp, Homo sapiens
tttttttgtatttttagtagagatgaggtttcaccatgttagccaggatggtctcgatctcctgacgtcgtgatccacccacctcagcctcccaaagtgctgggat

SEQ ID NO: 11867 - DNA, 106 bp, Homo sapiens; identical to SEQ ID NO: 11866

SEQ ID NO: 11868 - DNA, 1817 bp, Homo sapiens
acaatccacagcagcccctgccctcccagctgacccagggagtaatcgcgtgctctaagccacagtggtcggggctgggcatgggcctctggagaagagaagatttgaggagaactgtcctagaggcaggaggagcagatgtgtttcagaatgggcagaattaggaaattgagaaagattttggctcaacagaatccagcaactgctccagatgttggagatgtttaagcagaagctggttgcgcacttaatgaggaatgttgttgaaaatggtcattggaagaagtttaaggtcccttttagcctggagattgtacaaatcagcattccacatctggagttagctacccgcattaagcctgaacagacatcttggtctgaaaggaagtggtttggattcatgatgccaagctccacactatggagctgggaattccagaattgctttgactcagatattaatggagaaagtcatatccattaatggataaagccgtatctgttatggataaagccgtatccagagttgctttgactcggatgttaatggataaagccaattattgatttctatttgcctaacctgccagcttttgtccaagtggggaatggagagccatagggatgtttgtcatctcacatgttttggtgatctgctgtctgtgggtctggatggaatttgttggcaagaccattttctgtattggatattcttcccaacagtgtccaccccaaaaggctttcagccaaaacgtctgagcctaggtaggtttaccaagggaagccataagtcaagaagcatcagagtgaaaaggagcacttccttcattttacgcccagaggctaatgctccgagaggaatgtgtacttgggcaaagtcatgcaggaaggtcatatcagagctgtggaggctggagtgtcctgattcttggaccacagatgtctccctgagccattatttatttatttttaaaaagcacagttattccatcattttgagtctttgtatttcgcttatattggggggcaggactattttctcaggtgtctcatttggcagtcaacattgtcccctatgttccctatgactagttgaaaattcaagtgtgcccacaggggtgcacaaaaccacacccatgcacacacacaccctcagcccccacacacaccccgttgaacccgtgggtctatcaggacatcctaaaactccgtgattgacatttcagtaatttcaggggaaggtgttttccagggatggggtctcccaggttcagatagtgcctttggctgcaaatgctcctttagctaaacttttcctcaggaagaattcattattctagacattatgtgatatatctgttaggaataaaaggtgcttaaccttcctccctgggatgtgggagaaggtgctggaggttgtactgtgaagtcttcaggctcttagaaggctccagcctgagagagccctttattattgacattcctgtccttcctcaaggcctggtgacctgtgacctttcgctctgggcagggcccaggtagatgggccgtcatccgggcctgtaagccgtacttgatttctgcattgatttacatattttttactgtgatcttggttccaaacacagaatcgtcaccccattctcccttgaatgtgccggatccttgtaaattctcatttacctacttgttcttagtgtgtatgtgtgtgcgaaactctatgttcaagaaagaaatcatacaaagagtaagaacatgtttgtgccattgaagaaatggttttttgatttctaataaatatttgttttgcctcgtta

SEQ ID NO: 11869 - DNA, 1817 bp, Homo sapiens; identical to SEQ ID NO: 11868

SEQ ID NO: 11870 - DNA, 332 bp, Homo sapiens
ccagagtgtgcgggggacggaggtaagctggatatcctgggggaggaggggaatgcgctctggaaacacccttccggaacccttcggggaaaaggagaccatccttggagtgaacgtcccctgacaccccaaggttcaaactgtctcaagctgagagatgtttttagtagcagaattaacacagggttttaacttgcaatacggaaaagacatttcagttgagaatgaaaattactacaatgaagtttgtgattttaaaagtggagacagactgggggctttggggctggatgtaagtattatatatttggcctcagggtgcccagagcaag

SEQ ID NO: 11871 - DNA, 332 bp, Homo sapiens; identical to SEQ ID NO: 11870

SEQ ID NO: 11872 - DNA, 2227 bp, Homo sapiens
cgaagtctcacactgttgcacggctgtagtgcaatggtgccaactcagctcactgcaacttccacctcccgggttcaagtgattctcctgcctcagcctcctgagtagccgggattacaggtgtgtgccaccacgcctggctaattttttgtaatttagtacagacaggggttccctatgttggccaggatggtcttgatctcctgacctcatgatctgtccgcctcggcctcccaaagtgctgggaatacaggcgtgagccaccgtgccctgccagaatagcctattaaccagtctacctgcttccacttttcctccaccctgatcacatacacacatgcattatccactgagcagtcacaatcagatgttaaaccaaacattattcagataagatctctgaaaagcctctgatactttctcttttaaaatggaatatattctaaacacctctccaaggacacaagacttaccttgtctaactaatgacttttctaacttcattccctatcattctccatcttgccccatgctcctcatgcagcagcttttttttttttttcctttttcaaatatgttggttttgatcttatccaagaacctttgccctgatgtatgaatgactaactgcttttctacttcgggggtctcatatagaaatcctgcttcagaatactcttccctgagcactctatctaaataaatccctcttctgcaacccagtgctttttgttctattactgacttcttttccttgtagaagttactattactgctttttacctttttatttatttgtgtattgtctttgttgttgccctcatcttatctccacaaaaatatatgctccataaaaacaggcatttctgtgtcttattcagcactttatcagggcctataacaatgcctgggacatattcagtgaccagtgaatatttttggaaggaaagaaaagaagaaagaatgaagtaacaaacaaagaatgaaggaagaaaaaatttttacaaacattcaacatatttttattttgaaataattgtgtatttttccctatatcctacattggatcagaatattactgacatgtatagccatgacgacatggtctcaaaaaatgagaaactttcttagacagtaaaattgttaacttgagatgtctgcttccatcttctagagccaaggaggatctaactttaattagacttagccaataatctgaaactattatagtatctgcctttcacagatacatgcaatattcacttctaaatatttaatgataaatttgtaatcatacatgatagtcaattttaatgattatgttgacaaaattcaggctttttgtgtgaattgaagacttaaagaagtatttgtaaatatgtctgtataagaaccaccagaaagatgaagatgagccgtaatagaaatatcaagaggctacaaagtcttagcaaattataattgctaatggtacattatgtggtgtttagtatcacatttagaatgtagtcatttgttaagtttttcatggggtaaaagaaagaatttattccaagaaaattttggaattttaaaaataaacatgacatcttatcatgagaaacatttacagtttttgcttttactacaagatactgtgaaatgttctgctctgtcagttgtgaaagtatgaaatttaagtctatcactacaataatattttgtttttagtgttcatttttttcctcctgactacattgagatgagttagattgagtgaaaggtaaacactaacatttgaattgaggtaatttccactgtggaaaacaaactgttgttagtaaacaggcatcagctttgagacacagaaaagtcatccaaaccagaagattgggaacttcctcaattactttgtcttccatttattgcattcaattagtcaaaaatgttgttaattatacattttaaagactatttttggtaaggtctatgacacattcaaaatactacatacaagtttgtattatcataaataatccaaaagaaaacatacatgtaaccaccaccatctggaaatttcacactaaattataaaacatttccatcactgcatgtattgtttaatgtcgctttatgaatccaccttcttccttatctgtagagttaaaaactacttagtggattagggtaattcattctacttttaaaaatgatttttccacctctaatgtattctataaaataatat

SEQ ID NO: 11873 - DNA, 748 bp, Homo sapiens
ccactatacttctccagtgattgccagatggcccactatacatcctttcttctatttctttcttttgtggccagaaagtcaggacctcaaagaggtataagtttgtgtgtataattccctggcttttttctaaaattttagtatgcatttatgtggcacttaatatataaaagagttttatgagttttaaaaatgtatataaacaagacatataataaatggtatgtcatttcacaatttactatttttactcaacatttatatttctgagacttttcacatttttgaatgtattcatagtttcactttaattgatgtttgccatgaaagatcaaatatatcacattttatttgactaaaaagtaaactatatttcctacattatgctatagaacttatagactaatttaagttaattataggccttatctcagacctttgcaagtagcctgaataaaacttttcattatttatattatcacatgcatatatgtgtgtatgtatatatgtgtgcatgtgcatgcatagtaaaaatcttaacccaaaactgaaataaaaaattataagagaaaatactattttccaccaatatcacaatggataatcttttttaaatgactacatatgtcgataagttacaaaatccatatatgagtatgacaccaataagaacattttctctaaccattttgaatacgaataaccatggattctaatagcaaacattattaaaatattattgaaataa

SEQ ID NO: 11874 - DNA, 155 bp, Homo sapiens
acacaatcaattcatcaccaattgtcatttgatttacttcaaaaaatatacccccaaatcctaatacttctaaccttctccactgcatctagccaactctagctattgtcatccctaacagaaatggaggaatagcctctttttttttttttttt

SEQ ID NO: 11875 - DNA, 3002 bp, Homo sapiens
cccacaggaggcgccggtgggggtgaggcgctgtgctctctgctcatgcccctctgtgtagggcatggccaatttcggataactgctttgtttaccacacaggtgctttgcttgtagaatggcccacacctaaaacgcagccaaaacaggaaaattgggactttgtgtttttattttgtcttcatatagcgttttcttgtgatttttgtgttctgagttgtaaatacttctaaatttcaggtttatcttttaaaatagctgtatagatttctattagaaaatagagttcaacctgctttgaggctttcttgttttgcttaagccgtattaaaatacagtttcgtggtattaatatttttctacttttcatgcaagctgagcatgtaaacagctcgtttgtttgctctcctaagatcttgattcctttttctttgggaagtctgttagcgctgtcattactccacacattggcatttggacccacttttaacacactttattttggagagacttcagatagtggacaaactaaagaatttaaaatgaaactcaaacaattcccagaacattattctataagcagcttggagacgatagtttgaaaagtaattcagtgtcctgtttcttcctcaggcttcagggatgacttcttagggggcaggggaggtagtcgcccaggcgaccggcgaacaggcccccccatgggcagccgcttcagagatggccctcccctccgtggatccaacatggatttcagagaacccacagaaggtacgggctcatgtgtcagtggagggcatcttgtcctgatgggatgatcatggccggttcacaccccgtggggacttggcgttctacggcacacagagttgtcggcatagatccccacgttctctggaatagcaagttcaccttggtcattagagcatctgctgttggggtagcaggccaggtgaattttagaaagtgggctggtttgctgacagcaacatcagcatggtcgttttgctggatatggaatgggatccacactctgacaaactctgctttttctcccccagaggaaagagcacagagaccacgactccagcttaaacctcgaacagtcgcgacgcccctcaatcaagtagccaatcccaactctgctatcttcgggggtgccaggcctagagaggaagtcgttcaaaaggagcaagaatgagcctgcggttgggagggaatggggcgtggggggttagagcaggaccacagcctggtgagtccccgggcagccgtcctgcagccgccactcctgcgcctgccattggcctcctcacagcggaaacacagcttgtgagtgcatgtcagctgttaacaagtggtttttagtacattctgggctttgctgtatctatctagtgcctgtttgtgcgtttttttctttcttccgctgcttccccattttccttctgtcctttttctcctgctccttgttttcccagcagcacatggggttcctcggaggagcagaggtggccgccgtgggggggcgtttgggctgcggtgctgcgtcatttttcctttgctttctctttactttagacactggcccaactccaggcgtttcctttcattccctcagtgcttctcttctgacctgcatgttgagttctgtattgctggggcttccaacaaaaaccagagtcactgacagagggaacagcagagaccttgttggtattcagctgtgatggatatagagaatcagaggcaccttgttttcacaactaggataaaaatatctgcagggtcctttccattcctatttagagggagtcctggctccatgaccccctcccgagtggactgtccaagcagataggctcacacgagaaacagtgaggctgaaagggggggctatggaagagcggtagggagtccacggagaagatgcagtgaatgcttgcatgcattcacacgtgtgtgtgtcccagctagttcactcctttcgccgtgcgtggtggaggctggcctctctggctgggtgcagtgaatggccagcgggtttcttttctgctgggccaaggcgctttgggggtggagggggtggtgctggtgctgcactgggctgactgcggcgctgacgcagcgtttccccccatccctgttgcctgtgtgttgtgtggatctgttcctagtataggcaacataatgagatactgtgcttcccacctccccttcagttcagagccaaaatgggtctagaatctggcactttactcatttcctttgataaattgtactatgcagagctgtcaggaaccttcagatagcagtagaggactgcagctgtctaggtctgcggccacatcttggggacacactggactgttcccatgtgcagggttcagcagttatgtgggagtgctaggggttaggcttttgagcttgaacgcctgcgtgtgaacagatgaaaaatccttcagtacccaagtcccagtctgtcctatggggagcagtttgggggcggccggcagcaggagcctgggaaagaggccctcgccaggtgatggcagggccagggtggcctggggcacccagcggaatgtgcttagtatttggtcaccagccgtcatcctgggcttttcctactgtgtcttgttacaaggcctcagcaatccacagaactctctctccttccttccacctgtcagcttctctgcttctgagataagaaccatttgtgtaacaccaacacttaacttcagaaagacatgcattatgtggtgtaatcaaacccgatgctttcagatgacctacttacatcttcaatgtggataagataaagaacaaaacacatgcatctaaactgctgggcaatccagttgacttttaaatgtaagaatggaattccaaacacttaacacattcagctatatgacagaaagtaaatctatggatatggtattttgtgaatgatcttttaaataaaagaaaaccttacgtaatatttaatgcttgcc

SEQ ID NO: 11876 - DNA, 13189 bp, Homo sapiens
ggtaaaaagtgcttaagacctgtagaagggactacatcaggtagggtatgggaatatttaggactactttggtaattattgaaaagtctagagtattaagccactggtggttttgtgaggcacgagtgagttgaacagtttggtgggctttggtgtatctttgctccagaattatatcaccagttagctgttaggtgctgccatttggtaacgtgccaacttttcaaaaatggtttgccccaaactagatttttctatcttctccaaagccagagccaccttcctgtcctagtgcatttttagcagtgccccgtcatcttactggcattcacctgggcttcctgtgctcaatcaggggtcaagtctggcctgatctcagttccacagttcctctactctgtaagttcgagcacaattagcaagccttcgcacctccattttccttacttagcaactacatcaaacacccgagagtttatcatctctcttcatcctcaccctcctttttagtttttatgtatatgttacacattcatacacacaaacatacctgcatatatacatgtgttttatacgtcccacacaactgtgagctgcttacatacaagacagtcttttaacatcattacgcatcactagatgtttaatgttgagtaatgaatttaaactgtttttaacattgaccctccatttttatggttttccacatgtttatactgtatcttgttttttgtttgtttggttttgttgttgttttttgtgcttttttgtttgttttttgtgtttttttgtttttgtttttttgagatggagtctcgctctgtagcccaggctgaagcgcagtgacacagtctcagctcactgcaagctccacctcagcctctgaagtagctgggattacaagtgtgtgctaccacacctggctagtttttgtatttttagtagagacggagttttaccatgttggccaggctggtcttgaacttctggcctcaagtgatccacccaccttgacctcccgaagtgctgggattacaggtatgagccactgtgccccgcctttttgttgttgttgttgtttcttcagttggagacagtctccttctgtcacccaggctggagtgcagtggtgccatcacagttcactgcagcaacaacctcctgggctcaggtgatcctcccacctcagcctcccaggtagcttgggactacaagtgtggaccatcactcccggctaattttttgtattttttatagagatggggtcttactgtgttgcccaggctggtcttgaactcctggctttaagtgatcctcccgcctcagcctcccaaactgttgggattacaggcatgagccactgggcccggctttatactgtaactcatatatttattatcccgtcctaaatagtatcttactgaaaatattttaggatttatgatttcggagatatcagcgatagagtactattggcaaaggttattgaaatgcaaagtaagtcacatttactaggcccgaaaagatgggagaagtgggcaggtaggatgcaattcacttgtaaacctattttctggtggtcttagaacagaacgtggaacttcctattggaaagtaccggaattgtgaattatgaaacttaaaagcttttttttttttaaccatcaaagaatcatcacagcttggttgacccttctactttagaaaaatgctttaatgaataatatttgtctgcaagacacctggaatttatcttcaggaagaagtggaatttccattgtgtttctggcagtatgtagatgaaagaccaggttgctctctaagatggatattaatatttcccctgcaaagagggtgactttgggcaggtcttgggttgttgtgaaggatctcatttatttgaacgcatttcccgtttagaaaaaaaaactgcagttggctgccagcacggtattcttggagcaaacaggaaatgggttaaatgtctgtttcaaaaaaaaatcacccccttaatttttttttcctcctgagttttccaaacgttttattttggaaattttcaaatctacaataaggttgaaataatggtacagttggatgacgctagtggatgcagaagtgactattctgccttgtttgctgaatccttgctgtataccggcacacatgccctttatgctgacctgcttgaaaacaaatgttggccatcttggcacttcacttctaacgactttaagtcgttcctggggcattcttatggcaaatatcgtttaatataataatctatttatactatattctgatgtcttttttttttttttgagatggactctcgctctgtcgcccaggctggagtgcaatgggctcactacaacctccacctcctgggttcaagcgattctcctgcctcagcctgcccagcagctgggattacaggcatgcaccaccacaccaagctaattttgtatttttagtagagacagggttttaccacattggtcaggctgatcttgaactcctgacctcaagtgatccacccacctcggcctcccaaaatgctgtattaggattaactcagttttacaaataaaataaagcttagagaagttgaataacttctcaaggtcatatgctagtaagtgacagaggctagatttaaaccaatacctatgcagagtaaacgacgcttgatacagctgaggagatgacatcgaggttgaaatggattggtaatgcacgccatacgcatgtatttgaggaccctgtgaagtattgcacgagagtgttaggtacgtcagtacttgctgtgtgacatctaaaatttttattaggacattcttatgcccataatcaggcaacaaggagaaatttttttttttttttttttttttttttttttttttttttttttttttttttttgagacggagtctctgtcgcgtgagctgaagtgcagtggtgcgatcttggctcactgcagcctccgcttcccaggttcaagcggtaggagaaataattctattatgtatgaatgtgttaaacgtaaacaacttcagtaatccttcttctgaatacaacattacttctagactgtccatttctgtatttcttagaaccacggtgtgtgaaggagggtacttgcttaggttttaggatgtaaatactgcagatacagattctgagtgaataggagagaagcagttgtcttaggaaggtgtgttacgtttgggctgggcatggtggctcacacctgtaatcccagcactttgggagggtgaggcaggcagaccacctgaggtcagaagttggagaccagcctggccaacatggtgaaaccctgtttctactaaaaatgcacaaattagccaggtgtggtggcacatgcctgtaatctcagcatccttaggaggctgagacaggagaatctcttgaacccgggaagcagaggttccagtgagccaagattgtgccactgcactccagcctgggtgacagagtgacagtctgtctcaaaaaatttttcttttcctttttttttgtttctccagccattctctgtaacagtcttgtggtacatcgagcagagtgcctcacctggggcgctggcggcgtagctcagcggaagaccgctttacttgttttgcttattccactctgggcacacttgaatcctgtttgtctcccctcctaggtcccgcggcagtgctggtggccatggttcccgtagccagaaggagttgcccacagagcccccctacacagcatacgtaggaaatctacctttcaatacggttcagggcgacatagatgctatctttaaggatctcagcataaggagtgtacggctagtcagagacaaagacacagataaatttaaaggtgagtttgggggattcttattgtatattactgtaaagtgtaggggaggatgggaaggggttctaaataaaaatagatttgtgaaccagaggctgtaatcaagaaagtgttttaaacatttgcctggtctaagtggccgaaagaaacataactcttcaactcataggtcttcagttcacttaggggaaaatgttttgtacacagtgtagttcatagaaatacatggcatatgcccaggtttgtgagcctgacctctacagcagtcctgtctgccagtaaaggagttccccaggagagagaggaatagagccgaggactcttaggcacattcctcctggaatgactcgtagattttccttggtagttaatccagtaatcatatggtactgtcatccagtaatcataaaacccagaagagaagcagccagtgctgtcagtatgcatttgtaaatttggagagtgtgcttgggagggctggctgagatttcagatatggtgtctataggtcgtgtgtctgcagggtgcgggagcaaagagcaggaagaagaagggatccgagcagcattctcctgcctgcagggcttcctgaaggaagtgtgcctgctgtgtaagtgcacgatgctaggacccaggatgtttggcccgcataatccacccaaaagcacatctgtgacaagtatggggtaacttggggcggggagctgtgccagcagtcgagaaggccttgctgacctgggtggttttgtgtgtcggtggcactcttactctttttgacttcagaatctgaagccacatgtagtgtgtaatcaaacagtgaaaacaaatatatcagttacacttgtgaagtaagctccaggaagcattaggaactaaactttgggttggagtgtgtgggtgagcctagcctttgggctgggtcagtcgctgcaggctttggagtttggctcatgaaggaccatcttcatttgagcagctctagaagatgagattgggtgtctgttgcttctgtgaagttgggggtagttttctccattattctcaacattgaatccacttagggaggaaacctggggggacatccctccagccaaggcagtatgttcttaacacacagttggtaaacagggaaagtttggactcaggcctttagagcacttgcggtctagtgggcttcaaagatgaagtgtgattattaagttattatacacagggcaaggacgctgggggagaggggatgcagggtgtagtgccagcatctggggagtaatgaactagatttagactccagacagcaaggaaggggcaatgtcagacccctggcatcagggacacaggttgtcagtaacaggtacttggacccaggctgcctgtcttttaattaacattcagagaagaatgccctgattgccaaggatatattttcagctttgtgaagcaaattttatgtcagttacctgagtagtaagttaaatcggcactttaagcctctttcttcagagcattttaggtaccaagtttgaaatctacgaaatctaatcctcacttagattaaatagtcattcagaagtcagaagagctctgcagatggcctgagaaaggtttgaatattatggttaaaacattcaagaagaaagctttctagaaacgcagctgctatttcagtgcatgttcagttagcattttctgactgataaaatagaattgagagggaggaatgccagtcagggttctatctattgaaaggctctcctagtctgccatcatctagacaacagaatggtagttgtgacgtggagaagtagtatgaataggatcttcccacatctttaacccagaattacttgaggaaatcggggtcttcttttcttttccaggattctgctatgtagaattcgatgaagtggattcccttaaggaagccttgacatacgatggtgcagtaagtatcctcgggttttctctgtcatagcagttgagattgttttctttgccaatacttacactattttccctttatcattagctgttgggcgatcggtcacttcgtgtggacattgcagaaggcagaaaacaagataaaggtggctttggattcagaaaaggtggaccagatgacagaggtgattggttcttctaaagctgaacatcataaagatttgcagtatgcctaccaattccaactcgtgaacgttcctagtagaactcgattatctcataggtgtgataggttctcgtgagctcttaaaagtttgcgtaaaatcctagaaagaatggctgatgcttctgcaagcctggcgttttttgttttctgttggaagcaaaagctcttaaaatgatttcattgaaccttccatcacttgagttgtatgtcttccaaatgaatttttccatgtttgcgcagcaaggtaatgacacgacctcaactttatcttttttgtgtatcctcaggaatgggtagctctcgagaatctagaggtggatgggattcccgggatgacttcaattctggtatcagtatttaaagtatcaccacttaatttttcctaggagccttgctgctgttctctgtttcttacgagtagcccgcctggccggactacttatttagttcctttaacaaatacaactctcctgcagggtgcccaggcatgcaagtaagcctctgttagagcctgtgggggcaggacttgagccccatgcaccttgtgtggtcacctttgttagcctgcagctccttggatgtgtacgggcctgggtccttgagctcgctcagcagtctttctcagactctagcccagggaaactcctctgtggttttgtgtatggcaccaagagaagtactgttccttctggaaaacataggatagaggtttgggttcttacatggtgaaaggtagtcctgatggcccttttttttcttggaggattgtggggaggtccagtcccttgatggtggacctgatgcacttcgccgttctctttcttagccaacccaggcagagcagctggtggtatagcacaaagcatcagtccacacgccaggcctctgccctgcagggtgattttaagcatttttatcatctttactttctgtttttaaattacaaaagtataattttttatatatgcacatgataaaaacttcagttgtaacccagaaaggtaggaagagaaaaacaaatttgttttctttcccgcaaacttgggatgtgctgtcaatgctgtgctgtatagaacgtcagcaccctccccccatcaaaacaaaaccggtgtaaagtagtgggtgagtatgggagggactggtgcacgctgtcttgtgagtctgagatttttaaaaactcagctttggctgaacaggtgacgactacctgttgaataatatagttcttaaaagtcctgtagccagtcagaaatgagcttattcataaaagtgcagtatggtgaagtcaatctgtaattttatgtataagctagtctctgattgaaacatgcagcagctgtcttcttagagccaaccagcagctcagggaacggcctttcccctgccagtttggtattcgcaggtgttatagaagttgcccacatactaacgtctttctacccttggcttagcttggccactggcgctcaagcagagacacagtgaacacggccatggcctggccgccaccagttctggtgggaactgcagtgttttggtgacatctcaaaccctatgtgggctcactcgatggagtaatggctaatttgatactttatacgttatttgcgagagtagatcttttttactttttaataggatggtgctattttttttaatgatacctgctcatgtaaaaaacaaaatagagcaacagaaaagtaccaagaaagcaaaaacatttcatcatcagaaatagccagtgttaaactaagctttgtaaagaaaactctgaagattctcatgaatagtttgcttcctagaaacccaccaacagattttttgttgttgttttttttgagacggagtcttgctctgttgcccaggctggagtgcagtggtgcgatctcggctcactgcaagctctgcctcctgggttcatgccattctcctgcctcagcctcccaagtagctgggactacaggcacccaccaccacgcccggctaattttttgtatttttagcagagacggggtttcatcatgttagccaggatggtctcgatctcctgacctcgtgatccacctgcctcggcctcccaaagtgctgggattacaggcatgagccaccgcgcccggcccccaccaacagatttgatgagagatccttgttcatctgcttcaccagcgtggtgtgagctatttgtttcacgctagacattggtggtcgaaatcatttaatctcatagtaaagggtgtaaatttactttgtactcacgtggaaaggtacacttcacagtttagtttgggggaaacgtgaagttaaatgttttaatactaactaggcttgttcactgaactgtgtaatgtgggtaaaatactttgtaaaggaccttatactcgactgtatgcctcccagtgtatttcccctaaagcagtgctcttattggtctaaatctgttcagacttgctttcattacttggtttgttaaaatttattatttaactcagtctctgaactgggtgtgagatcccttggtttccaaaacccttgccacctttaaagaatagaaatcggcccccaccacaggtgatgcagtcagcgcttatcattggaggtggttctgtggagttgctagaacactgaatgagcccgtgcggtgctgctcctgtgtgctacagatcacaacattttcgtcagctgatcatacctaacattgctttatgtgacttttttttttttcttttttttttttttgagacagaggctcactctgttgcccaggctggagtgcagtggcatgatttcggttcactgcaatctccgcctccagggttcaagcgattctcctgcctcagcctcccaagtagctgggattacaggcgcacaccaccacacccagctaatttttatatttttagtagagacggggtctctccgtgttggtcaggctggtctcgaactcccagcctcaggtgatctgcccacctctgcctcccagagtgctgggattacaggcgtgagccaccacacccagcctatgtgaccttgattttaaagacgcctcatttaatgttagtgttgattcatttaatagtgttaacattgaactcagggccagctgtagtaagtagtctgtggtgccatcatttcagcctgttagaaagctcatcccacaccggttttgtctgtaagacacctgacagccagcctgcacttaagaacagcagacagcacttcacactgcacctggggccacttcagacagcgatgtcaccagaaaaagcccaaagggcaaaacacccgacactcatcgtgaaaagacttgacagctaataactgaaacaggcagagcattatcgttttctgcctcagctgggatcgtcgcatctgtgcaggtccaggactgactggagaaatgctgctggtatctagcttgggattacacatgaattttagcgactgggtggatttgcaaatatgggatctgtggataatgaggatgactgtatagtgcatactgcgggctctgggggttcttctcaaagacaagctccctgaaagcttggagccttggcaccactctcgcagagagtagcagtggcaccccctgagtgcgcaaccaacagcagcaagctcatttgtttaattatggtttaacttcttttcgccagtttttttttttttccttgagacagagtctcacttcatcacccaggctgaagtgtaatggcacgatcttggctcactgcaccctctaccttccaggttcgagcgattatcctgcctcagcctcatgagtagctggaaccccaggcgtgcgccaccatgcccagctaatttttgtgttttttgtagagagtgagtctcactgtgttgcccagtctggtcctgaactcctatactcacctcccacctcagcctcccaaagtgctgggattacaggcgtgaaccagtctttttaccaaattttaacatcagtaggttatacagttaaagtttagctttcactgaagtacaagcctgaaggccccttaagaccattgagaaaatactctttcctcctacacaccagtgggaattcagcatttctaaatgagatgcagtttacttctgccaagagcccacttagcaggcacacaaatgaatggggaaagaacgctttgcccccacaggaggcgccggtgggggtgaggcgctgtgctctctgctcatgcccctctgtgtagggcatggccaatttcggataactgctttgtttaccacacaggtgctttgcttgtagaatggcccacacctaaaacgcagccaaaacaggaaaattgggactttgtgtttttattttgtcttcatatagcgttttcttgtgatttttgtgttctgagttgtaaatacttctaaatttcaggtttatcttttaaaatagctgtatagatttctattagaaaatagagttcaacctgctttgaggctttcttgttttgcttaagccgtattaaaatacagtttcgtggtattaatatttttctacttttcatgcaagctgagcatgtaaacagctcgtttgtttgctctcctaagatcttgattcctttttctttgggaagtctgttagcgctgtcattactccacacattggcatttggacccacttttaacacactttattttggagagacttcagatagtggacaaactaaagaatttaaaatgaaactcaaacaattcccagaacattattctataagcagcttggagacgatagtttgaaaagtaattcagtgtcctgtttcttcctcaggcttcagggatgacttcttagggggcaggggaggtagtcgcccaggcgaccggcgaacaggcccccccatgggcagccgcttcagagatggccctcccctccgtggatccaacatggatttcagagaacccacagaaggtacgggctcatgtgtcagtggagggcatcttgtcctgatgggatgatcatggccggttcacaccccgtggggacttggcgttctacggcacacagagttgtcggcatagatccccacgttctctggaatagcaagttcaccttggtcattagagcatctgctgttggggtagcaggccaggtgaattttagaaagtgggctggtttgctgacagcaacatcagcatggtcgttttgctggatatggaatgggatccacactctgacaaactctgctttttctcccccagaggaaagagcacagagaccacgactccagcttaaacctcgaacagtcgcgacgcccctcaatcaagtagccaatcccaactctgctatcttcgggggtgccaggcctagagaggaagtcgttcaaaaggagcaagaatgagcctgcggttgggagggaatggggcgtggggggttagagcaggaccacagcctggtgagtccccgggcagccgtcctgcagccgccactcctgcgcctgccattggcctcctcacagcggaaacacagcttgtgagtgcatgtcagctgttaacaagtggtttttagtacattctgggctttgctgtatctatctagtgcctgtttgtgcgtttttttctttcttccgctgcttccccattttccttctgtcctttttctcctgctccttgttttcccagcagcacatggggttcctcggaggagcagaggtggccgccgtgggggggcgtttgggctgcggtgctgcgtcatttttcctttgctttctctttactttagacactggcccaactccaggcgtttcctttcattccctcagtgcttctcttctgacctgcatgttgagttctgtattgctggggcttccaacaaaaaccagagtcactgacagagggaacagcagagaccttgttggtattcagctgtgatggatatagagaatcagaggcaccttgttttcacaactaggataaaaatatctgcagggtcctttccattcctatttagagggagtcctggctccatgaccccctcccgagtggactgtccaagcagataggctcacacgagaaacagtgaggctgaaagggggggctatggaagagcggtagggagtccacggagaagatgcagtgaatgcttgcatgcattcacacgtgtgtgtgtcccagctagttcactcctttcgccgtgcgtggtggaggctggcctctctggctgggtgcagtgaatggccagcgggtttcttttctgctgggccaaggcgctttgggggtggagggggtggtgctggtgctgcactgggctgactgcggcgctgacgcagcgtttccccccatccctgttgcctgtgtgttgtgtggatctgttcctagtataggcaacataatgagatactgtgcttcccacctccccttcagttcagagccaaaatgggtctagaatctggcactttactcatttcctttgataaattgtactatgcagagctgtcaggaaccttcagatagcagtagaggactgcagctgtctaggtctgcggccacatcttggggacacactggactgttcccatgtgcagggttcagcagttatgtgggagtgctaggggttaggcttttgagcttgaacgcctgcgtgtgaacagatgaaaaatccttcagtacccaagtcccagtctgtcctatggggagcagtttgggggcggccggcagcaggagcctgggaaagaggccctcgccaggtgatggcagggccagggtggcctggggcacccagcggaatgtgcttagtatttggtcaccagccgtcatcctgggcttttcctactgtgtcttgttacaaggcctcagcaatccacagaactctctctccttccttccacctgtcagcttctctgcttctgagataagaaccatttgtgtaacaccaacacttaacttcagaaagacatgcattatgtggtgtaatcaaacccgatgctttcagatgacctacttacatcttcaatgtggataagataaagaacaaaacacatgcatctaaactgctgggcaatccagttgacttttaaatgtaagaatggaattccaaacacttaacacattcagctatatgacagaaagtaaatctatggatatggtattttgtgaatgatcttttaaataaaagaaaaccttacgtaatatttaatgcttgcc

SEQ ID NO: 11877 - DNA, 13160 bp, Homo sapiens
ggtaaaaagtgcttaagacctgtagaagggactacatcaggtagggtatgggaatatttaggactactttggtaattattgaaaagtctagagtattaagccactggtggttttgtgaggcacgagtgagttgaacagtttggtgggctttggtgtatctttgctccagaattatatcaccagttagctgttaggtgctgccatttggtaacgtgccaacttttcaaaaatggtttgccccaaactagatttttctatcttctccaaagccagagccaccttcctgtcctagtgcatttttagcagtgccccgtcatcttactggcattcacctgggcttcctgtgctcaatcaggggtcaagtctggcctgatctcagttccacagttcctctactctgtaagttcgagcacaattagcaagccttcgcacctccattttccttacttagcaactacatcaaacacccgagagtttatcatctctcttcatcctcaccctcctttttagtttttatgtatatgttacacattcatacacacaaacatacctgcatatatacatgtgttttatacgtcccacacaactgtgagctgcttacatacaagacagtcttttaacatcattacgcatcactagatgtttaatgttgagtaatgaatttaaactgtttttaacattgaccctccatttttatggttttccacatgtttatactgtatcttgttttttgtttgtttggttttgttgttgttttttgtgcttttttgtttgttttttgtgtttttttgtttttgtttttttgagatggagtctcgctctgtagcccaggctgaagcgcagtgacacagtctcagctcactgcaagctccacctcagcctctgaagtagctgggattacaagtgtgtgctaccacacctggctagtttttgtatttttagtagagacggagttttaccatgttggccaggctggtcttgaacttctggcctcaagtgatccacccaccttgacctcccgaagtgctgggattacaggtatgagccactgtgccccgcctttttgttgttgttgttgtttcttcagttggagacagtctccttctgtcacccaggctggagtgcagtggtgccatcacagttcactgcagcaacaacctcctgggctcaggtgatcctcccacctcagcctcccaggtagcttgggactacaagtgtggaccatcactcccggctaattttttgtattttttatagagatggggtcttactgtgttgcccaggctggtcttgaactcctggctttaagtgatcctcccgcctcagcctcccaaactgttgggattacaggcatgagccactgggcccggctttatactgtaactcatatatttattatcccgtcctaaatagtatcttactgaaaatattttaggatttatgatttcggagatatcagcgatagagtactattggcaaaggttattgaaatgcaaagtaagtcacatttactaggcccgaaaagatgggagaagtgggcaggtaggatgcaattcacttgtaaacctattttctggtggtcttagaacagaacgtggaacttcctattggaaagtaccggaattgtgaattatgaaacttaaaagcttttttttttttaaccatcgaagaatcatcacagcttggttgacccttctactttagaaaaatgctttaatgaataatatttgtctgcaagacacctggaatttatcttcaggaagaagtggaatttccattgtgtttctggcagtatgtagatgaaagaccaggttgctctctaagatggatattaatatttcccctgcaaagagggtgactttgggcaggtcttgggttgttgtgaaggatctcatttatttgaacgcatttcccgtttagaaaaaaaaactgcagttggctgccagcacggtattcttggagcaaacaggaaatgggttaaatgtctgtttcaaaaaaaaatcacccccttaatttttttttcctcctgagttttccaaacgttttattttggaaattttcaaatctacaataaggttgaaataatggtacagttggatgacgctagtggatgcagaagtgactattctgccttgtttgctgaatccttgctgtataccggcacacatgccctttatgctgacctgcttgaaaacaaatgttggccatcttggcacttcacttctaacgactttaagtcgttcctggggcattcttatggcaaatatcgtttaatataataatctatttatactatattctgatgtcttttttttttttttgagatggactctcgctctgtcgcccaggctggagtgcaatgggctcactacaacctccacctcctgggttcaagcgattctcctgcctcagcctgcccagcagctgggattacaggcatgcaccaccacaccaagctaattttgtatttttagtagagacagggttttaccacattggtcaggctgatcttgaactcctgacctcaagtgatccacccacctcggcctcccaaaatgctgtattaggattaactcagttttacaaataaaataaagcttagagaagttgaataacttctcaaggtcatatgctagtaagtgacagaggctagatttaaaccaatacctatgcagagtaaacgacgcttgatacagctgaggagatgacatcgaggttgaaatggattggtaatgcacgccatacgcatgtatttgaggaccctgtgaagtattgcacgagagtgttaggtacgtcagtacttgctgtgtgacatctaaaatttttattaggacattcttatgcccataatcaggcaacaaggagaaaatttttttttttttttttttttttttgagacggagtctctgtcgcgtgagctgaagtgcagtggtgcgatcttggctcactgcagcctccgcttcccaggttcaagcggtaggagaaataattctattatgtatgaatgtgttaaacgtaaacaacttcagtaatccttcttctgaatacaacattacttctagactgtccatttctgtatttcttagaaccacggtgtgtgaaggagggtacttgcttaggttttaggatgtaaatactgcagatacagattctgagtgaataggagagaagcagttgtcttaggaaggtgtgttacgtttgggctgggcatggtggctcacacctgtaatcccagcactttgggagggtgaggcaggcagaccacctgaggtcagaagttggagaccagcctggccaacatggtgaaaccctgtttctactaaaaatgcacaaattagccaggtgtggtggcacatgcctgtaatctcagcatccttaggaggctgagacaggagaatctcttgaacccgggaagcagaggttccagtgagccaagattgtgccactgcactccagcctgggtgacagagtgacagtctgtctcaaaaaatttttcttttcctttttttttgtttctccagccattctctgtaacagtcttgtggtacatcgagcagagtgcctcacctggggcgctggcggcgtagctcagcggaagaccgctttacttgttttgcttattccactctgggcacacttgaatcctgtttgtctcccctcctaggtcccgcggcagtgctggtggccatggttcccgtagccagaaggagttgcccacagagcccccctacacagcatacgtaggaaatctacctttcaatacggttcagggcgacatagatgctatctttaaggatctcagcataaggagtgtacggctagtcagagacaaagacacagataaatttaaaggtgagtttgggggattcttattgtatattactgtaaagtgtaggggaggatgggaaggggttctaaataaaaatagatttgtgaaccagaggctgtaatcaagaaagtgttttaaacatttgcctggtctaagtggccgaaagaaacataactcttcaactcataggtcttcagttcacttaggggaaaatgttttgtacacagtgtagttcatagaaatacatggcatatgcccaggtttgtgagcctgacctctacagcagtcctgtctgccagtaaaggagttccccaggagagagaggaatagagccgaggactcttaggcacattcctcctggaatgactcgtagattttccttggtagttaatccagtaatcatatggtactgtcatccagtaatcataaaacccagaagagaagcagccagtgctgtcagtatgcatttgtaaatttggagagtgtgcttgggagggctggctgagatttcagatatggtgtctataggtcgtgtgtctgcagggtgcgggagcaaagagcaggaagaagaagggatccgagcagcattctcctgcctgcagggcttcctgaaggaagtgtgcctgctgtgtaagtgcacgatgctaggacccaggatgtttggcccgcataatccacccaaaagcacatctgtgacaagtatggggtaacttggggcggggagctgtgccagcagtcgagaaggccttgctgacctgggtggttttgtgtgtcggtggcactcttactctttttgacttcagaatctgaagccacatgtagtgtgtaatcaaacagtgaaaacaaatatatcagttacacttgtgaagtaagctccaggaagcattaggaactaaactttgggttggagtgtgtgggtgagcctagcctttgggctgggtcagtcgctgcaggctttggagtttggctcatgaaggaccatcttcatttgagcagctctagaagatgagattgggtgtctgttgcttctgtgaagttgggggtagttttctccattattctcaacattgaatccacttagggaggaaacctggggggacatccctccagccaaggcagtatgttcttaacacacagttggtaaacagggaaagtttggactcaggcctttagagcacttgcggtctagtgggcttcaaagatgaagtgtgattattaagttattatacacagggcaaggacgctgggggagaggggatgcagggtgtagtgccagcatctggggagtaatgaactagatttagactccagacagcaaggaaggggcaatgtcagacccctggcatcagggacacaggttgtcagtaacaggtacttggacccaggctgcctgtcttttaattaacattcagagaagaatgccctgattgccgaggatatattttcagctttgtgaagcaaattttatgtcagttacctgagtagtaagttaaatcggcactttaagcctctttcttcagagcattttaggtaccaagtttgaaatctacgaaatctaatcctcacttagattaaatagtcattcagaagtcagaagagctctgcagatggcctgagaaaggtttgaatattatggttaaaacattcaagaagaaagctttctagaaacgcagctgctatttcagtgcatgttcagttagcattttctgactgataaaatagaattgagagggaggaatgccagtcagggttctatctattgaaaggctctcctagtctgccatcatctagacaacagaatggtagttgtgacgtggagaagtagtatgaataggatcttcccacatctttaacccagaattacttgaggaaatcggggtcttcttttcttttccaggattctgctatgtagaattcgatgaagtggattcccttaaggaagccttgacatacgatggtgcagtaagtatcctcgggttttctctgtcatagcagttgagattgttttctttgccaatacttacactattttccctttatcattagctgttgggcgatcggtcacttcgtgtggacattgcagaaggcagaaaacaagataaaggtggctttggattcagaaaaggtggaccagatgacagaggtgattggttcttctaaagctgaacatcataaagatttgcagtatgcctaccaattccaactcgtgaacgttcctagtagaactcgattatctcataggtgtgataggttctcgtgagctcttaaaagtttgcgtaaaatcctagaaagaatggctgatgcttctgcaagcctggcgttttttgttttctgttggaagcaaaagctcttaaaatgatttcattgaaccttccatcacttgagttgtatgtcttccaaatgaatttttccatgtttgcgcagcaaggtaatgacacgacctcaactttatcttttttgtgtatcctcaggaatgggtagctctcgagaatctagaggtggatgggattcccgggatgacttcaattctggtatcagtatttaaagtatcaccacttaatttttcctaggagccttgctgctgttctctgtttcttacgagtagcccgcctggccggactacttatttagttcctttaacaaatacaactctcctgcagggtgcccaggcatgcaagtaagcctctgttagagcctgtgggggcaggacttgagccccatgcaccttgtgtggtcacctttgttagcctgcagctccttggatgtgtacgggcctgggtccttgagctcgctcagcagtctttctcagactctagcccagggaaactcctctgtggttttgtgtatggcaccaagagaagtactgttccttctggaaaacataggatagaggtttgggttcttacatggtgaaaggtagtcctgatggcccttttttttcttggaggattgtggggaggtccagtcccttgatggtggacctgatgcacttcgccgttctctttcttagccaacccaggcagagcagctggtggtatagcacaaagcatcagtccacacgccaggcctctgccctgcagggtgattttaagcatttttatcatctttactttctgtttttaaattacaaaagtataattttttatatatgcacatgataaaaacttcagttgtaacccagaaaggtaggaagagaaaaacaaatttgttttctttcccgcaaacttgggatgtgctgtcaatgctgtgctgtatagaacgtcagcaccctccccccatcaaaacaaaaccggtgtaaagtagtgggtgagtatgggagggactggtgcacgctgtcttgtgagtctgagatttttaaaaactcagctttggctgaacaggtgacgactacctgttgaataatatagttcttaaaagtcctgtagccagtcagaaatgagcttattcataaaagtgcagtatggtgaagtcaatctgtaattttatgtataagctagtctctgattgaaacatgcagcagctgtcttcttagagccaaccagcagctcagggaacggcctttcccctgccagtttggtattcgcaggtgttatagaagttgcccacatactaacgtctttctacccttggcttagcttggccactggcgctcaagcagagacacagtgaacacggccatggcctggccgccaccagttctggtgggaactgcagtgttttggtgacatctcaaaccctatgtgggctcactcgatggagtaatggctaatttgatactttatacgttatttgcgagagtagatcttttttactttttaataggatggtgctattttttttaatgatacctgctcatgtaaaaaacaaaatagagcaacagaaaagtaccaagaaagcaaaaacatttcatcatcagaaatagccagtgttaaactaagctttgtaaagaaaactctgaagattctcatgaatagtttgcttcctagaaacccaccaacagattttttgttgttgttttttttgagacggagtcttgctctgttgcccaggctggagtgcagtggtgcgatctcggctcactgcaggctctgcctcctgggttcatgccattctcctgcctcagcctcccaagtagctgggactacaggcacccaccaccacgcccggctaattttttgtatttttagcagagacggggtttcatcatgttagccaggatggtctcgatctcctgacctcgtgatccacctgcctcggcctcccaaagtgctgggattacaggcatgagccaccgcgcccggcccccaccaacagatttgatgagagatccttgttcatctgcttcaccagcgtggtgtgagctatttgtttcacgctagacattggtggtcgaaatcatttaatctcatagtaaagggtgtaaatttactttgtactcacgtggaaaggtacacttcacagtttagtttgggggaaacgtgaagttaaatgttttaatactaactaggcttgttcactgaactgtgtaatgtgggtaaaatactttgtaaaggaccttatactcgactgtatgcctcccagtgtatttcccctaaagcagtgctcttattggtctaaatctgttcagacttgctttcattacttggtttgttaaaatttattatttaactcagtctctgaactgggtgtgagatcccttggtttccaaaacccttgccacctttaaagaatagaaatcggcccccaccacaggtgatgcagtcagcgcttatcattggaggtggttctgtggagttgctagaacactgaatgagcccgtgcggtgctgctcctgtgtgctacagatcacaacattttcgtcagctgatcatacctaacattgctttatgtgacttttttttttttttttttttttttgagacagaggctcactctgttgcccaggctggagtgcagtggcatgatttcggttcactgcaatctccgcctccagggttcaagcgattctcctgcctcagcctcccaagtagctgggattacaggcgcacaccaccacacccagctaatttttatatttttagtagagacggggtctctccgtgttggtcaggctggtctcgaactcccagcctcaggtgatctgcccacctctgcctcccagagtgctgggattacaggcgtgagccaccacacccagcctatgtgaccttgattttaaagacgcctcatttaatgttagtgttgattcatttaatagtgttaacattgaactcagggccagctgtagtaagtagtctgtggtgccatcatttcagcctgttagaaagctcatcccacaccggttttgtctgtaagacacctgacagccagcctgcacttaagaacagcagacagcacttcacactgcacctggggccacttcagacagcgatgtcaccagaaaaagcccaaagggcaaaacacccgacactcatcgtgaaaagacttgacagctaataactgaaacaggcagagcattatcgttttctgcctcagctgggatcgtcgcatctgtgcaggtccaggactgactggagaaatgctgctggtatctagcttgggattacacatgaattttagcgactgggtggatttgcaaatatgggatctgtggataatgaggatgactgtatagtgcatactgcgggctctgggggttcttctcaaagacaagctccctgaaagcttggagccttggcaccactctcgcagagagtagcagtggcaccccctgagtgcgcaaccaacagcagcaagctcatttgtttaattatggtttaacttcttttcgccagttttttttttttttccttgagacagagtctcacttcatcacccaggctgaagtgtaatggcacgatcttggctcactgcaccctctaccttccaggttcgagcgattatcctgcctcagcctcatgagtagctggaaccccaggcgtgcgccaccatgcccagctaatttttgtgttttttgtagagagtgagtctcactgtgttgcccagtctggtcctgaactcctatactcacctcccacctcagcctcccaaagtgctgggattacaggcgtgaaccagtctttttaccaaattttaacatcagtaggttatacagttaaagtttagctttcactgaagtacaagcctgaaggccccttaagaccattgagaaaatactctttcctcctacacaccagtgggaattcagcatttctaaatgagatgcagtttacttctgccaagagcccacttagcaggcacacaaatgaatggggaaagaacgctttgcccccacaggaggcgccggtgggggtgaggcgctgtgctctctgctcatgcccctctgtgtagggcatggccaatttcggataactgctttgtttaccacacaggtgctttgcttgtagaatggcccacacctaaaacgcagccaaaacaggaaaattgggactttgtgtttttattttgtcttcatatagcgttttcttgtgatttttgtgttctgagttgtaaatacttctaaatttcaggtttatcttttaaaatagctgtatagatttctattagaaaatagagttcaacctgctttgaggctttcttgttttgcttaagccgtattaaaatacagtttcgtggtattaatatttttctacttttcatgcaagctgagcatgtaaacagctcgtttgtttgctctcctaagatcttgattcctttttctttgggaagtctgttagcgctgtcattactccacacattggcatttggacccacttttaacacactttattttggagagacttcagatagtggacaaactaaagaatttaaaatgaaactcaaacaattcccagaacattattctataagcagcttggagacgatagtttgaaaagtaattcagtgtcctgtttcttcctcaggcttcagggatgacttcttagggggcaggggaggtagtcgcccaggcgaccggcgaacaggcccccccatgggcagccgcttcagagatggccctcccctccgtggatccaacatggatttcagagaacccacagaaggtacgggctcatgtgtcagtggagggcatcttgtcctgatgggatgatcatggccggttcacaccccgtggggacttggcgttctacggcacacagagttgtcggcatagatccccacgttctctggaatagcaagttcaccttggtcattagagcatctgctgttggggtagcaggccaggtgaattttagaaagtgggctggtttgctgacagcaacatcagcatggtcgttttgctggatatggaatgggatccacactctgacaaactctgctttttctcccccagaggaaagagcacagagaccacgactccagcttaaacctcgaacagtcgcgacgcccctcaatcaagtagccaatcccaactctgctatcttcgggggtgccaggcctagagaggaagtcgttcaaaaggagcaagaatgagcctgcggttgggagggaatggggcgtggggggttagagcaggaccacagcctggtgagtccccgggcagccgtcctgcagccgccactcctgcgcctgccattggcctcctcacagcggaaacacagcttgtgagtgcatgtcagctgttaacaagtggtttttagtacattctgggctttgctgtatctatctagtgcctgtttgtgcgtttttttctttcttccgctgcttccccattttccttctgtcctttttctcctgctccttgttttcccagcagcacatggggttcctcggaggagcagaggtggccgccgtgggggggcgtttgggctgcggtgctgcgtcatttttcctttgctttctctttactttagacactggcccaactccaggcgtttcctttcattccctcagtgcttctcttctgacctgcatgttgagttctgtattgctggggcttccaacaaaaaccagagtcactgacagagggaacagcagagaccttgttggtattcagctgtgatggatatagagaatcagaggcaccttgttttcacaactaggataaaaatatctgcagggtcctttccattcctatttagagggagtcctggctccatgaccccctcccgagtggactgtccaagcagataggctcacacgagaaacagtgaggctgaaagggggggctatggaagagcggtagggagtccacggagaagatgcagtgaatgcttgcatgcattcacacgtgtgtgtgtcccagctagttcactcctttcgccgtgcgtggtggaggctggcctctctggctgggtgcagtgaatggccagcgggtttcttttctgctgggccaaggcgctttgggggtggagggggtggtgctggtgctgcactgggctgactgcggcgctgacgcagcgtttccccccatccctgttgcctgtgtgttgtgtggatctgttcctagtataggcaacataatgagatactgtgcttcccacctccccttcagttcagagccaaaatgggtctagaatctggcactttactcatttcctttgataaattgtactatgcagagctgtcaggaaccttcagatagcagtagaggactgcagctgtctaggtctgcggccacatcttggggacacactggactgttcccatgtgcagggttcagcagttatgtgggagtgctaggggttaggcttttgagcttgaacgcctgcgtgtgaacagatgaaaaatccttcagtacccaagtcccagtctgtcctatggggagcagtttgggggcggccggcagcaggagcctgggaaagaggccctcgccaggtgatggcagggccagggtggcctggggcacccagcggaatgtgcttagtatttggtcaccagccgtcatcctgggcttttcctactgtgtcttgttacaaggcctcagcaatccacagaactctctctccttccttccacctgtcagcttctctgcttctgagataagaaccatttgtgtaacaccaacacttaacttcagaaagacatgcattatgtggtgtaatcaaacccgatgctttcagatgacctacttacatcttcaatgtggataagataaagaacaaaacacatgcatctaaactgctgggcaatccagttgacttttaaatgtaagaatggaattccaaacacttaacacattcagctatatgacagaaagtaaatctatggatatggtattttgtgaatgatcttttaaataaaagaaaaccttacgtaatatttaatgcttgcc

SEQ ID NO: 11878 - DNA, 237 bp, Homo sapiens
gcactcctgccagcccagtgtagcctcaggcctgttgggtctacccaggagcatggcagaattatatagcacttggtacttaggaaatgtttttatggtcagttttaaacttataaaatcaagattgaaatataacagacaagaaaacataggtacagaggtaatttggcagaggtcctacatcaagctagctaaggtgtcaagtgaacctgttctcccatgtgttgttattgatct

SEQ ID NO: 11879 - DNA, 237 bp, Homo sapiens; identical to SEQ ID NO: 11878

SEQ ID NO: 11880 - DNA, 794 bp, Homo sapiens
tgacttgccttgtacatctttcaattctggaatatctgtgtctaagcacaatatcttcacactgtgctgtattgctgctgaactaaatgcacttttccccacatatggggcactggcttcaaacaattcagttcagtatcattacttttaatctcatctttcctttcttggtagttgttaatacagttatggaaaagaggcacattgcatagaagccattggggagttcagtggaagttctgtaagatgtgcatgtactatttgatgcgttttctttgcttcactgcttttaatacttagcagtattgttggtctaagtcaatttgattattgaggagtctcagagcaaggtgcgttctagatgtcatcctaaaaaacacttcatatataattaatcactattttgtataattacatattgctgcttgtgtgtttttttttttttccatttagttgggcgttgtgttttacacaaaaccatttttgaattaaggctatgatattaagatagaaatttggactgttgttctgcttttcctggcactcaaattcatgactagttttgaggtcaaacctatgttcgtaatgagagattttataaggatcaactaagaaatggaaggcaggtgaagatataaaaccctagaatgcttaaatgtgctgtaaaactattgtagatgtcactggattttaccaagtaatatcctttcttttttttttccccccatctgctgtggcttttcagttaaaattttgtttataaaaggaatttgtttattacagctctacctaga

SEQ ID NO: 11881 - DNA, 407 bp, Homo sapiens
aaaactggagttagttctcattacccttaaaaaatactttcttttgtatacacttattaaatatcccactgacattataagttctgaatataagcggttttgaatttaaatacctgtttgtgatcaagacttcatctggataatagtttatagtatttcagactggaaacgtttccaagtttggtaggaggagtagcctctactgtttagagtagttggggcagggcatgccttatacagcttttgcggtttgtgcggtatacaacagcataacatgttgggggtgatgttcattcacatcatagatttgtatattatcacagttttttttagcaggtgttggtaaagtttcttgttctaacaaaatcaatatattatgtcacatttctgacagttaagaaccttaa

SEQ ID NO: 11882 - DNA, 2855 bp, Homo sapiens
tctaggcctggttgcagtatgcctgaaatttgggatgtagaagatcctgccaatgctgggaaaactcccttatgtaacctcttggtgaaggattccaaacctcacttcaccactgtattccagaacagtgtttacaaagtcctagaagttgtaaaagaatgactgctacatgacctgctgcctacggagaactacatctgtaatggttttaatgttttgctaagtcatgtgttgttcatatcccaaaaacttttataggtaactgttttcaaatagaaaacgttttatttggtcaatttgaatgtcattctaattataaaaatgacttacacctttatcaattggttactatttcaatgcaccctttaaaatttgctatgcaaatgagtatatgcttgtacttgactttaatatttgtgctaaagtgagcaaagctacctgtataaagaaaacacagtgggttgtgacaaggatgacatgaaaatacaggacaattctgacaatgtaggggctgattttatagtgtaagaactattaatgccccttgcttcttttttctgcctcttgctcttgtcttttggacatttcagtgattgtaagttcttcggtcatgtcagcccctgtcatcaacttgagttacagtagatggggcagacatggagtgtttgctatatagaactatctgtttgttttacttccttgtgcgctttttgttctctgttctcttgttaatgaagcttttcctgcccattattaatccaaactcttggaccttgtggttaggaaattcccttaacttccagccatatggcattatcgtgtctctttctctctctctcttgctctctctcttctcctcttccccatattttctgtcaaataagtactgtttactcatttagttgcttatcaagtacttattcttggttttaaaaaaaattaatggtaactgtatttttctcatttttagcattattcaaatgtttatattttaatacctttaaaccactttaaagttttttcatgtttaattatagttttaagaaaaactattttgaacaaccccaaatatagtgcatctagaaactaatgtatatttgattagacatcatttatagtggaacagtagactgtagtacatggtaatttttcttttactattaagatacaataaaacatgactaattttgctgtcaaaaatgtaaagaataatgataaatggagtttttatattttacttttaagattgcctgtctttaataagacaaagccttaagccttatgttataattttggttctaaaaaccatcatttcagtataaggaataagtatatttcgtcctcctctttagtttttttcttcctatttatttttattttgaaaaatttctacaccttctttgaattccttgtatgaatttttgtttcttagaagttaatttgtgtgaaatgagattcttcaaaacgatgaaacctcatagctctgagaaaaggttttagggttttaaattctaagcaaagcgtgactatggctgacagactacacatttaattatacagcttctctttcttaaccacaggcagattaacctcattgtggattgtccttcagaccttagtcctcaggcatggtttctggtgcccactcctggaagccgctgttccctttctaccttcttaccagagcccaagggcaggcctggtcccggggaagcagcagcttgctgacataagtcagctgcaaaggctgaggagtgtgccctcagagaagcaccgccccccagtcttgtgccagcgcctagagccgcagctcccagggatgctccttccctggaggcagcccaggagagggactctggcagcgttcttcagatttgtggccactgtttctcatttgctggttgactgtttttatttcttaggcttttgctagttttagaaaatagggaagcagcccttgatttgtggattaaaagcaacatttgagcgatgatgcacaacagtccaggaaaatgggcggtggacacttgaggctgaggatgggagttgacatgagcagggagagggaggtgcgcgctgcttatctgtgattgttgctcacctgagtgtggctgattgtgtacatccagcagttacaatttttaaaaattatacttttacatttattttatatttttctcacccccagtaatttccttccaaagaagttcacatgtaataagtagaaattctgtataggaaaaaagcattaaaaatactattataactgcttcatttgctgggaaccattaaaagtaatataaattagctttttccagaaggatccttttgtagcagtgtttatgaatgtaacccccagcaaaatatggctatatattaggggagccagtttggagcagaggcctgaaggtccctgctatgcagccgtggccacagctcgcagcccaagcactgtggagcatccacacctttgatggcaatgcagattggtagcaggttccataggcgtacaaaacagtattaaagctcagtgttttgcatattgttagcatttacaaatatttttgctttagtatgaggaaagtaaggatgggcaaagaagcgatcaaaatagctattgctacaacattttcgaaaacaaagttggggctgtatttctttaaaaagataagcctctaaaaatgcttggcaaaaaaaatatagtgttaaaataggccagtgatattaatgagaaaatgaaagtatgtatcaggaataaagtgatattgcataggagtattgtatttttatgaattttatgccagttgtttacatgtactatatatgttaaattaaaaaaaatcatgagtaatgag

SEQ ID NO: 11883 - DNA, 883 bp, Homo sapiens
cacttacattccttttttatccttttcatcaagggacacagtaattcattcaaactatatattgggaataattaaagggttgctaaaagctgttttaatgtatttaaaacatacattggtatcaacattttctaaattgtaactcaatgtgtttacttgatacaaacatcaactcttggttctttctctatgtaggaaagacatttcagctctgttcattcctgtataatttcttaacacaatgacaccttgattctgacatctttggggagtgaggtgttctaatacagtggttctcaaaattagcaggcatcagcatcacctgcaaggcctgtagtttgctgggccccaccacagaggtttctgtttcagttggcctatggtggggccccagaacttggatttcttaacagttctcaggtggtgttgatgctgttggtccagggaccatacttgagagcctctgctctaatcgatgggaacagactggctggatgactggcctccagggggcgctccattcctgacagcacatcccgccagagctggttgatggacactctaccgggagctgaattttaccacgtaccttctttgcctgttaagggcactgcttcaatgaaacttgcaaggagcaaagaacagattaggtaatttttaattggaacactgatatgagttataggttatttaaatattttgaagctgcaaactgccccttgtttcttttcagttcagagatggaaaaggagtgaaaatccttgaaatagaacttccttttgtaggattactttgcctagaagacaatagataaattcagtgatgtgtggggattgcaaaaattcattttccactttattactttcgttttggcaccagaaat

SEQ ID NO: 11884 - DNA, 5235 bp, Homo sapiens; identical to SEQ ID NO: 8002

SEQ ID NO: 11885 - DNA, 6215 bp, Homo sapiens; identical to SEQ ID NO: 8003

SEQ ID NO: 11886 - DNA, 33958 bp, Homo sapiens
ggcggcacctcaccactgattcgttgaattccttcccggtaatcttgggcactagcgggcggagttgaagggcgcttggaccccagcggcgatctgtgtttgggttcgcgctctgggagaattttggctttgctcgccttcctctttcagaagactcgaaatcggccagcaggtctgcgagatttgaaacgcgactgttactccttgttttccggttctggccgcgggagcctctcgagaagcgtggaaagaggagaagggcgtataccttgtgaccgcctctggttgtcttgggctcgcgcctggcgccgctacgtggagtcgctctctcgtcgtcacttttggctgccgacttgttgagtagaagtgcagactgatgctttaagactcagggagaggtctttcccttatctccaccccagcaagcaccccagagaccttggagatttgtcttgtttctagacacgtgtactccaatgttgtgcggaggaggccttaaatattcgagaagagagtgggaactcctggaattttaagggatttctgtgtatttccaaaactgacttttaactaccggcagcgtgggatttcgtgattgtttttcgccatcgtgtggctccaacatgtacttcccttcttggttaagtcagctgtacaggggtttatccagacccatcagaaggaccacccaaccgatctggggttctctctacagaagtctgttgcagagttcacagaggagaattccaggtgaaaatagcgaagagatctatcctatgaacagtacttcagcctgttatctacggccggagagcttttattccatttttcattttttcccccattattattattattattattattattattattatttgagacggagtctcgctctgctgcccaggctagagtgaagtggcgcgatctccgctcactgcaagctccgcctcccgggttcacgccattctcctgcctcagcctcccgagtagctgggactacaggcgcccgcgaccacgcccggctaatttttctgtatttttggtagagccggggtttcactgtgttagccaggatggtctcgatctcctgacctcgtgatccacccgcctccgcctcccatagtgctgggattacaggcgtgagccaccgcgcccggcttttcccctgttcttaactggatagccttatgtgtagaagcgaaattcactctcattatattcattatacggcagttttttttccctgagtttttagaaagaccacaaaaaggtaaccacgtaatatatagaatactctgcttttggttgatgccttaaaaaaatccttcttcggccgggcgcggtggctcacgtcgttaatcccagcactttgggaggtcgaggagggcggatcacgaggtcaggagatcgagaccatcctggctaacacggtgaaaccccgtctctactaaaaataaaaaaaaaattagccgggcgtggtggcgggcgcctgtagtccccgctgctggggaggccgaggcaggagaatggcgtgaacctcggaggcggagcttgcagtgagccgagatcgcgccactgcactccagcctgggcgacagagcgagactccatctcaaaaaaaaaaaaaaatcatttttcacagaattataatagtgttttctagtgtacaagtggctgttaaacactagattcatactaaagctaaatagttcctacaccgtccatttctgcagtttctaaaatcctatttcatttgaggaagaaatgtgcaatattaagaattgggtaattaggattttaggtcaatgcaaatgctagaagatcaaaaaaattttgatttcctaacacaagacagaaatttacattcagttattcacttggcttttgacacatttgcaggtaaatttaatagtgaatgaattaaattacatactctgacttattttattttataaatttcccctgtagccctgacatacctaagatatattttgagaattttcatttttaagcaacctgcaagtgatgtatttttaatcttgccttttaaagtttctttttttttttttttttaaagaattcagtagctttgttgtccggaccaacacatgtggagagttgcgttcgtctcacttaggccaagaagtcaccttgtgtggatggattcagtaccgaaggtaaattgagaaagacagtctaagaatgcatggtggtggttttcccagggcaattccaaacctttactaatttacaaccagtccgaagaataaaacgttttgcaactcctgcaggattaagaacttactgaattttcaactttgttttagttttgaaagacccaagtgtcattctcagtagacattttgaaagacccaaatgtcattctcagtaggtacatctcagtaacatctgttgaagggtataacaacgaagcttgatccaccagtggactgaaatgatactgggcttactaagactgaagagttcctataaccagtaattaaaaatgggccagcctcctataaaccagctgttaaactccaatagcatgggggaaaagctcatcttattccatgtaggtagagaagaagcctagaaacataaacagtgattccttaagatcagagcccattttttgttgttgttcatctctctattccagaacatgcctgaatagaacattaattcacatggaagagattcaaaatacataggttatatgaccttcttaaagaatatgtcccagcctggcgtgtaagcctgtaatcccagcactttgggaggccgaggcgggcggatcacgaggttaggagttcgagaccagcccagccaatatgatgaaaccccgtctctactaaaaatacaaaaaaagttcgccaggcggggtgatgctcgtctgtaattctagctactcaggaggctgaggaaggagaattgcttgaacccagaaggcagaggttgcagtgagctgagattgcgccactgcactccactctgggcaacagaacgagactccgtctcaggaaaaaaaaaaaagtttgtcccaagtaggtggatatttttcccataagtttagtgactgtttcctgaacccaaatctgaagagggtttctgtacctgttcctgatgctgaggatagtatgagaaatagaggttggatgttaaaatgttggcatttctgggaccttttgatgattcatagaggtattaaattagtagttggaactcttccagaaaatgttagattgtatctttttttagaaaaagactatattgctatatttcaaaaatgatccatcagatgtttctattatgctaaaatactatctttggattttactatatgcaaagtttccaaatttaataaaattttcttaaaaggacttaagccaatgaaatttcttttaattgttcatctataataatttttcattaataagccatctgtataagattaatataccaggtaagtagacaataaaaattgaaactgaaataaaaaacaatcttttttttggcaatgagctacatagataacaattgcatgaatgtaactaatgaaggtacataattatcataaaaaacatgaaaaattataattatcataaaaaagaaacatgaaaaattgcatggatttttgtttgctttttattttgtatgcttcaactttggacttagagattttatcttaaaatgtttcttttccccccccccattaatcaggcaaaacacattcttggtcctaagagatttcgatgggcttgttcaagttatcattccccaggatgaggtaatagaaaatttcctgttattatctaaaagcttctttgatgctattgctggggtaagctaagtagttagatgaatatgttagaggttttaaattcagaagtttattgttaatgaaaactgaaaaatataagcaatgttaagacatagcaaaaagaccagtgacccagtagaattaggaacccaggatacgaacaaaaaatttagaggaaaaaaatatataaatggcttgtagacataatgaaagtatgcccagcctcactcataggtagagaaatgtgaattgaaactgcatgtaattgtcatttttaacacattagattgacaacacactgtgtttgggaaagcaggtgctcaatacctggagggagtacaaattggcactagctgaagggagagcaatttggcaatatcaaaactataaatgcatatatcctttgagccattaatttcacttctggtaaattatcttatatctagacttatacagatataaaatgacatatgtacaaggatattcatttcaggattctttttaacggaaaaaaattgggaaccacccagatgtcctccaataagagactggcttaaaaaataatgtatattcttacaatacaatactctactcagccgtacaaaaaagaatgaagaagttctattctaatagggaaaaaaaaatccaaggaatactgttaagtgaagaaccctgtattcttgagtatacaaaagagcagctgttaaactccagcactctaagtgctgtcatctgtataaaaactgggggaaggatgcagaatatacattcagtgtgtgtgtgtgtgtgtgtgtgtgtatttgcttgtatatatgttaggaaatgtctctggaaggatacctaagtatctggtaacattaggtgctgctgggggaaggaactgagggcgttgaaaacaaggataggagggaagctttttactatatctttttgtaccccttgaatttgaagccatgtgacggtattactgctcaaaaaagtatttaatttaattaccattgaaattagataaaatatgacagagtgatattctgaaaaaaaaatttttttaattaaaaaattcaaggccaggcatggtggctcacacctgtaatcccagcactctgggaggccgaggccagcagattgagtacaggagtttgagaccagcctgggcaacagtgaaacctcgtctctactaaaatacaaaaaattggccaggtgcggtggctcactcctgtaatcccagcacttttgggaggctgaggcaggtggatctcgaggtcaggagtttaagaccagcctgaccaacatggtgaaaccccgtctctactaaaaatacaaaaatttagccgggtgtggtggcgggctcctgtaaccccaactactcaggaggctgaggcaaaagaatcacttgaacccagaggcagaggttgcagtgggccgagatcacgccactgtactccagcctaggcaacagagcaagactctatctcaaaaaaataataataatacaaaaaattagctgggtgtggtggcatgtgcctgtagtcccagctacttgggaggctgagttgggagaatcacctgagcccaggaggttcaggctgaagtgagccaaaattgcaccactgcactccagagtgcacaccagagtgataccctgtgtcaaaaaaaaaaattaaaattaaagaattagataaaataaagaacttccatcatacttactgggcaaagttggtttctattgcaatttttactaacgcttgtatgcctaagaaaaatattatttattcagctcttaagttttgaaataaataaagagcaatgaattatcttttagggatcaacatccagagatgagtatagctaaccctggagaactcctttgactctgacccattattgctatgggatttaactgcccctaagactaaccctggagacaattgcttttcaagtatgtgggacttgtttgcactaataatagtcattcttacccttattttcctttaaggaaagtttttttaaagctcttaactaatagttttacttgctgtattatatagagtcaaaatggggatgcagtttttactaaatttggtaataaagtcattaaggagcagccccagcctttatggtaattaagctgtgactattaacgttttttaaaccatctacttataattactgaagattcctgtaagttcatttgtttctcagaactcttttcccccttgttctgtagtcggcagcctctgtgaagaagattttatgtgaagcccctgtggaatctgtggtgcaagtgtctggtacagtcatttcccgtcctgcaggacaagagaatccagtaggtagtttcgaagatatctgtgtaatttttgcttgtatgcatttgcaccatctgtgtacacattctggcaacacatgactggacattaggcactaaagttgaataaattctacaaatgaactgacagatttcaaaatcttgactataaacaaacacatctatgtaaatatgcatgctaagtctcactctgtcaccaggctggagtacggtggcgtgatcttggctcactgcaacctctgcctcctgggttcaagtgattctcctgcctcagcctcccgagtagctgggactacaggtgcatgccaccacgcccagctaatttttatatttttagcagagagagggtttcaccatgttggccaggatggtcaccatctcttgacctcatgatctgcccatctcagcctcccaaagtgccaggattacaggcgtgagccaccgtgcctggccctttttttttttttttcaggacgggtcttgcagtattacccaggctggtcttgaactcctgggcttaagtgatcctcctgtctcagcctcccaagtatcagactgcaaggatatgccatgacatttgttgatatctgaacacatcagccacatatgcataagaatgtcaaaatcatgcacagacatgtatgttttatactatacactataaggactttgcacattttacatatgtaaataaatgcatagattctacaaatgtgtattttgtgtatatcctgatgagtaatttttaaaacccttccttctcactctccaagaaaatgccaacaggtgagattgaaatcaaagttaaaacagctgagcttctgaatgcctgcaagaagctgccctttgaaattaagaacttcgtgaaggtaccaacctctgttattaataaaatagagtatctagaaaatgttgatgactagtcaagtattttcagagttttttaaagaaaagtttaacttctacaaaattaagcattttattgtagacacatcatgaagtgttctcttagttctacaacttcttggcacactgtcctgaaataatgacagttcagtaaactgttgcagtccctaaatacctagactgttttttcagacagattaaaatgtgattctctctttaaaacttgaggtgttatattattcaagtttttcgttgctattgtttaacatttgaaaggaaatttatgtctagcttagaaatggccagatgggacaggggatcctgtatctattaagtgataaaatgtgtgcttagagcaacgcttgacctcccaagcatataaatataaataggattaccataatttagaatgttctttgccaaagtttaagggcttgatggagctgtacactcatatgattttcagctttgtcacagtttatagacttatatattcctaatttttaaactgatctattaacagatttttaattagtcttaattaattagtcttacatttaagttcatggccaattagtcttacatttaagttctcaatacttacgtttaagttcatggccaattggtcttacatttaagttctcaatacttaattatctaattagaaagagcaatgtaattatagagttgaccttattttgaaaaagaaaatatatagttttccccagatgagcattcaaaaagagaagttatagacatttcctaagttttcagcacaaagagggatgcagagatttgtagccttgaaaataagcaaactaggctgggcatggtggctcacacctgtaatcccagcactttgggaggccaaggcagacagatcacaaggtcaggagttcgagaccagcctggccaatgtggtgaaaccccgtctctactaaaaatacaaaaattagccaggcgtggtggcaggcacttgtagtcccagccgctcgggaggctgaggcaggagaatcgcttgaacccgggaggcagaggttgcagtgagccgagatcatgccactgcactccagcctgggtgacacagcaagactccatctcaaaaaaaaaaaaaaaaaagagagagaaaataagcaaactatttctactagtacagccatggagattccatccactgtccctttgcattctttacacttgtagtcagcgtcccattcaggtgaatcttctactctgatgtatctttttttaggagatggggtcttgctatattgcccaggctggcctcaaactcctgtgctcaagtgatcctcccacctcagcatcccaagtagctgggattataggcacatgccaccatgcccagatacagcataatggtgctgtgtatttttctaagagacctttgaaatctttaaatttttttcaagattcaactatgggcttaaattaatggataaatgtttagtaaagtaggcaaatttcagtcagtgaagagtgatattattaataatgaatagtaaaaaaatgtaaaatctgcactgatgacaaacttagaagttgtaggaattaacagcatacagtgggctacttaatgatagaaactaaagacagagctaaaatttttgaaaattcaaactctttctaaagataatacctttctaatattgaaaaatatttaaatataaaaatctttcaatttctttagaaaacagaggctcttcggttgcagtatcgctacttagacttgcgtagtttccaaatgcagtataacctgcgactgaggtcccagatggtcatgaaaatgcgggaatatctctgtaatctgcatggtaagagaaatgcctggatgctctttggagctttgtagcatctcttctattttattcagcagttttattgtatcctttccttagcatgaggtcaagatgttgccagaagtctggaattcactcaatgtgtaatgtagtttttgaagaaaagttaacattattttaaagatgataaagatgatagtcgctattacattgattaatgtattatagtatttcccatcatcatcaaaggcaggacagccctttggctttttctataagatttcttttcttttttttttttgagacggagttttgctctggctagaatgcagtggcattaccacaactcactgcagcctcaaccttttaggcttaaccgatcctcccaccacaccttcccaagtagctaggaccacagacatgcaccaccacacccagccaatttttaaaaattttttgtagagacagggtctcattatgttgcccaggctggtctcaaacttctgggtttaagcaatcctcccacctaaccatcccaaagtgctgggattacaggcatgaaccacgatacccagccagttttcttaattctttatcatgtgcatacatcacttattgggagctcaaaaatgtcatgtgaattaaactagacatctcattcagtcctggactttttctgctatatttgtgttatttctacactaacagaacatttaaaaaatcagaatagttcagtagacaagaatccattaaatatttagaattattttatgtgaacagtatgctttatgaacagaatagtatttatgaaaatcttcagcttccttcttagatttgtagaaaccagcaccagtaggcttggtagcttatttcagctaaaattcttaattaaagggaagcctcagatttgttgtactatattgtggacatcatatatgacaaatttcacattcctatctactaagtgataatgtttctctctttttagggtttgtggatatagaaacccccacattgtttaagaggaccccaggggtatgtatattccttcaatcagtctattaataatgtcctattagttataaagctagactactttgcttttatattcacttggtccacttttatttactgcctcaggatggtcatattaactaggtttttctgaagaattgagaaaattatttgggtattttgagtcagaatcattttattccacataaattttctttcctttgagtttttttgtttttttttttttttttttttttttggtttgttttgggtttttttttttgttttttttttttttttgagacagtctcactccatcacccaggctggagtgcagtggcatgatctcagctaattgcaacctctgcctactggatccaagcgattctcatggctcagcctcctgagtagctgggattacaggcatgcaccaccatgcccggctaacttttgtatttactttagtagagacggagtttcaccgttttggccaggctggtctcgaacacctgacctgaaatgatccgcacaccttggcctcccaaagtgctgggattacaggtgtgagccaccttactcagtctcatttgagttttatagatgtaatcattaataaattggtattttttgtttttgtttttgtttttttagacagtctcgttctgtcacctgaatccgcctactggattcaagtgattcttctgcctcagcctcccaagtagctgggactacaggtgcgcaccaccacacctggctaatttttgtatttttttagtagagacggggtttcgcatgttggcccagctggtctcgaaatcctgacctcaggtgatccacccgcctcagcctcccaaagtgctgggattacaggcgtgagccaccgcgcccagccaatgaattggttctttaagaacaaatctattggccgggcgcggtggctcacacatgtagtcttagtactttgggaggctgaagcaaggaggatgacttgatcccaggagttcaagaccagcttgggcaacaagaccgtatctcttgtcttaaagaccctaaagaaaaaaaaatggaaaagaaaaaaaattattttaaagaacaaatctcttatatattaaaaattgacatttttcggccaggcacagtggctcacacctgtaatctcagcactctgggaggccaaggtgggcagatcacctgaggtcaggagttagagaccagcctgaccaaccatggccaacatggtgaaaccttgtctctactaaaagtacaaaaattaggccaggcacggtggttcacgcctgtaatcccagtactttgggaggccgaagcagatggatcacctgaggtcaggagtttaagacccgcctgaccaatatggtgaaaccccgtctctactaaaaatacaaaaaaaattagctgggcatggtggcaggcacctgtagtcccagctactcaggaggctgagacaggagaattgcttgaacccaggaggcagaggttgtaatgagccaagatcacgccattgcactccagcctgggcaacagagcaagactccgtctcaaaaaaaaaaaatattagccaggtgcagtggcgggaacccataatcccagctacttgagaggctgaggcaggagaaccgcttgaatccagaaggcagagtttgcagtgagtccagattgtaccattgcactccaacctgggtgacagaccaagactctgtctcaaaaagaaattttttttaataaataaaaatggacatttctggccgggcgcagtggctcacacctgtaatcccagcactttgggaggccaaggcgggcagatcacgaggtcaggagttcaagaccagcctggccaacatggcgaaaccccgtctctactaaaaatacaaaaattagcggggcatggtggtggcaggcacctgtaatcccagctactcgggaggctgaggcaggagaatcacttcaacctgggaggaggaggttgcagtgagccgagattgtgccatcgcactccagcctgggtgacaagagcaagattctgtctcaaaaaaaaaaaaaagacatttctaaacattaatagttactcgatttatacagtctatgaaattataaaactacagtttaatttggaaatgcaattaagaattacttggataggaaatgatacacaaaattcattcatctagtaacaaaattggaaattcaattccgcaagcataaacttaacacctaccgtatacaatggtgtttaaagtctactatgtccaagtctttttagggactcaaagataagcaggaaattgtctctgtcattgtaggaactttgttctttagtcattcattgataaactgaagtaacaacttctactagttagttatactttgggtttgtttttgttttttaataatctgtcttctctctctttctctctctttgaaagggtgccaaagagtttttagtaccatccagggaacctggaaagttttattctctccctcagagtcctcaacagtttaagcaacttctgatggttggcggtttagacaggtgagctttttttatgctagcagttgtcagaaaaggaaaagagaaaaacaaagggaaaaaaggaaacacaaaatcctctctgttctcaagagaaggatagaaaatttatgagagtttggagaatacttataaaatgccctcataatttatagtcatcctttattaaaggtttattgggtggccactatgtacaaagctctatggtagtagatgtgagaggggatttaaaaaaaaaaaaaaaagaataggttctactctcaaggtgttaaggctagtaagccagaataggataatgaataaaaccaactgtgatataaaccaaatgtaaatgtattgagatttgcaagttaggtgttaagagctttaaaattatactttttgaggaaatatagaaaactttgtgagctagatcgttgaggacagagctacatttcagcaggtgaagatgagagttggaatggcatagcacagaaagtctcaagtgtatccatggcacagtaaagatttcactttggccaaagcaaaagagtatatatgaagaagcatgggctaaaaaaaatgttttaataaaaagagctggcatggactgatttgcatgctagtctaaatacatgaatatccagaggtgccagtgtttattttgaaaacaatatatagaatagttaacttctcataggtcagctgtatgtctaattcgattaaagcatcataaaaaataaaagtatttcttacttttttttttttgagacagagtctttgctctgtcacccaagctggagtgcaatggcgcaatctcggctcactgcaacctccgcctccctggttgaagtgattctcctgcccttgcctcccgagtagctgggattacaggcgcacgccacccacgcccagctaattttcgtatttttagtagagacagggtttcaccatgttggccaggctggtcttgaacgcctgacctcatgatctgcccgccttggcctcccaaagtgctgggattataggtatgagccgccatgcccggcccttcttacgttttttaagtatcattgttttatagcttgcattgctttaaacttttggggaaaagtgtgtatgtcttcctagaatcataactcaattaatgctatttctcaattgtagatattttcaggttgcccgatgttatcgagatgaaggttcaagaccagacagacagcctgagtttactcaggtacaaagttatattcacttgtttcttaaaattcaggcttactattttgaaatagtattttcaagaccagtgcagtattaatactttacttctcattacattttatccatcagatatttaattaaactcacctgcagttgagaaactaattattcttttttttttattcatttcatgtgtccttttttaaatttttttctttccttggatagcacaggggccacactgtcattcaaattttagtatgtgtgctgccaaaacgagcatgtgtccttttcataaagaatgtggtcagcaactaaggaatgccagaagttcctaaagtgttctaatgttcatgataaagtccttaaaacaaatctcttatatattatgaataattttatatattgatattttaatctaatatgtggacttaccaaagctgttacgatttgctttctgtatgatagcattttattttactttatattattttatttattttattttttgagacagagtctcgctctgtctcccaggctggagtgcagtggcgcggtctcagctcattgctgcctctgcctctcaggttcaagcaattcagctgcctcagcctccgaagtagttgggactacagatgcgtgccaccatgcccagctgattttttgtgtttttattagagatggggtttgaccatgttggccaggatggtctggatctcctgacctcgtgatccacccgcctcggcctcccaaagtgctaggtttacaggcgtgagccaccacgcctggccaatagcattttaatcatgtgttgaagtgaaaaaattatgagctttggagttggacagacctgggatcagatgtagcttcgctgcttactaattgcacatacgcaaataagtaacttagttctctgagccttcatgaaatggttgtgggaactaagcaagttaatgtatgtaaggccattagcacagtgtctgacataaaagagatgtacaataatatttataccctctgcatgtattatgtgcaaaattctatagtaacttgaaagcagaaaaatatataaatgtgtatatattgtggctaaattagtttccatatggtactttggtttcagattgacatagagatgtcatttgtagaccagactgggatccagagtttaattgagggtttgctccagtattcctggcccaatgacaaagatcctgtggttgttccttttcctactatgacttttgctgaggtgctggccacctatggaactgataaacctgacactcgctttggaatgaaggtacttatcttcacttttctaggactctgtccccaaataatcctgcagtctttttaaaccactttgaaattgacaagtgttacacactgttagatgatatttttgttgttaccttgttaccttcgttgttacagagctagagcaagagagaataatagcatgttagcaatacagtgctttctatctttcatgttccaagatccatttccaagagcgagattcttgctataaagtttttattacttgcaagttattgattatatggatatgaatggtaacttgaaagaaaaaataactattctttccttttcagttttttttttaatccaaggagttactaagtttccttggtccataaaaagctcaaacatatgacaatgtttattcaaattattactatctgtaagtatttaaagcaggggtagaatttatatagaacagtttcattaccaggcctctacttgtttgctcttaaagagcaatatcccttgatccctgtaatgctagtgacatttctatatctcagttctcagtgcacattctttagaaattggtcctgcctggtctgtgaatagtcagtggtcaattcttagaatgaaaaaaatacaatacacaaaaagtcataactaccaacttacagctgccaactcaactacttcttgtttcttcgtttgtaatatggaatagtggttctttttttgtatttttttgagacgtagtctcgccctgttgcccaggctggagtgcagtggtaagatcttggctcactgcaacttcggcctcctgggttcaagcgattctcctgcctcagcctcccgagtagctgggattacaggcgcataccaccacaccggctaatttttgtatttttagtagagatggaattttgccatgttggccaggctgacctcctgacctcaggtgatctgcccacctcagcctcccaaagttctgagataataggcatgagcctctgcgccgagcctggaatcttaatctggttcttaagtcagactgcttgtgttaaattctggctctgccacttactagctatgccatcttgggcaagttccttatttctgtgtcttggtttcatctatgaaatagggataataaagagtgctaacctcatatgaaatgaatgagtatatgtaaaacactggtcatattgcttaacccatggtaaacactctttgaatgtattctataaatgttaaattatcaagatctattctcttctttaaaatcttgtttgtaaaatgttttcagataaaaattacttcatatttagttatctctttttgttacccattttccagattatagatatcagtgatgtgtttagaaacacagagattggatttcttcaagatgcacttagtaagccccatggaactgtgaaagccatatgtatccctgaaggagcagtaagtgaagtacagttctatgtttctctagaatgtatgctttggaagtaactttgtccaatactgtcatatttaaacttcagaaagaacaattctttttaaataaaaatagggatttttgctgggcatggtggctcacacctgtaatcctagcactttgggaggccgaggcgtgtggatcacttgaggtcaggagttcaagaccagcctggctaacatggtgaaaccccatctctactaaaaaatacaaaaaattagtcaggcgtggtggcatgtgcctgtaatcccaactacttgggaggctggggcaggagaatcgcttgaacctgggaggcagaggttgcagtgagctgagatcataccattgcactccagcctgggcaataagagcaaaactgtgtttgaaaaaaaaaaaagtaggtatttttatacagaatctaaagtatttctaaaaccataagtagagaacaataaaattttatgaatgtgagtttacattccagatccggggtgtttttcttttttcttttttttccccccttttaaacaatgctatcagccaggcatagtagctcatacctataatgccaacactgtgggaggtcaaggcaggagaattgcttaagctcaggagttcgagaccagcctggggaacatagacctcatctctacaaaaattacctggcgtggtggctcacacctgtagtcccagctattctggaggttgaggtccaaggatcacttgaggcaaagtgttcaaggctgcagtaagccatgattgtgccacggcattctaacctggataacatagcaagaccgtgtctcaaaaataaatacataaataaatgatgctatgaagtactcctgtacttcattgtggataatatgtgagcataaaataatacgtagtattctgtctgcagcctcagttgtctgtctatctcttagccctgtatcagcaccagcatggccattgcatgttgattctttatcttctgagagttctcatctcagttgcactaataacagggaaataaaaggagatggagctaaaaaagcaaaaaggaaggggaagaagtgggagtagaagagagagagagaatggttgggctgagcaagtgctgactctaaagcaacggtacacgtctcttttctgtaggtagtacatctgctttaaaaaataatttcataagaagtattccagttatattttaaataagattatgattttgaaagtctatactcatttggatacataagcattatattcagaatggagtaagaactcaggaactcagtctcattactttctttttttttttttttttttttttttttttttttagagtgagtcttgctctgtcgcccaggctggagtgcagtggcgcgatcttggcttactgcaacctccgcctcccaggttcgagcgattttcctgccttagcctcctgagtagctgggactacaggcgtatgccaccatgcccagctaagttttttttgtatttttagtagagatggagtttcaccatgttagccaggatggtctcaaactcctgacctcaggtgatccacccgcctcggcctcccaaagtgctgggattacaggcgtaagccaccatgcctggcccctcattactttttatttacttcatatattcagtaaaaagtaatttattgtcatgcggggcacggtagcccacgcctgtaatcccagcactttgggaggccaaggcgggtggattacttgcggtcaggagtttgagaccagcctggccaacatggcgaaaccctgtctctactaaaaatttaaaaattagctgggcattgtggtgggtgcctgtaatctcagctacctgggagactgaggcaggagaatcacttgagcccagtaggcagaggttgcagtgagcatgagatcataccactgcactccagcctgagcaacagagcaacactccatcttaaaaaaaaaaaaaaaaaaagtaatttattgtccatactctagtccagacataagaaatatgttcaggtaagctcagtatgatattttgcctatcattatttacaccatttcaagtttgttctttctcaagtagatataagaactgcaggagtgtggatcatgttttcatctttttataccttccgtacctagttaaatgccacattaatatagttaatgatatgtggcatatgggagaaataagatggttaaagtatgatttcacaaatcacatggtttattgccatacaaagaaaattttttcttaggttcacaatgcttaaaagagagagagaataagggccaagcgtggtggctcatgcctgtaatcctagcactttgggaggctgaggcgggcggatcacgaggtcaggagttcaagaccagcctggccaatatggtgaaaccacgtctgtactaaaaatgtaaaaaattagccaggtgtggttgtgcgcacctgtagtcccagctactcgggaggctgaggcagaagaatcgcttgaaccccggaggcggaggttgccgtgatctgagattgcctcactgcactccagcctgggcaacagagtgagactccctctcaaaaaaaaagaaagaataacatgaacaatcctcacagggaaaacactcagtagctgaggtgcattaatcacatagcgagtgagttccaaaattattaaagtccacttgctctattaggatggaagtagtcctctggggaaggtaaagtctaattaaagtttgaggtgtactcttatatgagctgttcttgggagaagctggtttgaccaccacagtacacactgtatctaaggtccctcgatgctagagggcagtgccagtgtgggtgggtgaggcttcagagattagctccaagactaacagggtatcacccatctcttggctgtaggagaagcagttgacagagtatagccagtcacagcatgtgctatcaaagtgtctgtcgaactcttaagtttatatgtatttttgaagtccagtagttgaggtcagtaattcacacatgggagttatgataaggtttgaggtaacattcctggggggaagagggagttcactcgaagttctcacataggggatctgataaaacatcatgctctcgaaaggagggggaatacaccccaaaacatcaaaccatgttaagtgtttggatcatttcaaagttatgtaacatgataaccataatgtctcacttgaaagacactgagataatttcaaaagaaagattttaagaaacctcaaataatcaaattctgaatccttttattgatctgaaagttttctttcacaattcagttgtagacattcatgttgaacatttatcctgcatattagatatagagggtctcctgtggaatacattcacagctatttccaataagagctgcatgcccagcgtggtggctcacacctgtaatcccagcactttgggaggccgaggctggccaatcacatgaggtcaggagttcaagaccagcctggccaatatggtgaaaccccatccctactaaaaatacaaaaattagccaggtgtggtggtgggcacctgtaatcccagctacttgggaggctgaagcaggagaatcacttgaacctgggaggtggaggttttagtgagctgagatcacgccactgtactccagcctgggtgacagagctagactccatcgcaaaaaaaaaaaaaaaaaaaaaaaaaaaaaaaaaaaaaaatctgcataactggaaaaaataagcactgtaacaagctttaaaaatgtgtcatttggtagcagaaattggatttttttttttttttttttttttttttttttttgagacagaatctcactttgttacccaggctggagtacagtggcacaatctcggctcactgtagcctctgcctcctggtttcatgtgattctcctgcctcaacctcccgagtagctgggatttcaggcacctgccaccataccagactaatttttgtatttttagtagagacggggtttcaccatgttggtcgggctggttttgaactcccaactttcaagcagtccacccgcctcagcctcccaaagtgctgggattacaggcatgagccaccgcgcccagcccagacattgaatttttattaaatcttactattgtaatagaaagacacaaaatatatttgtcatttgatcgcataaccatgtttatgaagctaagtgtcatactgacaagtttactttgatttttctttcatcagaaatacttaaaaaggaaagacattgaatccattagaaactttgcagctgaccattttaatcaggtaaggagttaattagagcagtttttttccttatacagattcaatatttttaactattattaactaaactatcattatcattagttttgagcatcttgttatttcagatcattcttctgcttttatttactttttattttatttatatatttattttgaagatgtagtcttattctgtcgcccaggctagagtgcagtgttgccataacagctcactgctgccttgatttcttaggctcaagcaatgctcctgcctctttctctcaagtagctaggactacaggctcaggccaccatgctgcccagttgcacccctagtcccagctacttaggaggctgaggtgggagaatcacctgagcctgggggtcgaggctacagtgagctgagatcgcaccaccgcactccagcctaggcatcagagcaagattccatctcgaaaaaaaattgggctgggcacggtggctcacacctgtaatcccagcactttaggaggccaaggcaggcggatcacttgaggtcaggagtttgagaccaatctggccaatatggcgaaaccccatctctactaaaaataaaaaaaattggccgggcgcgttggctcacgcctgtaatcccagcactttgggagggcaagacaggcggatcacgaagtcaggagattgagaccatcctggctaacatggtgaaaccccgtctctactaaaaatacaaaaaaattagctgggcgtggtggcgcgggcctgtagtcccagctactctggaggctgaggcaggagaatggcgtgaacgcaggaggcggagcttgcagtgagccgagattgtgccactgcactccagcctggacgacagagcaagactctgtctcaaaaaaaaaaaaaaatgcaaaaatgtgccgggtgtgttggtgctcacttgtaatcccagctactttgagaggctgatgcaggagaatcgcttgaacacaggaggtggaggttgcagtgagctgagatcacgccactgcactactgcctgggccacagagcaagactcagtctctaaataaataaatattagctgggcatagtggcacatgtctgtagtcccagctgcttgggagactgaggcaggagaatcacaagcccaggagttcaaggctgcagtgagctatgattatgccactgcattcttgcctgggtgacagagtgagaccctgtctctaaaaaaaataaaggatccagccaggcacggaagcgcatacctgtaatcccagcactttgggagcccaaggtgggagtatcactggagcccagaagtttgagaccagcctgggcaacatagtgagacctcgtctctacaaaaaacagaaaaaaaattagctgggcatggtggcacacacctgtcatcccaactacttgagaggctgaggtgggaggatcacttgagcccaggagatcgaggctgcagtgagctgtgttcaccccaccgcactccagcctgggtgacacagtgagaccctgtctcaaaaaaaaaggaaagaatcttaggtatgataacaggaataaaatgaaaccatataggagtaattaaattatgctataatcaaaggaattaatattaaagttcctatttaaaatcttgttttctaagacttaatagaggaaaaatgctcttataatgatatgtaagaaaaggaggctataggactatatttatactgattataaccatgtaaaaacactatatttgtatattgaaaatggactacctacctctactaccactatttcccaagcctcatacctcaagcacaacgaacaataagtagatttttatataagaaaaaaagatcaggttagtggttcccaaaatgggttgagacaaaatcagaaaagtcagggcaatataacaagcttttcataaagttaaacaaatttaaagaactatcctttttttctctgtcggcggtggggatggcggggggatgaaatatgtcttttctttataaaattaaaaattggcaaccctttatcttccaattttgtttatttttattttattagtatataaaatctgcatctaagaaccataggaccaggaaataagcctgaaggttaactttggcagctttcagttgatgggactattattacattttcttctttcattcttctctctcttctcctgttttctttttctttcctaatttcctgaacttttatataagaaatgggtattactactactattttttatgagtgttttaacttgatttggcttctaattgctttcagaagatcttatgtgtttttagcaacatatggcatacacatggttcaaaaaataaagaaccattaatgatgaaatgcaataatcatttgctctagcctgccccatccatcctagtattctgccagagtatctctgtttttggaaatatctctacatactttttttttctttttacttaattcatttaaaccttgttaacttcctgtcatgagagatgaggctcacatatacagacctcacctagttactctgtaccttctgcacagctgtctttctgaacctttttttttttttttttttttttttgagacgggagtctcactctgtcgcccaggctggagtgcagtggtgccatctcggctcactgcaagctccgcctcccaggttcacgccgttcttctgcctcagcctcctgactagctgggactacaggcgcccgcgaccacgcccggctaatttttttgtatttttactagagatggggtttcgctgtgttagccaggatggtctccatctcctgacctcgtgatccgcccacctcggcctcccaaagtggtgggattacaggcgtgagccaccgtgcccggcccttttcttcattcttttctgagttgaagccacccatcctggatcccaggttttcctctttcttttttgtgttggagtatgtaatcaagtaacttcctaagaaagcatgtgagagatcaacttactgagttcttacaaaatgtctttatgtttaaaacctcacacttgatcaataataatttggcttagtacaaaattttgaattgacagccatatcatcttagaagagtgctgtccaataaaactttctgtaatgatggaaacgttttatgtctgcattgttcggtgtagttgttgctagccaatgtcgctagtgaacacttgaaataggatagtacaactaaagggctgaactttttactttatttcattttaattaatttaaatgtaaatagcaacagtgcattgctagacagcacagctttagaacatttaaggcattgctttactttcttctcccatctgttgttactgatgagaagtctgatgctttgatgcttgtgtgaatttattccattatagcagagctggttttttctcattggaagctttttgccttctgattctttatgttctgaaatttcagagtttgtttgccttttgatcatttttcatttaatgtgttacacacttgaagagccctttcaatacgaaggtttatgtctttttatgtgtagaaaattattttattatctaatgattttgacctcatcattttttctagtctctctttggaatttctactagttgtatgtcaaaccaatttaacctcttttcttttgcatgtcatttttcaccattttctttgtcttgttctattttcctggggatttcttcaactcttctgttgaatttttttttatttcccagtagcttttttcactgcatcttattctggttttattcataaaatatatttttgagtacctttgaggattcaagttctcttttggtccataacttatgttttctctggggctaattttttgggtttatcttggtcttttttttttttttaatgctgcagagtttcttcaatgtacagtgattgttggttatctgtacatattcaagaaaggggcattttaaaagctggttggggccgggtgcagtgactcacgcctgtaatcccagcactttgggaggccaaggcgggcagatcgcttgaagtcaggagtttgagaccagcctggccaacatagtgaaaccccgtctctactaaaaatacaaaaattagccaggcatgttgacacacatctgtaatcccagcgactagggaggctgaggcaggagaattgcttgaacccgagaggcagactgcagtgagccaagatcaggccactgcactccagcatgggtgacagagcgagactccatctcaaaaaaaaaaaaaaaaagctggttggaagctcaagagagaggctttgtaaatggttaggtttagtttagcatgagcagcaaggctgctctaggcactcaaggcttaagagtcctgagcctctccagaattctgcagggtaaaatcagttccttcttgtgctgaggctgcctccattgttctttatgccagaccttcctgcaccttgcttctttaatcattcctactcagttcacttgcagtctgccaaaaattcgcagaaatctctcatctgctgatattattctccattcttcatcccctccccctttttttcattatgttgaaatgacttttttttttttttttttttgagtctcactctgtcacccaggctggagtgcaatggcccagtctcagctcactgcatcctctaccttccaggctcaaatgattctcatgcctcagcctcctgagtagctaggattacaggtgcacagaactggcacagctactttttgtatttttagtagagatggggtttcaccatgttggccaagctggtgttgaactcctgaggtgatccacccacctcagcctcccaaagtgctgggattacaggtataagccaccgtgccaagcctactttataaaattcccttagtatcattttgaatgggttcatggagataatagagacaatctcttttaaattctcttctattgggaaccggaaatctttgtattataagaagataaattaatcccactgttcaaaaaaaaaaaaaaacgtgaataagtctttttcttttacacaggaaatcttacctgtattccttaacgccaatagaaactggaattctccagttgctaatttcataatggagtcacaaagactggaattaatcagactaatggagacccaagaggaagatgtggtcctactaactgctggagagcacaataaagcagtaagaaaaattacttccaagcatcagtgctgttgatgctgaacaatgccttactctcctatgtatatagtatacgtttgaactgtagactgttaattcataaaatggagctgctctgcataaatcttttttttttttttttaagagacggagttttgctctgttgcccaggttggagtgcagtggtgcaatcttggctcactgcaacctccgcctcccgggttctagagattctcctgcctcagcctcctgagtagctgggattacaggcgcacgctgccatacccgactaatttttgtattttagtagagacagggtttcaccatgttgcccagactggtctcaaactcctcagcttaggcagtccacccgccgcagcctcctgaagtgctaggattacaggcgtgagccaccgtgcccagcctgcataaatcttatagtgctttataatgcactgtataaaaacttaagggttggccgggcatggtggctaacgcctgtaatcccagcactttgggaggccgaggtgggtggatcgcctgaggtcaggagtttgagaccagcctgttcaacgtggtgaaacatcatctctactaaaaatacaaaaattagctgggtgtggtggcgggctaatttttgtattttgtagtcccagttcctcgggaggctgaggcaggagaatcacttcaacctgggagggggaggttgcagtgagccgagattgtgccactgcactccagcctggctgacagagccagactccgtctcaaaaaaaaaaaaaaaagggttttttttcatagctaccagcctccattggcattacttaaatagattagacctgaccctaattagaaaagccacttagattaaggggtagtgaaattagtcatataaccatgaaaaaatattttcagtgtcaagatttcacaaatgaagaaaattaggagtctcaaatttttatacatcatgcattcgtaaattgtggagggacggatcagaccactggcgagctggagggctggcagacacccctggaccaacttggtcaaagtgggaccctttttcctcaagaacagcagctgtaggtgatgagtgccatcatgcactggctgagtcatgattcttcaggggatatggaagactgaattagctttagggatctttgtaaaatatagaaaagtatagtacaaagtcaaatatgaatattaaaaatgtactgtaaagatcaagcatgatataaatttattttttcactttagtatatagttttttcaaaatgatagtgtgtctaactagtacttcatcaagttctttcttctaatctatattttcatttgtcattgtttcttccacagaaaaagtttcagagttcagcttcaaagctaaatgtaatcccccgtctccccttcccctacaatagtaaaatgaagaaagctatttatttccaaattttattatgaatgcatttcttaaaaaagaacatgggattttgttcctaactaatttggctattaaaccttctcttggtatgaactaaacatgctggtgtttcattctcaggaagttataggtctgattcctacaaggccttccttgaaagagagctagaaaccagactttcgaggaataacattaacattctgaaaatgtcacaatgaaggtccgttatgtagacgtaaatgtaagatagaatgggctgcaaaataataccctatcatgtctctaggcatatgtcactgttctaaccagctgtcctttctcagggaagtcctgcataccataggtagcacttattaagcacttagtatttgccaagcccgttctaagcactttgtatacattaactcatttaatcctcatgccaaccctatgaaagaagttctgatactgttgctattttaaaaataagaaaagtgagtcacagagcttaaaattttgctcacagtcacacagctaggaagtggaggagccggatttctaacccatgaagttgggttccaaaattcacactcttatttttttttattttttatttttttttgagatggtctcactctgttgcccaggctggagtacagtggtgtgatctcagctcactgcaacctctgcctcctcccgggttcaagcgattttcctgcctcagcctcccgagtagctaggattacaagtgcatgccaccacgcccggctaatttttgtatttttagtagtgacggggtttcaccatgttggtcaggctgatctagaacccctgaccttgtgatccgcccgcctcggcctcccaaagtgctgggattacaggtgtgagccactgcacccctccgcactcttaaatggacctctaatctgcattacctatagtgatagccagccttcactgaacattaacagtgtgccaggcacttaccaaatcctcaccacaacccttcaagagaagtgaggaaataatcagaacgactaccactcacatactttgtcaggtcctgcaccttatgtatattatcttaagcttcacagcagtcttttggagttgatatttttatcccaattttacaatgaaaaagggtacagagaagttcgtaattagccacactgagattcagacccaggtctatgaagtgctgatccctgtgttcttaatcaccgagttatcagtactcacccagttggttgagtgtgatgattgttctcaaccttgttgcaattagacttatcctcagatctttgtgtcctgagaagcaaagggcatcctatctgttaattggctaatcctttcctagagaatggcctggcttcggaatccaggctgtgtcatttcctgcctgctctgtcaagaagttaactcaatgtttacgtcttctgtttgcagtgctctttgttaggaaaattacgactggaatgtgctgaccttctagaaacaagaggagtggtgctccgtgaccccactctgttctctttcctttgggtggtagatttcccactcttcctgcccaaggaggaaaatcccagagagctggaatcggcccaccacccatttactgctccccaccccagtgacatacatctcctgtacactgagcccaaaaaggtaccgtatctatacttccaaatcaaaaggaaatgtgtatataaaggcaaagaacttcagacttcaaggtctgatgaaagataggacccagttctggaagccccagaagaaattgtggagtttgagttagtagtaatacattgtctttaaaaatctacagggtcttcaacccgtagaacagaaaaccagacattttctctaacataaagtatctgtgaatcttctaggcccgtagccaacactatgacttggttttaaatggcaatgaaataggaggtggttcaattcgaattcacaatgcagagctgcagcgttatatcctggcaaccttactaaaggtaacaaacatcatctgctatcctgggcttatttttttaccagaatatttttcagttttgtgttgttgttgttgtttgcttgtttgttttgtttttgagacattctgtcacccaggcaggtgtctactggtgcattcatagctcactgcaatctcagtctcctgtgcttaagccatcctcccacctcagcctcccaagtagctgtgactacaggcacatgccaccatgcccggcaaatttttttatttttttgaagagataagatttccctatgttgctcacactgctctcaaactcctgccctcaagcactcctcctgcctcggcctcccaaagtgctgggattataggcatgaaccactgcatctgacttaaatcagcctattttattaaacatttgttatgattggaggattcacaagatacaaaatagcatcagctatctctctacctttaatgtaggacttggaaaagtaaataataatattaaaagtaaataataatattaaatgcttaaatagtatctggcacatagcactattaaacagtactatttaaatactaattaatagtgcatattaaatacccttattataatagtgcagataaatatccttattctgcccactctaaagatgagatttactgaggcaacttacttaacttgccaaagtgacagtacaaaagtaagcagagtcaggatttgaatccaggtgaggtggctcttaagcccatgctcctaaccactaccctgcttaaaaaaaccatgcagcttgaaaaaataaaaatcaaatcaaatgaaaaccatgcagtctgaagtgactaaaaatgttgataatgttagagaaagagagagaagtttgaaaagattttatatcacttattagatactactttagctatatttaaggcagggatatattttagtgatagtggagtaatcaggattttttaaaagtaaaagaagagtctgtacaggtgcagacctaagaatttgaagtttgttggtgatgctgtagaaggcttgggtaggtttcagaaaggaaaaggtctgagagagtctggtcctaaaagatcgttttgtgggattaactgacaagtgtgaggtaggatggaaggagaactcagaccatgagatgactcctttagctttaagccttcagagtccttaaagtttaagggcattgtgaaatctgttaacttttttttttttttttgagacagagtcttgctctgtcgcccaggctggagtgcagtggctcaatcttggctcactgcaacctccgccgcctgggttcaagcaattcttctgcctcagcctcctgagtagctgggattacacgtgcgcactaacacacccggctattttgtatttttagtagagacagagtttcaccatgttggccgggctggtctcgaactcctgacctcaagagatccacccgccttggcctcccaaagtcctgggattacaggcgtgagccaccgcacccagccgaaatctgttaacttttctcctgccaattcaaagcctccaatcacccattgggttttgtgtgtttgtttgtttgtttgattttaaaaagatggagtctcactctgtcacccaggctagagtgcaatggcatgatcataacttagggcagcctcaaactcctgggatcaagcgatcctcctgcccagcccagcttccagtcagcagttttcagcctttttcattcctctcattgtcaaacttttcaagagtcactaagaatacattacttttttctttttctcgctttgtcacccagactggagtgcagtggcgtgatcttggttcactgcaacctccgcctcccaggttgaagtgattctcctgccttagcctcccgagtggctgggaccacaggcacacaccatcacgcccagcatttttttttttttttgtatttttagtagatacagcattttgccatgttggccaggctagtcttgaacccccaatctcaggtgatctgcctgcatcggcctcccaaagtgctgggattacaggtgtgagccaccacacctggcctagaatacattacttctgttgcttccctaaatagtggttctcagccctgctgcaccttacaatcaaatcacctggaaagcattaaaaaaaacactggtgccttggctacacatcagaccaactgaataaaagagttctaagcataaggctttggcctctgtttgtttgaagcttcccacttgatcctgatttgtagcctggttggagaaccatttccaaacacactttcaacatttctacatgtactgccccacaaaagttactcacaagatcactaaatccagtggcctgttcttggcccttaagttctccttcctcccggcagcatttgacaatgttgcccacttagtaatgctctcttcccttggtctctgtgacaggagagtttcctgctttttatccccacctcctcatttggtctcactctgtttgcattgtgaatacagtaaaagctgcatttactgaacaccaggcatttttgtacatgttataatcatctatgacttgtctttttcccttactaacctgcaaatcacttaaggtaattttttctttacacttttccaataaacttttattattggttaagtcagttttagctgttttaaaactcaactttgtttcccctttatcatctaagcctagatggtggcacttagtggaccttcaaaatatatttaaactgaattatcttttgaatttcaggaggatgtgaaaatgctctcccatctgctccaggctttagattatggggcaccccctcatggaggaattgccttaggtaaacaacttttccttttataagataaactgaattccattgcactgtctcaaattcaggttctcagtttgtgttggtagaggtggaaggatgagtccaagagttccatgagaatgtaagtttctgttgaaatttcagtaatatattttttaaatatatcttaacagttataaagatataacttaactgataatttgcatttgaaagatcattaatagcttaaaactgcagatcttaagtcaatattgttcaaatccccatggcctcacatacgcactcattggagtctggaaagcactgctccataatgttcagcttgtatgaaaacaggaagatgccagtgtccttctgattgccatggttactcactttgcttgttttgtcaaagcaaggaagagtaagaaattctaggaagctcacctagattgtaggccccaacaacagggacttccttctgtgtttatggagttccctgccaagcaccaaatacactgttgaatctgttttagggcctttagtaagcctttactaggaacactaatcgctgtgacaatccaagtagcatgtgaacattagtcctgaatacttttccagaatgagatagaaaagaacctctcaaacaaacaaaagttctctaaaaaggtagggaacgatggttggctacagtttgttaaagattcttatttaaaagttttctacaacttttatagaaaaactaagttatttccaacattagattacatttctcatctgttatctttgtattttactcacagggttagacagactgatatgccttgtcactggatctccaagcatcagagatgtcatagccttcccaaagtccttccggggacatgacctcatgagcaataccccagattctgtccctcctgaggaactgaagccctatcatatccgagtctccaagccaacagactccaaagcagaaagagctcattgaatcatgcataccatgcagaaagttgagcttttaggttttgtcctctttgcttccccaaggctaaagtcagatctagagttctgccacaggtctaacaatcaagtctttagatggaaggaatccaggcaacattcttcaccacaacgaagaaacagataaaagatacccaattttgacttgatttcatgcatcatttggattttttttggttaggactttttttgaagttcctttttacttaggtgtgaaagatggttctttgttgaaataatatagtggtttagtgttttcaaatcatgtttctcatacccagatagtagattattcacttaggacagaggtaatcaaattatgtgtgaaatgtaggaaaatgcttgcccctgtaaactagtgagttgatggagcatttgcttcatcatcctcatcaagagaatcatataaattaagctttataatgacatttcaaccatcaacataatatagtgaggagtagcataatattttttaataatgcagaaaacatcactgaaatgagagtcacaaatttttcttcagtgtttcagcctgagtaagttacataaacctcgcttagcctcccttcctgctaatgtgtaaaatacatacttgccctggctacctcaccgggctgttattgctggaatcagaggagataacatatatggaagataaagtgaataaaagtactttgaaaaactataaagcattccacaaatatgagatgatggtattatccatccataaataggtagatatatctctattttatagtttcagattaaacaaaactgatatcaatagtaaaagtcattttacttatcaattttctgttttttttttt

SEQ ID NO: 11887 - DNA, 378 bp, Homo sapiens
atcccctgaagaaaaaaaaaaaaaaccgccaaaatgacagctaagacagaggccagactaacccctggccctcccaaattccctctcgctccacaagtgggttcacaagagacacaaacgcacccaggaagacctccgctccctcagacgcggggcgggccctgcgacttcactctgggagggacatttccgctcacccagctctgcgaccctcgctcctgcggagtcagcttctgctcgcggagggggaagggcaaaaggacagtgcgtcccaacccgtccctctccagctgagcctgtcagagaccagcccagctctgaaatcaagccgttgagaaaagggaattcggccctccgccgcctcttcagtttaaaatc

SEQ ID NO: 11888 - DNA, 3766 bp, Homo sapiens
gattaaacagcatacagctcctgtgagcccacattcaacattttttgatacatttgatccatctttggtttctacagaagatgaagaagataggcttagagagagaaggcggcttagtattgaagaaggggttgatccccctcccaatgcacaaatacatacatttgaagctactgcacaggttaatccattatataaactgggaccaaaattagctcctggaatgactgaaataagtggggacagttctgcaattccacaagctaattgtgactcggaagaggatacaaccaccctgtgtttgcagtcacggaggcagaagcagcgtcagatatctggagacagccatacccatgttagcagacagggagcttggaaagtccacacacagattgattacatacactgcctcgtgcctgatttgcttcaaattacagggaatccctgttactggggagtgatggaccgttatgaagcagaagcccttctcgaagggaaacctgaaggcacgtttttgctcagggactctgcgcaagaggactacctcttctctgtgagcttccgccgctacaacagatccctgcatgcccgaattgagcagtggaatcacaactttagtttcgacgcccatgacccgtgtgtatttcactcctccactgtaacgggacttttagaacattataaagatcccagttcgtgcatgttttttgaaccattgcttactatatcactaaataggactttcccttttagcctgcagtatatctgtcgcgcggtaatctgcaggtgcactacgtatgatggaattgatgggctccctctaccctcaatgttacaggattttttaaaagagtatcattataaacaaaaagttagagttcgctggttggaacgagaaccagtcaaggcaaagtaaactctccggtccccaaaggttgttaactaggtccgctttcatgtgcatcagacagtacacctatagcaagcacacgtagcagtgttaggctttttcatacagtatgtaagcttagtgttagtatctgtcagatgctacctgctgttacttattcagataaacatggtgcctattggaacaatagcggatagagctacaggtgttcagtaagactacaaaaacattttgcctatttcgctaacagtttggtttttaatggctgtggtatttgagtgaggcaactctggggcatttgttatgaagaattctatttcttactgaagaacaaattattaatattggatgagtatttcaacagtgtgactaatgtttgaaattattttttctaagagtttttctataaccttccaaaagtcgtgatgtttgtagttactataaatcaagctttggaagtccaaaaagaataaaagactgccttccttttagaaaaaaatgcaattttctggccacaagggcatagtgcagttcacttacgtgttgatgtagtttataatcagacgccttttctcttctgcaaaaggtactgttaagtaaaccagattttctaaataggcattcttaaaatttcagacttacaaagctagtagtagaattttattgaaaggcctaggtattaattttttaaatgagtgctttaacttaaaacaggcgtttggaatagctgctgcaatgtagtcttgtgtgtgatttttttttaagttgatgtgcagtctaattgttgtttcataaaagttggatctgttcctatgcccaggatgattttgtgaaccgtgaagtacgtgagactagaagacgcccaaacaagtcagataatagtaactacaatggttgctgatgttgagattattgttgaactataattaataatttggatggcagaatttatctcttttttgtaaactctcataactgaattgcttaagtataatttatagaatttcagtgcagttcattcttaatggaaaatctgaaacctaaattgcagatttaaaaggtactgtacaaccattatatctgtaaataacttagcacctttttgtcacttagaataatatgtactactacttgagtgagcgcttttggaagttatatcaagttctagtgtttgcttcttagtaactgaactgaatttacagttctgtcctagacattttgcactaaagtagccgaatccactctcatgtcttttcgttaatgtgctctgtaccactggtgagtgctccatagtttccttacctgctgctacagaatgttattttacatccctatggctattgccaaggctacaaaaaaggaaagctatatttgtatgcaacactaaccttttgactgctaatgtatgtttctgcttgctgtgccttgttatggctgctttttttgtgctaataaagtatgtttggtgttctccttgtatatctgctgttttatacatttgcaacaatttctcttgtaaatggaatggtttggggtttttaaataagcattaactaacaacctttctatagttaatgcagagttaatgaacagtctaatattgacttatcagaataagctaactctaaatttaatgctctacatcttatcagtcataattatatatactgtggaacagtatctgtagttactgcaaattactgtacagtttaggttataacagaaaactgacagagaagtaataaacctattgatttctctgcttataaatgaaagattgaaactatccaatgacatattatagtaaatgagtatctgtaacctcccactgcatcagaagcaggttaaatgaagtcttgtgaatttgtaatagatcagtaccatttattggtttggggaccatcttaattaaaaataaatgcccaaaatgtagaactttaaccaaagacttgtcccttttaaagcaaaatggggattgaagggacttataatttctgttgtttctaattaaagtccctgaagatcatataccaaagtgtttgagaacttcatccaaacctactttaaagcattatgtgcaattaagttgttatgacataattatattgcctaattgttgggtcttttttcttgagcttataatgtacctggaaaataaacctcttgagaaaaagaaaagttcatactgattattggaaaaggactatatatgtgagcaagattgtgttttagagaggaaacttgaaactccaagaaagcacttgatgtttttatatgcttgtagcaaattgatgttctaactgtagttttatagaaagtattaatgcttttatgtatttcaaaactttcatatgttaaatggaaattgttttaaatgtgtttgagtttatgtaagcatgtatacactgtgctaaaagtcacatgtttcagtttgtgtataatattaatatgcaatttttggtttaaatttttgtcttaaaatattagtggcttacattttaaaaaagaaaaatcaccagcatgaacttgcacctaagtctatattcactgtgtccttttctgaatcccattgtagcctgtcaactaaatttgagtgttaacggtctttttaaagtgcatttaaatacaaaccaggaatttctttagaagttgagatacatctttatagttgaaataattaacccaagaaaaggttgctttgatttgtacccattctcattcattttcttcattcccttacacacacacacacacctctcccttccgcatacatataagtgtgtattatatatttatgtatgcacatatatacatttatgttgttaatattactttagatggcatttccacctgata

SEQ ID NO: 11889 - DNA, 4170 bp, Homo sapiens
aatgattcttgtgttaccccaggaacaagacttgcacgaagagattcctactctcgacatgctccatggggtgggaagaaaaaacattcctgttctacaaagacccagagttcattggatgctgataaaaagtttggtagaactcgaagtggacttcaaaggagagagaggcgctacggcgtaagttctgtacacgacatggacagtgtttccagcagaactgtaggaagtcgctctctaagacagaggttgcaggatactgtgggcttgtgttttcccatgagaacttacagcaagcagtcaaagcctctcttttccaataaaagaaaaatccatctctctgaattaatgcttgagaaatgcccttttcctgctggctcagatttagcccaaaaatggcatttgattaaacagcatacagctcctgtgagcccacattcaacattttttgatacatttgatccatctttggtttctacagaagatgaagaagataggcttagagagagaaggcggcttagtattgaagaaggggttgatccccctcccaatgcacaaatacatacatttgaagctactgcacaggttaatccattatataaactgggaccaaaattagctcctggaatgactgaaataagtggggacagttctgcaattccacaagctaattgtgactcggaagaggatacaaccaccctgtgtttgcagtcacggaggcagaagcagcgtcagatatctggagacagccatacccatgttagcagacagggagcttggaaagtccacacacagattgattacatacactgcctcgtgcctgatttgcttcaaattacagggaatccctgttactggggagtgatggaccgttatgaagcagaagcccttctcgaagggaaacctgaaggcacgtttttgctcagggactctgcgcaagaggactacctcttctctgtgagcttccgccgctacaacagatccctgcatgcccgaattgagcagtggaatcacaactttagtttcgacgcacatgacccgtgtgtatttcactcctccactgtaacgggacttttagaacattataaagatcccagttcgtgcatgttttttgaaccattgcttactatatcactaaataggactttcccttttagcctacagtatatctgtcgctcggtgatcttcagttgcactacgtatgatggaattgatgggctccctctaccctcaatgttacaggattttttaaaagagtatcattataaacaaaaagttagagttcgctggttggaacgagaaccagtcaaggcaaagtaaactctccggtccccaaaggttgttaactaggtccgctttcatgtgcatcagacagtacacctatagcaagcacacgtagcagtgttaggctttttcatacagtatgtaagcttagtgttagtatctgtcagatgctacctgctgttacttattcagataaacatggtgcctattggaacaatagcggatagagctacaggtgttcagtaagactacaaaaacattttgcctatttcgctaacagtttggtttttaatggctgtggtatttgagtgaggcaactctggggcatttgttatgaagaattctatttcttactgaagaacaaattattaatattggatgagtatttcaacagtgtgactaatgtttgaaattattttttctaagagtttttctataaccttccaaaagtcgtgatgtttgtagttactataaatcaagctttggaagtccaaaaagaataaaagactgccttccttttagaaaaaaatgcaattttctggccacaagggcatagtgcagttcacttacgtgttgatgtagtttataatcagacgccttttctcttctgcaaaaggtactgttaagtaaaccagattttctaaataggcattcttaaaatttcagacttacaaagctagtagtagaattttattgaaaggcctaggtattaattttttaaatgagtgctttaacttaaaacaggcgtttggaatagctgctgcaatgtagtcttgtgtgtgatttttttttaagttgatgtgcagtctaattgttgtttcataaaagttggatctgttcctatgcccaggatgattttgtgaaccgtgaagtacgtgagactagaagacgcccaaacaagtcagataatagtaactacaatggttgctgatgttgagattattgttgaactataattaataatttggatggcagaatttatctcttttttgtaaactctcataactgaattgcttaagtataatttatagaatttcagtgcagttcattcttaatggaaaatctgaaacctaaattgcagatttaaaaggtactgtacaaccattatatctgtaaataacttagcacctttttgtcacttagaataatatgtactactacttgagtgagcgcttttggaagttatatcaagttctagtgtttgcttcttagtaactgaactgaatttacagttctgtcctagacattttgcactaaagtagccgaatccactctcatgtcttttcgttaatgtgctctgtaccactggtgagtgctccatagtttccttacctgctgctacagaatgttattttacatccctatggctattgccaaggctacaaaaaaggaaagctatatttgtatgcaacactaaccttttgactgctaatgtatgtttctgcttgctgtgccttgttatggctgctttttttgtgctaataaagtatgtttggtgttctccttgtatatctgctgttttatacatttgcaacaatttctcttgtaaatggaatggtttggggtttttaaataagcattaactaacaacctttctatagttaatgcagagttaatgaacagtctaatattgacttatcagaataagctaactctaaatttaatgctctacatcttatcagtcataattatatatactgtggaacagtatctgtagttactgcaaattactgtacagtttaggttataacagaaaactgacagagaagtaataaacctattgatttctctgcttataaatgaaagattgaaactatccaatgacatattatagtaaatgagtatctgtaacctcccactgcatcagaagcaggttaaatgaagtcttgtgaatttgtaatagatcagtaccatttattggtttggggaccatcttaattaaaaataaatgcccaaaatgtagaactttaaccaaagacttgtcccttttaaagcaaaatggggattgaagggacttataatttctgttgtttctaattaaagtccctgaagatcatataccaaagtgtttgagaacttcatccaaacctactttaaagcattatgtgcaattaagttgttatgacataattatattgcctaattgttgggtcttttttcttgagcttataatgtacctggaaaataaacctcttgagaaaaagaaaagttcatactgattattggaaaaggactatatatgtgagcaagattgtgttttagagaggaaacttgaaactccaagaaagcacttgatgtttttatatgcttgtagcaaattgatgttctaactgtagttttatagaaagtattaatgcttttatgtatttcaaaactttcatatgttaaatggaaattgttttaaatgtgtttgagtttatgtaagcatgtatacactgtgctaaaagtcacatgtttcagtttgtgtataatattaatatgcaatttttggtttaaatttttgtcttaaaatattagtggcttacattttaaaaaagaaaaatcaccagcatgaacttgcacctaagtctatattcactgtgtccttttctgaatcccattgtagcctgtcaactaaatttgagtgttaacggtctttttaaagtgcatttaaatacaaaccaggaatttctttagaagttgagatacatctttatagttgaaataattaacccaagaaaaggttgctttgatttgtacccattctcattcattttcttcattcccttacacacacacacacacctctcccttccgcatacatataagtgtgtattatatatttatgtatgcacatatatacatttatgttgttaatattactttagatggcatttccacctgata

SEQ ID NO: 11890 - DNA, 107 bp, Homo sapiens
gagtctcactcttgtcacccaggctggagtgcagtggcccgatcttggcttactgcaacctctgcctcccaggttcaagtgattctcctgcctcagcctcctgagta

SEQ ID NO: 11891 - DNA, 321 bp, Homo sapiens
caggattaaagaattgggaagtttaaagacacctttcctggccgggcatggtggctcacacctgtaatcccagcactttgggaggccgaggccagtggatcacctgaggtcaggagtttgaaaccaacctgaccaacatggtgaaaccccgtctctactaaaaatacaaaaattagccgggcgtggtggtacacgcctgtaatcccagctactcagaggctgaggcaggaggatcatttgaacctgggatgtggaggttgcagtgagccaagatctcaccattgcactccagcatgaacaacagagcgagactccgtctca

SEQ ID NO: 11892 - DNA, 107 bp, Homo sapiens; identical to SEQ ID NO: 11890

SEQ ID NO: 11893 - DNA, 1072 bp, Homo sapiens
aaaaatgttactcatcctctctgaaagcaaaaaggaaaccctaacagctctgaactctggttttatttttcttgctgtatttgggtgaacattgtatgattaggcataatgttaaaaaaaaaaatttttttttggtagaaatgcaatcaccagtaaagaggtacgaaaaagctagcctctctcagagaccggggaggcagagtactactagaggaagtgaagttctgatggaatcatgcctgtcaaatgaggtcttgaagcggatgcccaaataaaagagtatattttatctaaatcttaagtgggtaacattttatgcagtttaaatgaatggaatattttcctcttgtttagttgtatctgtttgtatttttctttgatgaatgattggtcatgaggcctcttgccacactccagaaatacgtgtgcggctgcttttaagaactatgtgtctggtcacttatttctctaaaattatctcattgcctggcaatcagtcttctcttgtatacttgtcctagcacattatgtacatgggaaatgtaaacaaatgtgaaggaggaccagaaaaattagttaatatttaaaaaaatgtattgtgcattttggcttcacatgtttaactttttttaagaaaaaagttgcatgaatggaaaaaaaaatctgtatacagtatctgtaaaaactatcttatctgtttcaattccttgctcatatcccatataatctagaactaaatatggtgtgtggccatatttaaacacctgagagtcaagcagttgagactttgatttgaagcacctcatccttctttcaatgcgaacactatcatatggcattcttactgaggattttgtctaaccatatgttgccatgaattaactctgccgcctttcttaaggatcaaaaccagtttgatttgggaatcttcccctttccaaatgaaatagagatgcagtacttaactttccttggtgtttgtagatattgccttgtgtattccacttaaaaccgtaatctagtttgtaaaagagatggtgacgcatgtaaataaagcatcagtgacactcta

SEQ ID NO: 11894 - DNA, 3544 bp, Homo sapiens; identical to SEQ ID NO: 11225

SEQ ID NO: 11895 - DNA, 414 bp, Homo sapiens
ctcctcagttaagtgagagggaactccacctgttgtaaaactattcttagtagtctggattgtgttttttcattttaatagccatataaaattattcagatgattcagaataagcaggatctattttaaggtcccacatgataggttcttacttcagatcaaggaggtgaaaggttttaaagttgggaatttgggataaattctgtattggtggtgtgtaagtttttcttcaccattgttttaattacttacaaaggtaaaacttcaccgtctcctaatgccaaagcctactggggatgggtatttcacttgagattacttcccaatttttattctgtcttccagaggattaaagatggaactctaataccagttatgacaagattcttagtagagagttctccacaaccaggt

SEQ ID NO: 11896 - DNA, 397 bp, Homo sapiens; identical to SEQ ID NO: 11226

SEQ ID NO: 11897 - DNA, 20905 bp, Homo sapiens
agtttctaggcttgtgtacatctatacatccagaaggttaccaggatcgtgaaataatgttgctgattttaatgttatttaaaatgagtttggaaaaacagctgaaacagattcctttagtagactttcaaagcctcctgataaacctgatgaaaaacatcagagattggaacacaaaggtaatgttacttaaaacttcattattcattttttatatagcattacaatttgactcatagtgcatatggaattaatactgtttctaaactcaagatctttggcggattaaaaatgaactgaggaagggaatgtttgctggagctgtattatttaaattcgtgataattgaattttttctaaaacttcaactctttatccaacaaaaatgtgtttattggggatttcctatggactaagcattaatgtaggtgctagagattgagctgtgaaagagacaaagcctttgccttcatggggcttttgtcctagtcaaagggttagataaacaagtaaatgttgattatattatcatgtcaggtagtagttaagtactacaaatgaaaataaagcaggacatgagtacagcaagaccagatgctatgctatttcatataaggctggcagggaaaggcctttccaaaataaccttggagcagagacctaaatgaaatgatggagtgagtcatacctacaaccagaatttgagttgaacttctgcaaccatatggaggatgaacatgtataatttttgttaggcctttttaaaaattatatttttcagtcttttttggtggaaaaattaaaatatgcaaaagtaaggcaaagagtataataaattcctaagtatcactttgcttcaataattgagacataatcttgcctaatgtaaaaccgaccctatatttcctttccctgctcatcagattattttgaagcaactgttacgcttttttaaaaattgatacacaatggtaatacatattttgggggtgttaggcttttttttttttttttttctgtaagacagcatctcctgtcacccaggcaggagtgcagtggcgcagtcttgtctcagtgcagcctctgccttccggattcaggcgattctcattcctcaacctcccgagtagatgagactatagatacatgccactccgcccagctaatttctgtgtatttagtagagacagggttttaccattttggccaggctggtctcaaactcctggcctcaagtgattcacctccctcggcctcccaaagtgctgggattacaggcttgagccaccacacctggccaggtgttaggcttttaaaaatactggaataggatccctaaagtgcaagaaatcccaaatcaggaacatatatggtcttgtacagctctcatacacatttgtatttagatcagtttatctttccaagaaggactgtttaaatatcaatgggagatatgatgtagtacaaaacgtgaaagccaagtgaaattctgctaaatgtatctgttcagtccatttaagatagtataagtaaaactgaatctgtgtattgtgtacattttagcagattctagactccatgctatttctaaaaatgtgctctgttttgtactagtgcttccattatgtcaagaagggttgtagatgatctgttgggtgttttattctactgttctgtttgaaaagaaatcttacatgttcttttttttcaggtgcctgaactctgtctgggcataaatgaactctccagtcatccccacaacctcctgtggttggtacagctggtccctaattggacatcacgtggaaggtattaaaaagtgaaaattaaacattaagaaattttataattttacattaatgaaatgccttgggttgtttatttccattcatcattctttgaatgttagatcagatatgtttatttcatattcagttgcgagaaaaggcattgatagcctgattctgccttattctaattcttaactcaggtcattatgtaatttttttttttttgagacaagagtctcactctgtcacccaagctgaatatttttttatttttaattttagtttatctgttaccttaatacagatgacatattccacaaaaataaatgaattagcttttttttgctttagtaaaaataaatttcatcagtaaaaaaataggttttctgtcagtaaatcatcagggtcaaagataaggccgttaaatgatttattgagcttcagataactcaagttttatgtacagatattttacatgaaaattttactgttctataacagcttatatgttcctgtacagacttctcttgaaacattgcctatatttccaattagaactagagctcctcttggctcattcatttgcttttcaagcagtattaattaaaatacattctaaatacttttaacttctaattctaggcaactgagacagtgcctcagtctagtgattatttcaaagcttttggatgagaaacacgaagatgttcctaatgccagtaatctgcaggtataaataaatacatttttatttttaataaatgggagaggtaatgagaggtgtaaggaaaattgatgaaccctaagtcaaaggtcctggggtcagagctcagctcttaagcttgatactgttcatgtaatctctagcacacttaactaacaagatccaattttttcatctgtgaaatggagataatattgcaccctccaccacttagggtggttgtggacaatcagatgtgaattaatgtataaagaaactactgggaaaatcataatgtgcaattatatgaatatgatttcatttattgaattagttcagcttttccaagttagcaattttatcacaagattagaaattgcaaaacccttgtacattgattgcatctttaacctgttttaaaatgagtctttttagatcatagagcttaaatgtagttgccctctagtacttgttcagtaagaatatatcatgtatatatgagagtgtggataaacatgtccagctgttgctgggtactggtggcacacacctatcgtcccagctacttgggaggctgaggccagaggatcctttgaatccaggagttcaagtccaacctaagcaacatagggagaccttgtctttaatatatatatgaatgtttttaattaaaaaaaatgtccaatggaagtcccactctgagtaaaattctgaaggctttttataaacattgatagcactaatggggctgcccttgcttggatttgaaaactcaccataggatgggcacagtggctcacgcctgtaatcccagcactttaggaggccggggcaggtggatcacgaagtcaggagatcaagaccatcctagccaacacggtgaaaccccgtctctactaaaaaaaatacaaaaaaattacccgggcatggtggcggacacgtgtagtcccagctactcgggaggctgaggcaggagaatgacatgaacccaggaggtggagcttgcagtgagccgagatcacgccaccgcactccagcctgggcaacagagcgagactctgtctcaaaaaaaagccccatagaacctgatctggatgtccctttgttcttgtttgaattgcaatttggtacaaggtatgccaccagatcctaggaattaaaacaaacaaagatttagattagagactctgcccttgaaaacataatctaatggttgaaacaaaattaaccaactcttatgggttagtgtggtaagaacagtaatcgaagcatgcacgagatgctgtgggatggagagactgatgggcacagctggtttctgctttagtagaattgaggtagatttgattccagatatatggggatcatgctggagctaccaggataattagcagatagttctcattcctttcattgatatttactgccttcaaaagagatccggggataggatttctaccatttctcctaacttttgttgttctgttactttttccttttttgcccatgtaaaatagaataattagctgaataattacatgaataattaaccctcaaactcactaactgatattcaagtaacaatctagttgtgatttttaccacaacttcttgtagttcttctcagaattcaatgacttctaaccacagagtcaactttgttgactttcaaataatttaacagagaaagcattccctgtggcctctatgataatatcgtttggtctcctaagcatttatcctaagttacaagtactaaatctttaacttaaaatccctttttttttttttgagagatgtagtattgctctgtcacccaggctggaatgcagtggcacaatctcggctcactgcaacctccaccccgcatattcaagtgattctcgtgcctcagcctcccgagtagctaggactacaggcatgtgccaccatgcccagctaatttttgtatttttagtagaggcggggtttctccacgttggccaggctggtcttgaacctctaacctcaggtgattcacctcccttggcctctgaaagtgttgggattacaggtgtgagccaccgtgcccgaccacttaaaatccctttttaagcaattcagggttttacataaagggaaaatggatattgttaagtgtaaagaaagctataataaaaggacaaaatgaaagagtacacactggaaaaaaatagcctaagaaagaacaactatattatttagctttgttcaatgtctcctctttcttttgataggtatcagtcctacatcgctatcttgtgcagatgaagccttctgatttgttaaagaaaatggtcttgaagaaaaaggctgaacaaccagatggcattattgatgacagtcttcatttagaacttgaaaagcaggtatccagtgctagaaggtctcaaagagtacatagaagcataactgttatcagcttactaaccatagactgatatgtaggcatttctggatttggacactagacacattctagcaaacataattttaaagcgaataatatttttaatttatcactgtcatgaaattcttccataaatttgagagttgaaaatttaggtaaaaggatgattgttggtaatttgctcccaagagtattttttgtagccctttattagggcagtcgtgaggtcatgaatcatggtaaaaagaatgcacttgagttagaaatgagaaagcctagtttagatgcttcgcttttacttactgaccagctgggttaacttgaccgtatcctttatccttcctgggcaattttcctaatgtgtaaattggaatgacatctatgctagctaattcataggtgttaattttattcatttctctaacaggcatattacctgacctacattcttcttcatttagtcggtgaagttagttgttctcattctttttcttctggacaacgggtaggtagtgtttagtgttgttgctgctgtttttaaataggtgttactgatgatggaatgagtgagcatgctttatataggagaaaactatgtaaacttttcttaatataaaagctaattgattttgctataagaattcccatgtataccagaaagaggggcatgataatggtcttgtaactatatcgtattgaaaagaattgttggccaggcgccatggctcacgcctgtaatcccaacactttgggaggccaaggtgcgtggatcacttgaggtcaggagttcaagaccagcctggccaacatggtgaaaccccatctctactaaaaatacaaaaaaattagccaggcgttgtggcaggtgcctgtaatcccagctgttcgggaggctgaggcaggagaatcgcttgaacccgggaggtggaggttgcagtgagccgagattgcgccactgcactccagcctgggcaacaagagtgaaactccatctcagaaaaaagaagaaaagaattgtcagcaaatgttaattctgtttgttggagtggaacttaaccattatactttggcagcagtataatatattcataagataccaacatcaccaaataccaaatgggctggtgttgtgctggacccatattgactccagtagaaatggcagtcaggtggcagcaggctacacaggagaactgctaccatctgtagagaccatgcagtttacatagcattttcacttagcaccctttacctagcaacctccatgtaaccaagaacaaagggcctgcatcccgtatggccttacaagggatgagccgggggttcagatgtccttcataggtaaggagtgaaactccatgttggccactcccagattatttggcttgggactccagttacacattcttcttagaccataggttcattttcagagtatgctttagttattgctgtcagatgcatctgccatacagccagcttttagctcgtttcttcccatttctttgccattccccttttgttcctttagaaataacatttgccttcaaaattaaactgatggtaaggcaggctgctttggaaatgcatttctaatattcagattttcattttgaattattcttcccatactcctggggaaagatcttgcttaattccttttatttcatatcttaactattccaattcctgttttaaaacttaggtcggacatgccgggcacggtggcacacccctgtaatcccagcactttgggagggtgcggtgggtggatcacttgaggtcagaagttcaagaccagcctggccagcatggtgaaaccccgtctctacagaaatacaaaaagttagccgggcgtgttggtgcgtgcatgtaatcccagccactcgggaggctgagacaggagaatcgcttgaacccaggaggcggaggttgcagtgaggcaagatcgtgccattgcactccagcctgggcaacagagcgagacttcatctcaaaaaaaaaaaccttaggctggacgtggtggctcatgcctgtaatcccagcactttgggaggccaaggcgggcggatcacttgaggtcagaagttcgagaccagcctggccaacatgatgaaaccctgtctctactaaaaatacaaaaaaaaaattagctgggcatggtggcagacacctgtaatcccagctactctggaggctgaagcaggagaactgcctgaacccaggaggtggaggttgcagtgagctgagatcacaccactatactccagcctgggcaacagagggagactccacctcaaaaaaaaaaaaaagaaaaaaatacatagtatctcctagacatgatagaaaagacacaagactaattcttatgtttttataaatgctgttgtatataaaactgtgtttgcggttgggcacagtggctcacacatgtaatcccagcactttgggaggctgaggcgggtggatcacctgagatcaggagttcgagaccagcctgaccaacatggtgaaaccctgtctctactaaaaatacaaaaattagccgggcgtgatggtgggcacctgtaatcccagctactggggagcctgaggcaggagaattgcttgaacccaggaggcgaaggttgcagtgagctgagatcacgccattgcacaccagcctgggcaacaggagcaaaattctgtctcaaaaacaaaaagtgtttgctcttctgattagaagctaatatagtcatctgtaatgttcttacatggtttttatattttatacattttttttttcgagacggagtcttgctctgtcacccaggctagagtgcactagcacaatcttggctcactgcaacctctgcctcccaggttcaagcgattctcctgcctcagcctcccaagtagctgggatcacaggcgcctgccaccacatccacacccagctaatttttgtatttttagtagagatggggtttcaccatgttgatcatgttgctctcgaactcctgaccttgtgatccgcccacctcggcctcccaaagtgctgggattacaggcctgatccaccatgccggctataaattactttttatgattaaaaaagtcagtgactgggcatggtggctcatgcctgtaatcccagcactttgggaggctgagtcaggaggatcacttgagcccaggagttcaagagcagcctgggcaatgccatctctgtttaaaaaaaaaaaaaatttagtgattattgtaaaacttatataaagtaaaacctgaaagactcctacaatccagtgccctcctgtaaatttcttcacaatttactaatatattacatataatatactaacaattattttaacaaaaatgtaatcatagtatcatttgcaacttcctttttttcctctttaaaaaaaaatttttttttctttttgagacagtcttgctctgtcacccaggctgaagtgcagtggcacgatctcagctcactgcaacctccgtctcttgggttcaagtgattctcctgcctcagcctcccgagtagctgggactagaggcatgtgccatgatgctggccaatttttgtatttttggtagagacggggtttcatcatgttggccaggctggtctcgaactcctgacctcaagtgatccacccgcctcagcctcccaaagtgctggtattacaggcgtgagccactgtgcccggcctcctctttaagacattagcacttggctgggcgcagtggctcacaactgtaatactagcactttggtaggccgaggcatgcagatcgcttgagcccaggagttcaagtccagcctaggcaacagagcagcatgccatctttacaaaaaaaaaaaaaattaaccgggcatggtgatgcatgcctgtagtcccaactacttgggaggctgaggcaggaggaacacctgagcctgaggaggttgaggctgccatgcactgtggtcatgccactgccctccagcctgggtgacagagtgagaccttgtctcaaaaaaatatataaaaaatcaaatatttgtacttctatctaataactatagtattttgaaacctttattgataaacagtatgttttttgtgattgcacatagtgttaatatgaacatgcttattcatatatctttgcccacttctgcaagcatagctataaggtaaattcctagaagtagaattgttagatcaaagtttataaatatttcaaattttaattattttaaatcgctattatcacattttcatcccagaaagtgttcatttacgttctcaccaagtatatgtgagagaactgcttaggtctatacatttctaaaatttaagatgcataatttttcaaagaattaagtatgaacctctattaatgaaaggttatcttgttcctatagaaaaaaaaataggccaggtgtggtggctcatgcctgtaatccaacacttggggaagcagagacaggaggattgcttgagcctaggagtttaaaaccagcttaggcaacatagcaagatgctgtctctacaaaaaaacaaaaactagctaagtgtggtggcacgtacctgtagtcccagctacccagaagactgactgagatgtgaagattacttgagcctatgagttcaaaggtgcagtgagctatgatcccaccattgcactccagcctggataacaaggcaagactctcttttttttttttttttgagatgaagtctcactctgtcacccaggctggagtgcagtggcacagtctcggctcactgaaagctctgcctcccgggtacacgccattctcctgccccagcctcccgagtagctgggactacaggtacccgccaccacgcccggctaatttttttgtatttttagtagagacgggttttcaccatgttagtgaggatggtcttgatctcctgaccttgtgatctgcccgcctcggcctcccaaagtgttggaattacaggtgtgagctacctcgcccggctgaccctatctcttaaaaaaaaaaaaagtcacaaactgattttgctataagaattcccatatataccagaaagaggggcatgatagtggtcttgtaatcatgtcatattgaaaacattatttgtcaacaaatgttagctctgtttgttggagtggaatttaaccattataccttggcagcagtataatacattcataagataccaacatcaccaaatatcaaatgggccagtgttgtgctagcgagtcgcagtggctcatgcttgtatctcaacacattgggagtctgaagtgggaggatcacttgaagccatgcatttgacactagccttggcaacaaagtgagaccctgtctccacaaaaaaaatttaaaaattaaaaaaatattggctgggcgcggtggctcacacctgtaatcccagcactttgggaggctgaggcaggtggatcacctgaggttaggagtttgagactagcctggccaacgtggcaaaacctgtctctactaaaaatataaaaattagctgggcatggtggtgcacacttgtaatcccagctactcaagaggctgaggcagagaatcgcctgaacctgggagccagaggttgtagtgagctgagatcgcaccactgcacttcaacctgggtgacagagcaagactctgtctcaaaaaaaaaaaaaaagaactgggcacggtggtgcatgcctgtaatcctagctaatcaggaggctgagactggaggagcacttgagctggggagttcaagggtgcagtgagctataattgtgccactgcactccagcctggcaccagagccagaccccatttctttaaaaaatttttttctttttttttttttaaaaggctagccgttgtctgaatattttgttagcgagtatgttaaaggaaggactctttaaatttctgagtactatattacccagttagagctctggggttaattttcattaatgcgagttaatgcatagcaaaacaacttttgttacagtgtgtattttttaaactagtaatcttattgtcatggaagcagctttcactgatacaactactgttacgttgaatagttaatatcagtcattgctaacaggaataatagatttttaaatgatttagttgttctagctgcataatttctttgttaatttgtaatgcttcagaattgttttcatcccttgcatttgttttgcacagaaacactttgtgctactctgtggggctttggaaaagcatgttaaatgtgatattagggaagatgcaagacttttttacagaactaaggtaagtgtgttctttctttttttctttttttttttcttaatcttggttacgttaatatttaaggatagaagcatacaggcctatattcagaaaaagaacatataaggctaggcatggtggctcatgcctgtaatcccaatactttgggaggctgagacaggaggattgcttgaagccaggagttcaagaccagcctgggcaacatagcaagactccatctctacaaaaatttttgaaaaatagccaggcatggtgtcatgcacctgtagttctggctacttgggaggctgaggcaggaggatcactggagcctaggagtttgaggttgcagtgagctatgaacacacatggcactccagcctgggagatagagtaggactctgtctcgaaaacaaaaagaaacatgtaagattagaaataggactttctcttttaataacagaaatcagctcctgctaaattagtgtagctaaattaaaagtgaaaggaaaaaaaatctcaaagcaaatacacttttcactttactttctgttctgaaactcctgacacccaaggagaaaaatacttctagtactaatgatacatatttttccccattacacaaattaaaaccttcatgcttaagttaccatcaaggattgaagcattatttaaataaatacgtaagttatgaaacagtggctttgaaattttatgatggttgaaaacttgttttattcatagagtacaaatagattagctgttattctttgaatgtttcattgaagaatatgttaaaggaaggagtcttcaatttttttttttttttttttttttttttttttttttttgagatggagtttcactcttgttgcctaggctggagtgcagtggcacaaattcgactcactgcaacccccgccttccaggttcaagcgattctcctgcctcaccctcccaagtaactgggattacaggcgcccgctaccatgcccggcaaatttttttttttttttgtatttttagtagagacggggtttcactgtgttgtccaggctagtctcgaactcctgacctcgtgatctgcctgcctcggcatcccaaagagctgggattagaggtgtgagccaccacacccagccaggagtcttcaaatctttgggtcgtacaacacctagtctgagctctagggtggaaatgatttcagcactaagcttgctaagctttttttcttaaaggttttatatactcaaagacagtagaaaagccaaatatatgagtatggagtaggaaaataatgttagtattaatagaatgatttgacagtttttcctgaaacataaaatcagacacttttaaaatacttttttctaaatacaaaaatgagccaggtgtggtggtgcgtgcctgtagtctcagctactcaggaggctgaggaaggagaatcccttgaacccaggaggcagagcttgcagtgagctgagatctcgacactgcactccagcctgggcgacagagcaagactctgtctcaaaaaataataataataaataaaacaaaataaaataaacatacttttttctaaagatttttttattccaagattatcttttagctttgataatgtaatacaatgctgattctttttgcctcttgtctttggatagtcattgaatgtgaagcctcagctttgtaacttaatatcttacattaattagctgcaaaggttagtcatttgaacaatgcccattcagatttaacatatgtatttattttagtaaatttaagttaaatacaaaaataagcaactaatgaagttatcagatttctgattttcaaatacatgtaggggatagctctttccccaagagtagaactctagtttcagaagcacattcttttgagcattcattgaccagaattgctggcctgtagaacttggtagtggctactactgacagccatgctaaaaggggaccacccaagttttatgtttcttaaagacaagggcttggcacagattgttgccagtgcttctcttacttaaagtggaaagcgacacagtggtctgtggaaattgcttcaagggatggtcctgctgaaatagatgagttgcctgcctctccaaaagcctctattatagaaaagttggtgattgttttggagaaatttgaactgtagatgaagaaaaaagcatagattgtagtttactttataaatttaaagctgctataaaattcctgacttgttgaaaacatgtttctcaagcagttatgttcaatagctaattgagaatctctagagtgatagagtttgggttttgtgttacagtttcagttgtgcacagacacttgctaaacctccaaatgtaggaaaatacgaggtatttaaaggggattcgtagtacttgggcacaagcatggagaggagtaacagtgaattttggatcttctaataatgtggagagggacaaataaacgttttttttatggctttgatcctttcaaagggaagctgggaagggaaggcacagaacagccaaagccttgggccctgttgacacagaccacccttcagcttctctatctggttgttcaaaagccagcgagttaaagttaagttcctttgaaggcagagaatgtgtttttggggatgatcttcaataacaggaaaattaaatcataagcattcaatagtttagattatgatgataaagggagtcttattaatttctatgatttgaaatctccttcaaaagatgagtagtttattttctctttgttgacagaaatcaaattgagttgttgagtgtgggcctgttgcagctgtcagatattttgtgtagtgttaagctgattgtaggtgagaatgttttaatctgatcccttttcctgtttttgatatttttaaggtgaaagacttggtcgccaggatacatggaaaatggcaggaaataatccagaactgtcggcctactcaggtgtcattttgttatacaatttcatgtattcttaatagttttgctgaatggcactcttcatactgtttgaaataaaatagggtataacagtgcacttgcttctagttatcttaagataaactgaaaacgccagtataatacatggtttgtaatttttttagttttcgtttgctttatattcattaatttatttccagaagtggttgagcccatttaaaaatattgcattgcatcaaatggaggttattcaattaagagcatttttaagacagatctattgagatagaattcacataccatagattttacccacttaacgtgtacagtggtttttattacattgacagagtgaataacatcaccatagtctaattttagaacattttcatcaccccaaaaagaaatcccatacccattagcagtcattcattcccctttcctctactaccttggttcccctcctgactcctcccaaatcctaggcaaacactaatctactttctgtccctatacatttccctattctggacatcggtaaatgagatatactatgtaatcttttgtaattggctgttttcagttaatataataataagtgaatccatgttatagcatgtacatcccttctattgccaaataattttccactgtatggatatgtcacatttatttatctacttatcagacatttgtattgttttcacattctggctattacaaataatatttccatgaacatttgtatgcaagtttttatgtgaatatgtgttctcaaatgaaacatttgaaaaggaagtcaaattgctgggccatatggtaattctatgttaagtgttttaagaaactaccagactgttttccaaagtgactgcatcattttatattcccaccagaatgtctgaggtttctaatttctccatattctcaccaacacttgtttttactaaagccatagtagggagtagggaagtagaatctcattgtggttttagtttgcatttccctaatgattaatggtgttaaacatcttctcatatgcctattggtcatttgtatagcttttttgcagaaatgtctattcagatcctttgcccatttttttcatcccatacttcatttcaaaaagcctatttttgaatatagttatttgtctttttattattgagttgtatgttctggatacaaatcccttattagagatataatttgtaaatattttcttccattctgtgtgttgcctttcctttatttttatttattatgtatatatttttgacacttttttttgatgttatatctaaggagtctttgcctaagagggacattttttttaacacctgctagtaagtgtgccagcctgcttgtttacagagtaactggcataggattgtctaaaatgacgcttctcaaattttaatgtacataggaatcaactaggaacttggtgaaatatggattctgactcataggtctggagtgagaactgagatattctgtacttctttttttttttttttttttttttttttttgagacggagtcttgctctgtcacccagcctggagtgcagtggtgcaatctcggctcactgcaagctctgcctcctgggttcacgccattctcctgcctcagcctcctcagtagctgggattacaggcgcctgccaccacacctggctaatttttttgtattttttagtagagacaggtttcaccgtgttagccaggatggtctggatctcctgacctcgtgatccgcccgcctcggcctgccagagtgctgggattacaggcatgagccaccgcgcctggctgatattctgtagttctagcaagttatcagattgatgccaatgctgctgcttcagggactaaactttgagtagccagggcctagaagttgcttatattttatatcaaaataataggaacactgaatgttaagtagataaagcaatctctctattttaagtctttgagaaatcttatatttatgttttgttgtttttgtatttgtttctaaccttaatagattttcttttaatgctggtcatgtactgatgtggtattaaaacagaaaataatttaatagcaaaactatactaatcagcttaacattatttaatctgcttaactaagcccctccatgtgtgcagtggtgagaaaaacatcctgcacttattttttactgttttttgttgtttgactactgaatgtgaaatttgaatctgattaccataaattttcagagaagtcaatataaagattttattacttgtcttatcaaagcccattgtctgatgattagtagttttataaggattaattcataatatgattaaattttgctttaccctcttttttctccttcccttttttaggggcagcttcatgacttctgggtaccagattcttaataggagttgcagcagcaaaaatatgaaccaagagaaattcaataagagcctttcatagaggagtagaaaggattattacagaatccaatgaatgccaagaaaatgtacagcaaatgtgccacttgaatatctagtatgaagctggtaatgaagaaattgccatttctgaagcagatatgaaatatgatctgcttaattgttaaggcaactgacctttcaaaagtgcagagtcttattaaaagaggggaggggtagaagcagaataatagtcatatgtctaacctgccccagttaactcctcttgttaaattataagccagttatcttttttagatagtatttttgtcacttggataatcacaggaaatatataagaaaagagcttggactaacttgagaagttggacatggaaagcaagaccaagttccagttgggtttaattttccctcttggttattttcggacacaaagggaatgcttaaaactgagtttagtaataaaaagcataaatctcttctgtaacttttataaaccacagggaggtttcaatccatgcattttccttcattactcaagattataaatctgtttttaaaatacatctaaacaaacagttgagaaacaaaagtttggcatgttgtcagatccccttaagaggaagaggttaagctgtaaagtagtggccctgttttgatgccagaacattcatatgctgtttgttctggatttcttttaaatgcatgtattttaaatactggttaaatcttagaatcttggctatatcttagaattctggctcttggtaaccatattacagaagtctatattgtaaaagcctaaagatctggacaagtttccaacaaccttgtttccatgagtatataattttggcagacacctgaattctttgggacactgtgtctgtgtatgtgtgtgtgtgtgtgtgtgtgtgtgtgcgcttgtatcttgaagttgttgcacttcaaaaccacagctgctgtaaattcttaaacactggagagccatcctttggtttaaatggtagagggttagtggaagtgcacacgttgtttttagcccaggggtagtaacaaactcttactagccaactagaaaattattttgttgacgagatgtcccttttaggagggtttgtttcctgaaagaatgccaactttttttgttgttctttcagtattggcttgagtgacctgttctcctgagtgctctagtgtctccagttgtgggggggaaagatgatggaggggaacagaaactggacttgatgtttgcggtttgagaggcaagaaaataaaataactttctacctctaaattgaggcttaggagtaaaaagcattttgtcctaaatttatcatttaaaatagcatcagtaacttttgagctcatgtcaatcaagcattggcagtcagagattttatagggaagactaagtaaatccagtttccaagaacctaaactgattgaggctccaagagtcagaccaacaaaagttttattctgtgttgtttactggtaagaatattattatcttgatactacctctcaagggtattgttacaaaatgccacttatggttaaagagatagatacaaagagttctatttgacagaagcttgaaactctggcatctatctgcccaacgatgggggctttcgttctgtaatttaatcctttgtagatacattatttgtgtgtaattttatacgtgttcatatttttctcattttgcattgtgtaaagtgtacaaaatctcaaagtataaaatactgcttatattgcttgtaatttacagtgtgtaaatattttctaattgtgtacattgatgggggggacaagtgggttattcaggtttttttttaatgacccttttgtattgcagtttcaacagataactgtccatcaaatttaaaaccactttgatacatttttatttaacagttccaataagaaaaaaatctctatttttaattatatttctcctttagaaaaaaaatacttcatggtccctctaaaataaatggccagacctcagtttaggcccttgtatttatgactctggtagaggtcttcagactccaggtcatagtccagtcagtatttgcatttgggttctcatgaaaactttgtgactctcttttagcacaagtagcccatggtttttcttccaaatcaagtattttacttctcccttgagtccccatgctttgtctccctcctgctgctattgcccggtgaatgggatggtagagagggagaaatgttcattgcacagagaatgtcaggccactttggggacttggcaaacgaagcttgcactgagtggtggtgtgtttggcaatattactgtgccaaaaatcaccttgtctaattttatggatatgtatggcaaacttattacccttcttgcaagctgcacattaaggtacttgtaagtgtttatgcttttgtgtgtaactgtttgccttttctaactgcttttcttgttactgaaaatataattctactagttttatcacattaagaggctctccatgcacaaaatgcattgatgtagccgtaaagtaacagcatttgtacattttctatctcctgatggcagtggtgcctttgtcaccttttggaaggtttgcattttgtttctgctttcaagcgcaaatagtagcttgctttcagcttcacaaaaatctcctcaaatgtaaaagatacaaaatggcgtgttatcatccaggcttagttggagtatttgcatttttatttttatcaaaacaaatataattggtggggactggccagtaataatgtgtggcgtctttaagccaagagtaatttttaaattaaaaatgaaaattttaagaggtagcccattaaacaagctactgagttggagaattaggggatgactgtggtggtttgtcgctaaggaggcaacagtagggtccaggcggcggggcacgtagagcagttagcatgatccatggttattccttactcatgaacagtgtcggcgcacctcattatctgtgcatttgtttttcctgggcagtcctgtcagccagttaatccaccagctcttaggaagtaaatacagatttttttctttccttttttttttttttaaagattttatactacatcttgttaaagtcctatgaatgtgtgtgtgtgtgtgctattaaaactgctttttctcagtttgaacatgtgtttggtaatatttgtttgggagttggggaggctaagttatctggaatgccctgttccctcagcccaccccagtcccctggcttttaaacatttcttcttgctttggattgtccagttttttagcttgatgtctcctgtttctggaaaacataaagccaccattgtacacagttcacttttatataacccagttaattgctgtatactttgcaatcaggaattcagtaatctcattcttacctcattcactatgttcattccaccattcattctaacaattgagtctcaactacatactaggcactctttttaggattcagtaaggatttgatggtgaacaacatagagaactcatgaatcttacctcctggtatccaggttaaaatactttctgttcttgggcaaagagaattagaaacaaatacccttaacctgactcccttgttcttgagcccaggaccaagaaagaagaagctgtacaatgcagaagcagggcttgagatcacctccaacctgccaagcagatagagatctgggtatgccaacttgggaggcagaggttgaaacctcataggaggaactttggagctcatagaaggccttggcattgtcagaggccttgagttccaaaaccatgccagtatttctgccttctgacaggctggctagaaagagactaaatgggagcatttttctctgacagtggggcggagggatgaggggatgacagcccaggaagaagcagagacattgccgtaagtacttactagagggcaggcagcacagctttatgcaagttaagggccttgaccttgccccaaggcctgacctcagatcccagattcatcatactagccttttgatctttgccaaattacttaaactcactgtttcctcatctgttgaataatggtgtctacctcagggtttgtgaggactaagcgagctaatgcatgaaaagtgcctagtacagtgcctggcatatagcaagaactcagcaaatgcttgctgctctaacgaggcgtttctctgatgacagatttgatcttaagcagacacctcagggtgtactgacatctgagcaaaccatat

SEQ ID NO: 11898 - DNA, 934 bp, Homo sapiens
gactggtcttcccacctcagacgtccttactcagtccatcatctctttcaggattttcttctgtggtctttttcaaactactagctgacttttcccttttatttcccactaggaacccctccccgccccccccccccccccagccatttcatcaaatcaaactcactgccctctttcatgccccttccttagttccccaacacaagcctgtgcataagcttgaacatttctacctttgccaatggtatttccccttctggcttaccctgcttcctccttctcagacttttccagtcttgattgtcctctccataaacacaagaatgaacttcaaggcaagttacttaatgtcttagagcctgtttccccatccataaaatggggctataaattcctcaggatgggatgagggtacaaataaaaaatgaagcaggatattctttgtaaaagtgtgtgtacattttttattgtgtttctccccagctaccttccctctccccgccacacacatcctatttgcagagtgttgggggaggtggaactgtgatgtgggccctgctgtctagcagtctgcagtcacacacagccatccaaactacgagattgtatatgattcagtgccaaactgtgagctttggggaatccagaaagaaggatgaagcctttcccaagtttcctttagttaaatgtgccacttgaatcctgttctgactcctaggcacatgcaagagtcaatcacatatgttcctgtggcctttatcattttggtccatctcttgagcccacatgaatactgtcatggatggaggaggaaggaccaggctgggtcagggcctgaatgcaggttttgtttggactataggggctaagttcactttaataggctgtgacctattaaaggaggcaggaaccaagtttgcacagaaggaccatc

SEQ ID NO: 11899 - DNA, 284 bp, Homo sapiens
tcacgcctgtaatcccagcactttgggaggccagggcgggcagatcacaaggtcaggagatcgagaccatcctggctaacacggtgaaaacccgtctctactaaaaatacaaaaaattagccaggcatggcagcgggtacctgtagtcccagctattcaggaggctgaggcaggagaatggcgtgaacccaggaggcggagcttgcagtgagccgggatcgtgccactgcactctagcctgggcaacagagcaagactctgtctcaaaaaaaaaaaaaaaaaaa

SEQ ID NO: 11900 - DNA, 3359 bp, Homo sapiens
aggtggatggagtcagtcctcagttgcccctgctggccttcctggtgcttaccatcagcccaatctttgcacagtccttgttgttcttacttctctgcatgcattccttcagaagatcagtcatcaactttttcttaattcctctgtgacacacaatgggaattcaaaggaagagatcttaaaagtcacaacagttctttatcttaataatcccctccccattcaccttactacatgcagactcacctcacacccttacaacttgaagctgaaaatttaaaagtaatttccctttttgcagcttttcctcaggttaaggctttgatctgcctgagagtaactctaaaaggagggaagataaatatgggataaaatccacaaagtgtagcttctaattcctttggaagtttaaaaaatttccacatatctgatgcttcttttgtcaggtgcagaagcacaaaaacatattccgaagccaactgatagggaatttggggattattgtcagtttggagaatttgctgtgttatttcttcatttccatggatagctcatagttggctctttctgggtgagtaattatgtgtaatatagatcaaatcttttactaaggttacagctacatgttaggggaggctatgaaaatactatattattataatttcagtgcagtgattgttgtgagaaataactttcatggtaaccctaggaaaatgggcacctgccaccatcctgagaagtcctcacacaatgccctttctctcttacacacacacacacacacatacacacacacacacccccgtcactaattcatagagttccttagcaggcatagtcaaggatcctctgggtaatgtcagctgcttagtgataaaacagagccaaaactagtgcatcctgttgaaagtaatgcagaaacagtacctgggtccagatatgctttcctgcggcgctttcctctgttacctcgtttcatcctcacagcagcatggacggtaggtggggtcgcttctacaatcatttctgatgatagcttgggaatagagataggggcagtgacttgcctgatgtcgcacagccctctggctgtcctgctttcccatatggagcagtggtggtgtgggcacctgtgatgcaggagactttaaaaatgtcgtgaggtcacgtgctgcccctcctggtacgtgtggaatgcccctggccagcaaggggtgcttttttatcagagttggcagctggcatgtgggaaccgagcaagtgctgcgtaccaagttacttgttttaaggagaccaagtgctcagcgccaggtggttttcttttttgtcatagttacttgctataactcagcttgacttctgtcatgaatcagtgctctctgggaggatgcaatactctgtttgggcattaattggtagcaggttgtctcaaccaaaaagacaggaaacagcaaaagcctctctgaaattaagaggaaagttactctccccacacccatcagagtctttattggagccaccaggtgagctgtgcagcctggacaggcctgcagctataggccaccttcccagtttaggtcctcagcacaggggagcccaagtcactgggtgccttccgagggctgtcactgggcaggccatatacaagtcagtgtgtgcgtgggcactgcagtgtgtgcatgccgtaggtgttgatgggtgctaggaggggtgtcgtgtgcatgcgcgttgaagaggatctgtattgccgtgacctctgttcatggatgagtgcattgtaatttgttctcaggctgtgctgtgagggccgccttaacccttgctcccttcccttctagagctgccttaagttctccagaacttttcttctgtaaaggatatcttgcctggaagggatatcttgccctgtttctcaaggttttgtgagagttttgactggatgtggccctgcatgaccctccttctcctgtacttcctctttcctttccaaatgggaattagaactgtggggcagcaacagtctcagagccagtgagaggccagcttagagaatgcttctgagttagtgggactctgtgtcacaagtaagcaaatgaatatatgaaagaaattatggagataagttagattcttggtaatacttaaatgtcttgctttctactaaccttttgttactaaaggtaaagggtataactcaaactttttgtggacattcttttcaaaattttttaagaaccctgtactataaaaggttgagtaaaaacaggaaagcgtgctataagttcaaatctgttgtattaccctaaattagataaaccaacctgaattatagtagatttctcaatagatgaggaactgaaaaatactatgtaaaatatcttccaaaatgctttttatactttttttatttgtaatttggtctatctaaaatgttcgttagcttaacttaatgggcgttattggattcatatgactaacgtttcctcagtattgtaatgcttgaaatatttgaaagaaaaaatgttgttttttagttgaaactggtatatataattcagtgcttggcaggttagtatatttttatgcatttttcagagtcagcagtttcaaatcttattgttatcatgttataaaattttagcccacatttcaggctccgtaaatcatttgagccattattttttcccaacaaatggtgaattttttctttaaatgtggatatatatgttgtaatttatgattcctggttatgtatttttgtgggatcctgcagtaaaattgacttttttgtgtctttgggagatttaaattgcgctaacagtgttgcgcaaaaatgagttcatgccatttaacatattgtattttaattattaactgtattaatttactatgaaatggacatccttttaactaaaatggaattgaacattgcagttttcaaatatttttccttgttgggtctggaaaaggaattctactttgatctgcatagaaaattttgatacaattttttgaaagttcttaggtgaaacatttacccattaaaaaggaagcagaaatactgagacatgaaaggcattatcaactaactctagactctagaacccattctagcatatctcacgtgcaatttttaaaaataagttaataattcatctcatatcaacaaaagcctttgaaacatgggttttcactagatatcacctagtgctaagataaaaaccaaaacaatatcagaattacatttatgctctaaatttgtagttgtccattgttgtgcttagtaaatgtgtgtcattaatgctgtattctcctagctattatggaaacttgtttaaataaagatatggatataaaga

SEQ ID NO: 11901 - DNA, 52778 bp, Homo sapiens
  SITE (14610): n equals a,t,g, or c
  SITE (14765): n equals a,t,g, or c
  SITE (14785): n equals a,t,g, or c
  SITE (14816): n equals a,t,g, or c
  SITE (15045): n equals a,t,g, or c
  SITE (15046): n equals a,t,g, or c
  SITE (15047): n equals a,t,g, or c
  SITE (15048): n equals a,t,g, or c
  SITE (15464): n equals a,t,g, or c
  SITE (27637): n equals a,t,g, or c
  SITE (27641): n equals a,t,g, or c
  SITE (27720): n equals a,t,g, or c
  SITE (27739): n equals a,t,g, or c
  SITE (27750): n equals a,t,g, or c
  SITE (27751): n equals a,t,g, or c
  SITE (27760): n equals a,t,g, or c
  SITE (27761): n equals a,t,g, or c
  SITE (27790): n equals a,t,g, or c
  SITE (27791): n equals a,t,g, or c
  SITE (27801): n equals a,t,g, or c
  SITE (27802): n equals a,t,g, or c
  SITE (27825): n equals a,t,g, or c
  SITE (27881): n equals a,t,g, or c
  SITE (27898): n equals a,t,g, or c
  SITE (49133): n equals a,t,g, or c
  SITE (49143): n equals a,t,g, or c
  SITE (49183): n equals a,t,g, or c
  SITE (49259): n equals a,t,g, or c
  SITE (51962): n equals a,t,g, or c
  SITE (52734): n equals a,t,g, or c
aggatggagagctgtggctggtttatgaagggttaaaacaagccaacaggttatatttgtctcctcaaaatggaatgttattaatttgttgtttttcttactaacagtgacctcctgactttcacccctgtatttcttgtgcattgattgtcttcttgggtaaattagtgttagtaattgtgttatttgttcaaagcttttcagtaaaactgagaacattcagccaaacaccttttttttttttcttttttagacggagtctcactctgttgcctaggctggagtgcagtggtgcgatctcagctcactgcaacctctgcctcctgggttcaagcaattgtcctgcctcagcctcctgagtagctgggattacaggcgtgcaccaacatgcctgactaattttctgtatttttagtagagacggggtttcaccatgttggccaggctggtctcgaactcctgacctcaggtgatgcgcccacctgagcctctcaaagtattgggattacaggcgtcagccaccacacccggtccaaacaccttctttaaaaaccttcactacaagatactattaaagctaaaattgaatggtggtgaatataagacacttcccttcagacactaaaatttgtgaatctctctctcccaggagttaaaagaaaaacataatctttcaattagggcacaaactattgggggagagattaagatttattactgagacagtggcttctcatatcctatagatagatctacaggatatatgtgtctatggcaatgtggctacatttttcttttcttttttttgacacagggtcttgctctgtcacccaggcttgagtgcagtagcatgatcacggcttaattcagccttgacctcctgggctcaaacgatcctcctgcctcagcctcctgagtaactgggactgtcacaagcatgtgccaccacactcagctaatttttttattttttgtagagacagggtttcacttggttgcccaggctggtgtcaaactcctgggctcaaacaatcctgcctcggcctcccaaagtgttgggattacagatttgaggtactgcgcccagcctaccttcttatatattattatcatgctgtctaaaagcaagatgaaatgcatgatttggcactctgtgtggttattatgaaattcacatttgtgaaacagcaaatcaggagagttttctgcattgctatagctcagaataattacccaaattcaacccgttaaatatgttcagaggagagaaaataaaattgaaacagcagcacctttctaacacagacattcatctgctctagtgatatttgtctttaaaatctcattaaaattctattttagtgattaaatttttaaaacactcaaatgtttgttcaaggggcttctgcttattctgctttgttctcatcattaacgcttgtcattaactttggggtgttattgctgcagatctttttgaaatgttttaatcactaaatatttttagtccactgttaacagtttgcttgcaatggcatcattaagttttacccagcagttggcaaccaagggactggaataaaagaatgtcttttctttcttcacattagttagttcttaaccataactttgcatttggaagagagtgactgtagaagcaggggtgcgtggcaaagggaggatgctctgactctggtgttctcactgccaatgcctggtctgctctgtgggcacagctggctgtatgtttgcttggaaaagcaataaccacttttttggtcctattaatatttgtgttctaaaaccacatcttgttaggattctgtttctgatatgtaagtttatgcggagagagaagatgacagatctaaaatatatataggaaatttcagaactatttgtgtggattcgggtaaatctgtatatataaggctggagtggtgttccagcctttctgtctttcagaataggagtagaatataattccctctgcctggaattagtaactgtagttctgaaggcacatttagttaatttggaagtttataatgttggcctttatagtgcagagttgttttgtggcaaaggtgtactgtctttgccaatttaaatgctaatttataaatgcaaatgcaaggcaaattaaagctgtttttttcaattgatttttttttttacatcctcatttcctatgaccctctttttttttttttgagacgaagttttgctcttgtttgttgcccaggctggagtgcaatggtgcaatctcagctcactgcaacctttgcctcctgggttcaaccagttctcctgcctcagcctcctgagtagctgggacaaaaggcatgccccaacacgcctgactaattttttgtatttttagtagagatggggtttcgctatgttggccaggctggtcttaaactcctcatctcaggtgatccgcctgcctcagcctcccaaagtgctgagattacaggcgtgagccaccacacccggcctcctatgaacctttcaagagaactaaaactctcctgtttcttagggcctctgagaactttatataatgcagaaagacacaaatgtgagagcacccgtttctatttctgcttcttgttttagtttcttgactttaatcaagtcagaagataacacagatactaaagaatatctgcttttcctactcttgcaagtgaacacgatgccttacacccgttaggcagcaactcggggtgtcgtctccccttccgacccatgtgtcctctccgcaggctcctggaatcccagctgcagtcacagaagaggagccatgagaatgaggccgaggccctccgtggggagatccagagcctgaaggaggagaacaaccgacagcagcagctgctggcccagaacctgcagctgcccccagaggcccgcattgaggccagcctgcagcacgagatcacccggctgaccaacgaaaacttggtaaggagagctgccgggtccacatgcttcttaacctagcctgcccgacagtctagtttctttttgatcaaacacgggtttttcttgctgggaaaaactcacccctctgtacttgttacccctcttactccagcagagacagagtaaggaaaatacaaatattttggtaggaaggaagaaggcacaggttctctttatcacggagggctgcgtgctcttagacctgccctggaggcagacaaccacctgggtgcaggctgggcttttgatggcaggtgatctgcttcctccatttcagctgcagatcctctgccatcctaggtttattatgtgattgtcacaactgagactggggacaggcttcctttacctttggtccccaagcagccactgaggccatcccaggctccacctctagcagacaagtagggttagagttgaggttgagaaaggcggttggcaaaactaagccggggtttttggttgatgttggatggagctcccaggtcagggaggtgtgtgttaggattcaggtttacatattttctgttcttttaaacagaacttgtataacaagtgaggaaattgtctttttccttgtcagattctaaaccctggcatggagtctgactgttttcttttcttttttttgccttgttcctttttttttttcttttgccaaaaaaattttctaaaatatttctcagtcacataataacttttattactgatttacagttttttgacaaatatatttactatattaaaaatccttaaaaagtgataatttcatatttctatataaagtctatattgtagtgctagcccgattttgagaaaaattgtttaggattggtggtgatttgtgtcttttttaaattaacatttttaatgacctataataaaatagtatgaattttctctgaagatttaacaatctgaattatccctccattactccatttgtgataatttacattacaaacagttttctagtgtcatttattcaaccatcttttatatgaattagaagcaaaacgcaaaggtattctttttcacagtctgtctgtatgaggctccaccatgggaatgagggaggagggtgggggcagtgtgtgggctctttccaaagtgattgacatctcactaatttgtggggaaaattttctgaatcatgaaatattttttgaagtgttattttacaaagctcaagtatactgttgcttaaattaaactaacaatgctttgatgactaagtattaccaaatatactgaataatataataagttgattgattggcatacaagttctgtgctttaaattattgttttaaaatacaaggtgaaatcgtgaaataaagatgcttctgggtggcagatttccagggttttttcactaagttggtcagacatttctcttgcaaccttgtttgcaatattaatttttttggcaatttttcatagctaatacaaaaaatagactaagcccctatattctaagctaatagagcccagttaatgaatttgagtttggggaaaaccttttgtaggtcagctgcttctcctgccatcacactgactactaattcaggaggatggattcaaacataagtacaggaaatgatagactttttcaaaatcattgttttctcaatcttaattgtgcatttctataagaaacacttgagtaggatattaaagcccagcaggagacctgggcttagtgctcttgaaactctaccttgcccacctacctaccaccaacacaaaacacaaaaatgatttttctacctcatctagtgaacaggcttcacaggcctcccccgtgctgtctttcagcgaaggaagatgcacagcttcccaccagcctctccagcttcacaagctaacattgctattattctcacttttattatatttacctcccctattcttgccactgctgctggcggcaaaaaaaaaaaaaaaaagtgagcaagttgtgagcatcatgtgttggggaggctgggagtaaaaaggcaggatgttgtaggaggccaatgacagccttatctgggcctgctaagagatggcatcctggccacagcctctttcctttgttcacacaagaaacatctgtacatatgtaattagaataatctatactagaaagataaaagggtaatggaaggtgacaaatcagagcctttcaagtatatatagtttcactatttgtattttaaaatattttaaaattgattttgctgaaagatagcatttccctcaaacacacagacaaaaacaaatatccattgtgcctgttttttcagtattttgaggaattatatgcagatgaccctaagaagtatcaatcatatcggatttccctttacaaacggatgattgtatgtaaaaccatagtgcttttctgctgtcttcccttgctacttatagccctctgtaactgaagagcacactgctgcctgccccctcccaggaagtctcttcaaaattttcacgaaacctgtttctccccacagctgtcttttagccagtggtgtcacctctgtcagtgtcctgagtccattgtcacgtttggtttgttattaacactaggcttacagtgtgatggaagcaaaatgtgatttgaaaggtcacgtaaaatccaagaagtacaacttaacactttgaagagatagcaactgttccctttaatggttggcctagtagctaaatctactcctgtctaaactggaaaatgaatatttgtatttggaatgcctttcttctccataacctgaataacagaccacacacattgctgactcatagcccttctaagctgttactgagcctactgttgtccactttctttttgattgagtttttaaccatgtctgtcatttgagcaaattctttattaaatagccaataatcatggacttttttttaccttcctccttaagtgtactgcttttgtttctgtttttgcataaagcattcataaatacccctttcttctgtataagcaaaattatatcacctgcaagattttatagatgccttatgccacttgccactttggtcctaggtaagcagaccactctttatcctgttctttgtgattatttttttcaacttatcttttaattcccaaaacttctgaactattcttaagtttcagggctaattttagaatttcatagggtggctctcatagagacagtgcttcacacatggggagtgtcagttcctacctaagttcaaccattctttccacaaacctttttgtgcattcatcaaaatttatttttgcctagtcagtcctcctttaaaagaaagcattctactggaataccaatacattctacaaagcattcagttgattttcccacatggagtctactggaaagactctgcagtgagcctgctgtccatcacgctgtaaaggagtttactgcgttgtatattttaacatatggcttttattgtagctgcatttcccatgcctgccaattttagccaggtggtggctccaccaatgagctcttatgtaaaactaacgtgttgtttctgtgatattgtgtctattttcctttgatgcattttagaaggcctgtttcgatttttctaatatatttctctttttgatctttaggatttgatggaacaacttgaaaaacaggataagacggtccgtaaactgaaaaaacaactgaaagtatttgccaaaaaaattggcgaactagaaggtatttaaacctttttttcaagacggtcactgagtcttggtttgagtcttggcttaaagactaggctatataagtggcctaatagaggtttgcatgcaaatattagggataataacaaaatatgacttttggcaaacctaacctcttttgagtagaaatttacatttttaaatgaggaaaaatgttcttttcatgggtagtaataatttacagattttactctgtaagcatctaatgaatatcttctatatgccagacaatgtgctaggcagtatagcataggagttaagaatgtggattctggagtcaagcttcttgggttcaaatcttagctcttctacttattaatcatatgatattgggcaagtttctgaacctctgtatgcctgtgctttcccatctgttaaattagaaagataatagcatctatctgacatggtttataaggattgaatgagctattaggttggtccaaaggcaattacttttaatggcaggaactgcaaatgcctttgcatcaacctaataagtatattacacttagaaaagttactgacgcatagtaaaaatgcttcatgcgacttagttattagtcactatcattattcttagtattagggatactaagatgagtatgatagagtctgtcctcaaagaacttacagtctaatggaggaaaaatagagaagtaaaaaagaaaaatatgaattatgatgataaagaaataagatttttaaaaacatctcatgatttctatatgatgatgatgaaaaaattccttgagaaataaccaaatatcagttgttgttattatttatatacaaatggatcttatcttttctattagtgtgtttatgtgtttatttgttaagagttataggtacagggatctagcagtgaacaaggctaaagccaaactcctttttttttttttttttttttttttggagacagagtcttgctctgtcgctgaggctggagtgcagtggtgcaatctcggctcactgcaacctctgcttcccgggttcaagcaattctcctgcctcagcctcctgagtagctgggattacaggtgcatgccaccatgtccagctaatttttgtatttttagtagagacggggtttcaccatgttggccaggctgatctcgaactcctgagctcgtgatccatctgcctcagcctcccaaagtgctgggtataggcgtgagccaccgcttccagcctaaagccaaattttaagcttatttcaatgttctcactgcttaagggattttgagacagtctttggaatagccttcaaacctgtgtgaacggttaatcattttctctcattgtcattctgcatctaattcttgcttggttcaaacagtgaagattccccatcactgaggatgttcaaaagaatctatcatgattaactccaagtgtggttttcattcctccaacatgccaggtcttgtcataactgctccttctgtttggtcatcctgcttctcctggttaagtcctgctcagcctttgagaccagagtcatatgtcacatcctcaagagtagcctttcctgattacccagacagacgttatggttctgctctctgtgtaccacaatttggccgacatcttttatggtcttcactatgtcatatttttagcatttttctgttaaattactggctccataaagactctgagcttctgacatagaaaacattctgttccctttgctttcacagcacctagcatagtgtctgacctaatctataatcattccataaatgtttgttgagtgaatgagtaagtttcagaaatatttataacatggcaacatggacatttactttgtaaaggatattactctgttggatgtacaaatactgaaatatttgtttagaaatcagaaagattattttatagtcacactttatatataatcctttagcattacatgagtcatatattacattaaaatttgagcctccacatcacacactcacacacacatgagctataatgtctattagcagaacttaaaaatctttattcagagaactttttgcactttgcaccaattatatcatgagatgataatcagacagcagagtatttgtttgaaaaaaacagattttaagtgtattaacatgtgagattctttttttgttcaactcctaatgattcctttgccatactttagtaaattttgataaacagaaaagccattcattattttacataatttttattagttttctttgatatgtatattttttagttgaagagatgggttagactattttaagatattactaatcttaagccattgtcaatcagaaatcaacctcatcatttaaactatccagacagctgtaaagccataagtagcatttgagaatagcaattcatagatcaaacaaaaaaggcattataatagttcttaagaagagttacattttgagttaagtgatacatatctagaggatgaaatgaaatagatttatgtgacttgggcacttgctgagtgcagtgtacctgcttctaccccaaataaagagaatcaaggtgacacttttcatcctcgtatctgcctgttacacagaaaatacaggcaccttctaataactaaacgttgtcttatacttttctttaaatgtattgcaacacacttaaatccttttggtttaaaatagcacaactcttgcctcctcctacaagctacatttaattaaggaggctttttaaaaagccaacagacttttaaaaaaaatgctagcatatataatttttggcagaaactatatagctaaatggagagtgtttcaaaatttgatctgctttgtgctatattttcacccatcttaattttcatggaatcaagaaattaagacctgaaaggattctagaaatcaattagttatttcataagaggaaaaaactaaggcctgtaagtgacccatggttgcagcaggtgagatggcaggactagaacacataccttctaagggccactgatttctctcctttgtgtcaaattttcccacagaaatcttctacttattaggaattcatctgattgtctcaaacttgagatcaagatcttcctggtgccaaaagtaaatttttttaaaactttccaattttctttcctttttgaagacagaaaggttccctcaagtttataaagaatctagaaaatgaaactagagtcttttttcaggtcttcctagaagaatggatcattgggctcctcagtccctttgtgctgctataacaaagtacttgagactgggtgatttataaagaacagaaatttatttctcacagttctgaagggtcaagacactggcaagttcagagggtctggtttctgcttccgagatggcaggtgccttgttgctggatcctctgaaggggacgaactctgtgttcttacatggcagaaggtggaagggcaaaaggcttagctagttgcctctttatttatttatttattgagatggagtttggctttcatcactcaggctgcagtgcagtggcgtgatctcggctcactgcaacctctgcctcccaggttcaagcgattctcctgcctcagcctcccaagtagctgggattacaggcatgtaccaccatgcccggctaattttttgtatttttagtagagatggggtttctccatgttggtcagggtggtcttgaactcctgaactcaggtgatctgcctgccttggcctcccaaagtgctctgattataggtgtgagtcactgtgcccggccaacattttattttaattagtagataatattgcaaaatcaatcaaggttatgttgaactgacatctaaatttcatttgtgagctttgcaaagacttaagtccctagggagaattcagaggcagagagaaagtttttagtgagagtatggcacattctatctgacatttttatacagtaccaaaaatatcctggttagagattttgcaaaaggaaggtgaagcttccttttaaaacataaactttcttagtaaaaatatccattgtatttcacaaattctgagatgcagtgtttcccatttcaacatctctgaaattggggtgtatcttacaattgttgatgggttatagtttagttggcaatttttttagtgttacataaaatactgtatttcataaccgatagcatcatagatttgataaatcagtgggtttaaaatatgctctttgggttacatggagtccaaatatgtgcatttattgataaacctagtatgttgaacttgttttctcccagtttccccttttggaattgtacatgcggcttaaaagttactagtggcatagatggcaggggttttataattttgttttttacatgcagctgcaggtttatgatctgtagaggccactgtgtgctgcttcagaggtccttgtggtgttgtgtttaaactgacaccagaaattatgtaaaaccaaacagtttgagtctccttttctcttgcatggaagaatatactttagagttagtcccgtggctttcatactggatcatgcatatgaaaaactagattatgggagatggccgtagccctgatctgtccaatcacaatctgaccactctttagatatcatagtgttgctggatggtggtgacttcacctaaaccagattttcagcgctgatagtcccagtgtgtgctgctgcagcatgaggtggacggtgtgtcaccaggctccatgccacataagcaagagcactggcaggtactgatgttctctgtgataacctcttcctgtgggactggcttctcagaactaacccaggaaattacccagagtgacacaagaagcactactgacacctcgtggagtcagcaatattaagctttctaatgtttttgcatctgatctgcattttgtttgacagcaatctcagaactcaaacttaatctgcccttaaacaaatctcttaaccactctccctccctgtagataaaaggataaaaaacctggttactagcgtgtatctccacagtggctgtggtaactcatatgtccctttactttttgttggatttcccactcaagtctcaattttgagatgaaattggagacttttttttttaacctttagcataattctctagctgctgcccttgacaatagtgactatttttaacatctgaaagcattgtaaaccagtggttgtacttcattgattgcaactttataagtagaatttttaacattatattaaaaagaaataaaaaataataacatttaggaaatcatactacatagagatagtttatctgttcatgatttctctgggaatgaggatggcaggagaaaattaggtctttgccatatgaggcctttgtgaaaaataatacattttggaccaagtggtatgaagaaacactcttctaccagctatctgtatgtgttttgaattgattgtaatgatacatttaaagtaaatgttcttttgcttttaatggctaaagtcattgagccaagagcaagggggaattgtttctgctccttctgcccctttgtaggatattgattgttcctcctgtgaattaaagtcaaaatatgtttaaccatttctgattagtatcaattaattaacaaatctgttaaaccacttactttttggacatttaatcttattaaaaagtaagccttattacataaaaaaaagttttgagtcatgtaaggttatttgatgttaatttacagttaggcaggagtggctttcagagtaagatgaccatataattttgccatctgttcacccaattttaacagaaaaaaattattttaagagaaggcaattaagtggcaaatatggcaagtttcggttgttgtagaatgcattcaaaattataggaacttggagacctctcatgttttttatatggaaaacattttctcctcctttcttacttctcataaagtgggccagatggagaacatatccccaggacagatcattgatgaacccatccgaccagtcaacattcccaggaaagaaaaggatttccaagggatgctggaatacaagaaggaggatgagcaaaaacttgttaagaacctgattctgggcaagtattttctgcattggataaaagttccttctggcacatgggttaatggtgggaaaaactagtcactaatttttgagatattcagcgtaggtttcattagtcatcatcagataccatgtattctagtgctgcagtagtgttctgaccacaccaagcactttcagtccaactgcagggacacatgcctcagacccacctacaaggattgctcaagatcaggtcttctcagccctggctgcacattagaatcacctggaagctttgaaccatactgatgtatctctctccctcttgcccagttaaatcaaaatctctagagagaagagcctggcaatgtctagtactttaaaaaaaaaaaaaagaaaaagaaaaaaccctcaaggccagcctcgggaaaatagcaagaccgcatctctccaaaaaaaaaaaaaaaaaaaaaaaaaattacccaggcgaggtggtacatgcctgtagtcctagctgctcaaaaggctgagatgggaggatcatgtaagcccaggagttcaagactacagtgagctgtgattataccactgcactccaccctgggctacacagcaagagtctttctcaaaaataataaaaagcttcttaagggattctcaagtgtaaccacagttgagcacaactgctctaggccgtttaggttcctgaatttcagtttttccttactcccctagaaaggtttgcaactaaataggtcaaggacggcagtgtaataatagggaagaaacaaaaaaaggaaaagattctaacaaaggaaggaatggacagaataaatgagatgagagtggaagaagcatttcagggcagcacactgcctttaagattgggtctgagcctgctggctttgcaagaaaactttttagagggtggtggtaaatgattagagtgtacacaccgtaagttgtgaagtgaaaatcctaaaaacctctcctttcagcctttgcacagcattcctcccgccaggtgccagggtgacagcagtgtgattggcacttatacctgatggaatgttcctggcattaaacttagtactatatatagttgcacaggtgcttaagtttcaacatgaatttcatttagcaaaaatgttaaggagccactggtttttaagcatagaattaacagatttatcaattcagcaaagaattaacagatttatcaattcagcaaatgtttaatgaactcttatcatgtgccaagcattttctaggtaatgagcaaagtgaagtacccagtcttacagagtttacattccaggggagaaataaagaaaataaaataaacaaatatatgatggagtaaaaagaataaagagtgaaggcaggtatactggtttgtgtaaaattgtcaggaaacactctttggtaaggtgatctttggacagacaccaaaggaagtaagctaacaagtcatgctaatatctgaggaaagaacattcaaggcagaaaaacagtaagcacgtaggcccagggcagggagcatacctggcatgtttaaccaacagcaaggagacccatttggagcagagtgagctggagtggggaaggggaatagggccagatcctatgctatggtgaggattttggcttttataaatgcttgacatggaggaagaccactccccattaattgcttcttcccccgccgcgcgggaggggtggttttaataaaaaaatacacacacccccccccacctattgtgggggtgtggtgaggaaaaaaaaaaaataaaataagcggcgcgggcgcggggggtttctttttttttttgttgttnaagataaatgtgggggcggcccccccccccctctgtgggggagaagggtggttgtttttttttggcgcgaccccccacccccacgaagaggagggggttttacccaccccctctcctgttttgttttttatttttcgggagaagaaaaaatattnttttgtgggggggcgcggcncaacaaacaaccgtgtgttggggggcccctntttgtctgccctcccccggggggggggcggggagggggaggaaaaatctctggcgggggggcgttgttttttttctcccccccccccccgcgggagggggacccccccttttttttaaaccccaaccctcctccctgatttgggagaacgcggcaaatttggcccccaattccccaaacctttaggggggggggttttttggggttttttaataaaaggggttcccccnnnnaaaatttttttgtttttttttaaaaaagggagttttttttcctttttttggggccaacccaaaatttctccccacgattcggaagagtgaccatgatctgtacctaacatttttccgaagagtaatggccactgattgttgtatggaaaatgcagtactggggagcaagagatgaattagggaggccagttagggagctattgcagcagcccagcaggagatgatggtggcctccatgggacatctgtagctggtagaagcagtgagaagtagctggattttggatgtattttgtagatagagccaacagggtttgttgatggattggatatgtggtatgagaaaagaaaggagtcaaaaatgaggaccccccctgtaaaaaagatactggaagactagacctgctatttatttantaagatgggaacaacttccaaaaaagtaggttccttagagaagcaagaatttggtttgggagaggcttagtttcatgtgcctgagcagagttgtcaagaaggtagttgatagtgagactggaattcaagggaaaagtcagcgcaggagatatcagtttgggagttgtcattatatggacatgctccacattccagaatttttctacttaaagagctattaaaatacactttttatattacctacttaccttgaatgattgaactcttacatgacaactgtgtttttatatctcacaatgcatgcctcgtgaaaattttccatgttatataaaattattattttttcttttttagaactgaagccacgtggtgtagcagtcaatttgattccaggattaccggcatatatcctgttcatgtgtgttcgacatgctgactacctgaatgatgatcagaaagtaaggtcgttgctaacatcaacaattaacagcatcaaaaaagtattgaaggtcagttcctgttcaacaaaattctcatcatgaattgttaatgatgacagaatctgcactgattgatcttccttccttagagtttagctaagttgcttgttattaaaactttccaatttttatttacttacctatctattttgagacagggttttgctgtgtcacctaggctgaagtacagtagtgcaatctcagctgactgcagccccagtgcaatcccaggctcaagcaatcctctcagctcagcctcccaagtatctgagcccacagttgcacaccaccatgcccagctaattttttatgttttgtagagacagggtctcactatgttgcccaggctggtctccagttcctaggctcaagtgatcctcccccttcaacttcccaaaatactgagattacaggtgtgagccactgcacccagccactcagtcttgagtgaaaacttccactggaagaaacattcttccttgaacatgtctatctggcttctttcaaaacagggctcaagttgaacagtaatcaaaattaacttgacataactgcattttaattgtgcagtaaactaactttattcatggacagatatagtttgaggttttacttagaactaaacaatatttagtagagttcatatatacagggaacgtgatgctgaaattaaaatagatgttaaataagtttaagatatggctcattcatataaaaagatgtctgataaaacattacaatttttcttccaactttttctccacctcaccccataattttccctgttacctaaaatgcctggttccatgtgggaagcaacacacagatgctaatcagagaggaaagacttggaaaagacagccaagttatataactgagcagaaagcctacacaactcagtagtcactgagtcatcttgcataatccccctcttgactccagagaaacagtgagcacaggcttagttttaactcagtgttgctgtgaggagctaagatcatatgttccaggtactttgctttcggattatcaaacttaacgagagcttttagggtaaagataagtggatagtcaacatgccagtggactctttcaaatctaagacttcttttatgaacttaaaaaaaaattaggtaaaacatacataacataaaatttgccatattcaccatttttaagtgtacagttacgtggcattaagtgtgttcacattgttgcacagccatcaccatcatccatctccagagctttttcattctccccaactgaaacacagtacccattaaacactaactccccattcctccctccctcagccctggggagcgaacttttgataaatgctggttctctgttggtccctattgtgcaggtactttctgtagttaacattctacagtggttactaaagcatggagtttctaaagatttaacatttaaaaattgatgaatgtcttcccaacataattcattttatttttagtgtgttgatgcaatattgtacttagataaactataagttttgctacttcttaggccaactcctagagagagaaaaaactaaatcataaagttttctttctctcataataattgcaagaagatacttatctggtttgactattgtaccaaattctgtaaagattaaaaatgatgggcactagaactcatcactctttaattccatttaaaattaatgtgcttttgtctcaaaagcagaatttgaatcgtatgtttgtgcaggaaaaaagtatctagtttgtcagatcatttaatgccaaagtacggtgaatcgttgtgcgactcagcgttgcttactctctgggatagagtcggaactaacaaggatgtatttattttgatcaaatacagcttgcgtattgcaagaaactactacttggggaagctcaatgtagtaacctcttaggtaaagagatggcattctatgtcaattgtgtttcaatcgccaaagaagcaaatgttcttttattttgaagtaatatagagtatctcattttcatgtggacagaggatacccttagtgttcaaattgtatttgttgagttattttgtttaaaagtgggctgggtgctgtggctcacacctgtaatcccagcactttgggaggcagaggtgggaggattgcttgagcccaggagtttgagaccaaccctgacaacattgcgagaccctgtctctataaaacataaaaaaattagccaagcatggtggcatgttcctttagtcccagctacttgggaaggtgaggtaggaggatcgctcgagcctgtgaggtcaaagctgcagtgagccatgatcacgccactgcactccagcctgggcaagagtctctgtctcaaaaaaaaaaaaaaaaagtggggggcttagcaaagcctagagcccactaatgaaaacagatgctggattatttctagaatgaagtcttctccttaggttttaatcacctttatctggtaactcttcagtataggtgccgttacatccagctgggactattctgaggatctctgcagtttgacttgtgtagacgtcagtgaagacagtctagattggtgctttagtgacactctcccatagcccgacagtgaccagcacagtttcccaatctgcattcattgtctttgtcagcttagcccagagcatccactaggaacagttgtaatccagatttttggaagaggcagagttatttttagtcaaatctacacttaagctataggatgattttctgtgtttgggaaagtaataaaattgtatttactggcagtaaataatttatttaatttattttattcacaatcctcctacattggaagactatatacctaggtctttcagatatttacttagtggtaaagtcaggacctgaactcagtaattctgtctcagctgaaaagacttagttaggtttgatatcctctaggattttttttcttaaagtctttttaggggaatattctacaaaatttaagggcgttttgtactttcttaaaaaggtgattttatttacttaaaaaaaaatgatataatgagaaacccatctttccccatgatatatcctgtgcacttttactgcataaagccgctactaagaaaccaaaggcagatattctcatacagcttctaagaacctggattttgttgtgatatagtagtagagttattggaataaatgatttcatgcaaaaaaaaattagcttctaagaccatttgatggtaggcatccttccataggtaacttattgtggttttccttgcaaaggttttctgagaaaaagtgcaggcaaacattgatatttttgtgacttcccatatacaaactgggattagttcatccaaatggtttagtttacaaatgcatagtccttccaagtatgtctgccatgaagcccctgggaagtattcccagccctcacatctttttcaggcacaatgagtctctcttcttcctgccacggtggcccagtcctggtgaagagccaaccagctttcccctgactgtactgcccagctcaggacttccttcttctcatttctggattcacagctcagaaattttatcttacccttaacaagatttttaatctagtctgggtttaagtgcttcaaattctttttcatattctttatcacaatatttgttattcctctttctgcttttagttctgattcccatcattaaccccacgggggacatgaatttgggctagctgtagctgggtgatttttttttttttttttttttttttttttttttttttgagacagagtctcgttctgtctctaggctggagtgcagtggtgcaatcctggctcactacaatctccgcctcctggatttaagtgattctcctacctcagcatcccaagttgctgggattacaggcatatgccaccacacccagctaatttttgtatttttagtagagacggggtttcgccatgttggccaggctggtctccaactcctgaccccaggcaatccatctgcctcggcctcccaaagtgctgggattacaggtgtgagccaccgcgcccagccgggtgaatttttttctgcttaaaggagcagctaaattcgcatcagtttaattttctatgccaaaaaagtgaatggcaagcaaagcaacaaactgatgaacctggtcgctgacattctgctagcaatgacataagacttcacaactgtaatgtgatttatttttataattgtttataatggtaactgaaagaaatgggtcttttggtatctgttcaattttttttaggttgttatttccctaaggaaaaggcaagtttagacttattctctctttcagaaaagaggtgatgattttgaaaccgtctccttctggctctctaacacatgccgatttttgcactgcttgaaacagtacagtggagaagaggtgagaaaaccttgattacaaaaccagcatgctatactttctctgacctttttaaggaaaaaatgtaaaagcacaaaatgtttaaccatttatttaggaacccaaattcagaggtggcttggaagttcttgctttgtttgatgttcactatctatgaagcagtgatttggagaatgacagtttcttctttacattgtgagaaagcatagagaaaaataaaataagcattggtcagtgaatagttaccagaagtaaaactttttgtcagtatgttttagtgggcatttcaagagctaatatcagaatagtgaactatttaaagaaattaatcaattttggcttgccacaatacattaaaaggtgatcaaaaatcggggggagggatggcattgggagatatacctaatgttaaatgatgagttaatggatgcagcacaccaacatggcacatgtatgcatatgtaactaacctgcacattgtgcacatgtaccctaaaacttaaagtttaaaaaaaaaaaagaaaattttaatattaatactcttggacaataagaggaccttaaaatcctttaactctaaaaaaaaaaagggtgatcaaaaatcatgtctttcgatttgtccaaaaaaactctagtgtttttgtatgtagagacatgacctctcaaggaaaaaggtgaccaaaaatcatgtctttcgatttgcccaaaaaaactctattgtttttgttagaggggatatgttcattagctgtttgactgacttcaaatatttcaaaactatgtagaattttaataatgactattaagggctgctttagtatgtgtcaaacagcacttactgtatatggagttatttatgaacattaattcttacagcatctctgtgaggtaggaattatagtccagttttacagatgaggaagccaaggctcactggggctcattgatttacccaagttctcttggccacaaggagcagagctgggatcctgggtctggcaccgctgagggcccatgaccctagccaactgccctccatgcctcccatccctttgccaagagggcagcagagaaggtgcccagcggcacttactgagcactgacaggcagatgatgggaaacacagagatgagcaaggcctagtccctgagaagatggggccaacagaccagaatccctcagaggggtcgttgactgcatcctatcagtccccactttcggaccagtcattaagtaggtggtaaggaggcagatgcttggctgtagggagaatcctcagagtaagcacttgcctttatcacgtagcatcaggcaaacaacgtgttaaactgcaaagtgactggaagaagtgccgcccattcagttccattttaacagataccaccaaagattcccttctaacctctgactgaaaaccatggtgtgggtactacgaaatagagtaaagagaactttttgtatgtattcactagtctctgtagaaatcggtctatttcaagattatatatgtcctttgggtgtagtttttaagaataggactataaagaactgaagttaagagataatttagataatttagtgtttgacagtaaacctgctgtttcagaagtgaaacactctattttttttttttttttttttttttagttaagttcctccaatttgcttcattgacattgctattgggaagacttaaatgctaggttgccaagttaaggtattgttcaaaagctagtaagaactggagggggttatgatggaagcaaacaaacacacatcagcatttgagaatgtcagtcctggcattagtggggaagctccttggacagagcagaaaagagcatgaagatgctgatcaaattggagatagttaaactgaagagacaggttacttcatgtgtatcattaactttgccttatgactctagggctttatgaagcacaacacatctcgccagaatgaacactgcctcaccaattttgacctggctgagtatcggcaggtgctgagtgacttggccattcagatctaccagcagctcgtgcgggtgttagagaacatccttcagccaatgattggtaaggccagggccccactgggcattgcagcctgcctatcattcatgcccatcgataagtagccaccagtggcacatgtttcagggcaggtattcatttggggagcataaagtagtaagatacagggctaaaattagccgaggaatcccagaaacccagccatagttaactgggatacatcgaaatcactgtttccacaagactgaaacagtagtatatggtttccttccctaatgtttactgtttaaattcagttgaatgcattgaattttaaaaaattgtcttaagttaccaaacattgttatcttccagcaaattatcagcaggctcccttttttttttttttgagacagagtctcgctctgtcgcccaggctggagtgcagtggcgcgatctcagctcactgcaagctctgcctcccgggttcacgccattctcctgcctcagcctcccgtgtagctgggactacaggtgcctgccaccacgcccagttaattttttgcatttttagtagagacggggtttcaccgtgttagccaggatggtctcaatctcctgaccttgtgagccactcacctcggcctcccaaagtgctgggattacaggtgtgagcccctgcacccagcctatcagcaggctcttaaggctacttccagctacactttctttccccatgcatgcattttccatgtttccacaacttcttcatttcccttctgtgggctcatagtgttccctttgctttcataggccacagttaactagctatttgagacatcaaaagctgaagaagccatgggagatggcaatgttttcttcagatgtcccttaaaacgtcattaaagcaccctaggttggcaaaaatttaggaggtaacacagataccaaggtcaacttcagccagtttttctattgctttgcctgtttctattggctgaataagaagttcgcctcaaagaagccccaatctaaatccttacccccatctcccagtcatttaacagcaacaacaaacatgccggttctagggaatctgtgtttagcacaattaaatagcaagatgaaccagacgtggcctttgctctcaaggggcttgctgtcagggagtggacatctcagaaacattctaagggaggcataagccaaatgctaagagagcacaacagggaagcagccgggccacaggtgagaagacgaattctgggagatggaggtcagcccaagggcccactgctgttgtgggaaacccagaataaggaagggcccagctctccagacccataccactcccctctcccacgttttctccaagatggttgtcagtgccctgcttttcttactgtttttgcctctggggctcagataacatggagaatgcttatcttaacccgaactgctacctaccactctcaaaagcccacccaagacacacacacttgttctatcacaaggctactgcttcttaacgcttcttattttagaaaagacaccattaagtttacttagattcatagtaaatttttgcaattaagaattattccttcagtaaagtttaaaatccggaagcccttttgtagtgaagttccttttccctctattttggcacccagatcatttttttcttttttgaaatggagtctctctctgtcacccagcctggagcccagatatgtggtctcagctcactgcagcctttgcctcccaagttcaagtgattgtcctgcctcagccttctgagtagctgggattacaggcacacgctaccacgcctggctaatttttgtattttcaatagagacggggtttccttatgttggccaggctggtcttgaactcctggcctccagtgatccacccacctcggcggcctcccaaagtgctgggattacagatgtgagccaccgtgcccagctaattttcctaagttgaatgtgcatgtgtttgtgcacatggatatgtgcacatgaaaggttcccttccacatcatctcctctaacaattgaaatactcctgcagtctcaggcatgctggaacatgaaacgattcagggcgtgtctggggtgaagcccacagggttgagaaagcgaacctccagtatcgccgatgagggcacctacacactggactccatcctccggcagctcaactccttccactcggtcatgtgtcagcatggcatggaccctgaactgatcaagcaggtggtcaagcagatgttctacatcataggggccatcaccctgaacaaccttctcctgcggaaggacatgtgctcctggagtaaaggcatgcagatcaggtgagcaaatgccaacacctgcgacagtgtctttttgctgcccagctggcctgccagggttgtggagagctgatgacttgttttcagttcttgcatctcatgtctggtgccatgtggccaagcagcaagggagaaactggcacggagccactttcccttgcctggctggatttcaccacatctcattattgctccctgtctgtaccctgccaacaggttcttcacattcttgataggaaacccttttccactgtgaagcttgcttatttgggggagtgaagagatgatgcaaaaatacacaaagatgagatagctgcttcctctccttatgtgtgtgttttaattatacaataagaaattattaaattataataatgaagatttctaatgtttgattgctcttagaaatatatttttggaaaaatacctttttgtacctatggcaacaagaacaggtctgatagatcttttactaattcttaaaatatcccccctctatattttaagaaaagctgcacttaattttatgcccaatactcctcagcataacctcattattgtaacataatttttttgcaaatttttttttttttttttttttttgagatggagttttgctcttgttgcccaggctggagtgcaatggcgccatctcggctcactgcaacctctgcctcctgggttgaagcaattctcctgcctcagcctcccaagtagctgggattacaggcatgcaccaccacacccagctaatttttgtattttttgtagagacagggtttcaccatgttggccaggatggtctcaaactcctgacctcaggtgatccacctgtctcggcctcccaaaatgctgggattacaggtgtgagccaccgtgctgggccacaaattttttattttaaaacagctagaatattcaccaagaggagggaaaaatgatttctcctatcaaagtcttagtagttactcaatctcaggaactgttagtgttcttttcaaattttccatcctgacttacattgaagtgtagtgaattttaagacaataatgccttcctctcagatagtggagcatatttctctataagctctgcatggaaatgtggagccacctgtcgcaatattatgctggcccctatttgcctggttgctaagtgctgattgtgtgtctattgacctcagtcttaggactgctgccacttggttggctattttgtgaaacctacaatgtctttgtagtttgtctctgtcaccatttggagtctttgtctcttccagtggccctcccttgcctctctctcctttcatcccggagctttctcaggccaccatcttcatctcctaggctcttcccttaaggcttcagcacaggtatatgtggggcttttggttattcagttacctgatttggagtttgccttaagagagagtgcttcaaggattatcaagtctcaccctgcaacagcaacccagctctgaaattgtaagagaagctacaaagtgttttctggccagctccccaataaagacagagctacattatgttattctattttgtttattagcaagtctaataacttttgccataatgacttcatttccatcttccattaaagagaattacattatcttgtcatttagtcttatataatggtgattataatcctcatgactataataaatttttaagcacagctgatgagatttaagaaaattgaacaaaaatactgcctgtcattttaacataaatcctgacaaggccgcacacaaaaaaattaagacatttttgacaaaattcagcaaatttgcattctctgtatctcttttttttcataggtacaatgtcagtcaactggaagaatggctgcgtgacaagaatctgatgaatagtggggctaaagaaaccctggaacctctcattcaggctgctcaacttttgcaagtgaaaaagaaaacagatgatgatgcagaagccatttgttctatgtgcaatgctttaactactgcccaggtagagcaactttccctgttacaaaataatttaacattcatcaaagatgatctttagggaagtaaagaagtcctctacttattgcttgtatctctgagctgacttcatctgtgttcaagaagatatatgcctctaccaatcttaaagcaaggagattttgccagaaattaatacatttcagtgctaattacagtataaatatatttaatattcagcaaatatttattgagtacttacagtgttctatataacattgaaggcactgggatacacccataggcaaaacaaagtctctgctctcatggagtatacagtctatgcagcttatattccataaaatagctttctatcttatttgataattgagtggattatcaaatagtgactttgtttttagagacagataattcttgttacttcaacagatgattaattaagcctccatctcaaggcaccatatttattgctggggaagatgcttcaataaataaggaaaaattcctgccttcaaggagcttacagttcagtagggaagacagagtcgtatccaactgactctaccgtagaggttctagcaaattctgtagtaagatgcctaaaggaagtactgagggaagatagcagtattcagggaaggtcccattaatctgggcattgaatttaaggaagtggaagaatgagaagggcatttgaggattatagtgacagcatgaagcaaggcacaggcatgaacatgcccaattttcttttgcccggttattttctgtgctgactcttagactttctttcttgcctttttttttttttttttttggggacggagtctcgctgtgccgccagtttgggaggccangggnttgaactccactcactggaagctccccctcccaggttcacgccattctcctgcctactctcgggagaggctgggggganaagagggcccgggaaaaangggggggtaanntggattaannaaggattgggggggggcgcaaaaacccannaggggggcannaatttaagggctatacctccatngaccgaagcttacccccgccccccccttttttccaccccccccgcccgccttgttntcactttttcccccccnaaacacccccttcaaacacatcccgaaaatttgttcaagagaacctaagagtaatgggggcgaactggtggggaggaaagctattaatccaaagggcgcatgtggcagggtttgtatcaaagcgtcattggggagggccaataatgagggggaaaaaacatgttttgcggcaaaagggagcaacagggagggcaagggtctcacaaccaaagggaagggtgaaagggagaggcagacccaagtgtaaagggtggccagagagacacaggatgtcccctggaaaagggaaaagtaaaggtgtactttcaagggggacgtgggcaaaaaagcagggccatgggtgggcagggagttgcgggaggagtaagcccgatgacaggagactaccgtggggccgggagcccggcaagtaatttggcagagaacgacagcccccgccaatggtaggtagtgatctgcaagaagccaccctcggaggatagtggggatccgggggggggcagctgtcagtgggggtgccaagaggattatagagaaggcgatatgtccgtggcggaaaaggatatatgtgggacgggtgttgatgggggccaggtccagattatggttgcagttatatctgcagagataataaggagttcgggggttggtgggggtatagatgtcaacaagcataatcagggtgggatgtgcgggtttagcatgatctgggaccaaagcacggggagggggggaagccacaggatgaatttcctgcgacgtgggcatcttagaggcatattaggaatcgcggcagtgtgagaatgaaagtccaatgtctggggtttgccatgggtccaggatggtgccgatctcgggagctcatgatccacccgcctcagcctcccaaagtgttgggattacaggcgtgagccacagtgcccagccaactttcttaatgttcatcatatatcctacaacatatgaaattttcagttttgcccaatacaattaaaactcaatcagtttgagaccagcctgaccaacatggtgaaaccccatctctactaaaaatacaaaaattagccgggcatggtggcaggcacctgtaatcccagctactctggaggctgaggcaggagaattgctggaacctgggagacggaggttgcagtgagccaagattgcaccactgcactccagcctgggcaacagaaaaaatcagtaggccaggcgtgctggctcacacctgtaatcccagcactttgggaggctgaggcagacagatcacctgaggtcaggagttcaagaccagccaggccaacatggtgaaaccccatctctacaaaaatacaaaaattagccaggcattgtggcgggtgcctgtaatcccagctacttgggaggctgaggcaggagaatgacttgaacctgggaggcagaagtggcagtgagccaagattgtgccactgcacagagacttcatctcaaaaaaaaaaaaagtcaatcagtagacaatcagaatcaagacttgcagcttcttaatgttgaattcgtgtttgcataacttcttactaagaataaagcagaactatctgacagaacaatggtcctgagatttcctcccagtttctgcaagtgtggaaagtaagaataccctggaggaagcccaactttatagaagttggctgccattcaacttctaaagaatatactttaatacttaaatatactttaagcatatttcacagagtgaggcagacctgcagtttatttatttagcaaatattagttaacaaagtggtcccactttttaaaattcaaatacttgcctccgagagactgatccctaattcagtttgtcacccacagacctgataacaacatgcccactttctagttctctggtgcttaatttattttcctatagatcagcactgtcctgcattcaacttttattttcattttgtgttaatagccacatgtggctagtgactactactgttgtattggacagcacaggtttagacaataccttgaaaatggaaatatctaccttatatagacgatgatttattttcattagaaaagagacatgaccattttacaaaaaaaaattattgaactttttaaaaaagaacttcatactctctaattgattaatttctttaggggcttttgttattcatgttatttatgatcttttataaaaatatgatttaaaaaacattcaaaagagataattgtattaatacggctaacatttttatatggagaaaagttgcagaatagtattaatagaatgaatcccatttgtataaaaataaaatgaactagaatatttatagcagctagagggggtgttcaggacatggttaacaattgccactttgggagactggaaggatggaagtgcggacatttatttttcatgttttattctcttgtgctatttgaatatcttcgaaatttacacagcttcttacaatattacacaaacattacattgatacattctcttgtaaaaattcagataaaggtaaatgtgcagaccagctcctccttccttctggtcccagcccacccctgagtagaactgaaatctgtacgcacagatccttttaattttccagattataggtacccagtgtgtatttgataatatgccaaaaactttgatcatttcatttctcacagattgtgaaagtgttgaatttgtatactccagttaatgagtttgaagaaagagtctctgtgtcgttcattcgtactatacaggtaagagctcccatcttcttctttgattcaccaacacagtcttttgaatggacattttgtaatttattgaaggataatgtgttatcttttattatcttattttacaatgcactaacttttttgataatagttaattgggaaaatgaagtgagtttaaaacaaaagtaaacattcttcattagttgagaatttgagggtagaaattttagtagaaaaaagtcttttagattcaaagaactgatgctctgtttattttttttcctaatcttctcagatgcgtttacgagacaggaaagactctccccagctgctcatggatgctaaacacatctttcctgtcacctttcctttcaacccatcttccctcgcactagaaaccatccagattccagccagcctcggcctgggcttcatttcacgggtctgaaagtgatgtccaggcaaaaattgacaatacatttcttgcccgaaataagaacccattatttccagtgagttactgaaaatacatttttaaagagaaagtactgattatctcccaaatgagaagtcattaactggaaatctccctagaatactttcatcactttggaaacaaagataggctctttcgtgctgtgttatctttatagcaacactcatccttaaccaactaggtaccgtgagtttacatacaggagaatgatggaaggaagggaggaaggaaaggaggagaaaaatgtgtcttcagctggcagcatttattttaaatccttagcactgagtttgaatggtataaaaagtataacttccatagatgagctgttgttaggaaggcaccaaagaacctcctctgcactaaacaggagaatggaaagaaaagtctccattgagtacatatcatgtcagtttagtaatcaattatgttgatattgttaaactggttcaaagaaataaactggcaatatgtaaagtaattcctcatttgtgtcactatgatatagagatattaaaggaatgttggtttgctaaatagtatagatgtccatttgtactatagtttactgagcattttaaattgctgctacatactgtcttcttaaaatgtaagtgatattaggcactacaataagtttctcttgtcaattctgtttacaattcaatcagatcacagttttaactggattatatgcaaatacctacagattcacctgcacaagtagcagacactggaaagtcatgtagtaatatgacaaaatgcttgacatttaggggtaggattagacaaagtggctattgttgatgtcattatttattcaggatgtattacattgatgtgctcattaattttccctgggtggatattgcgtcagggtacagtgttctgtgaagtgacttatttttaactaccagatctgattccttcagtgcatattttcaaccttgacaggttttctctcttcttaatttattaagaattaatctcggctgggcgcggtggctcacgcctgtaatcccagcactttgggaagccaaggtgggcggatcacttcaggttaggagttggagaccagcctggccaacatggcgaaaccctgtctctactaaaaatacaaaaattagccgggcgtggtggcacttgcctgtaatcccagctactcgggaggctgaggcacgagaatcgattaaacctgggaggcggagattgcaatgagatcgaaccactgcactccagcctgggtgacagagagagacactgccttggaaaaaaaaagaatctcactcactatctagagaggattgtcagaatattcacgattcaggtcttgaaactttgattatgcaaaagaaggtatataataaatatttcattatgattcagtttttaaggctttgcagcttctataagtgttctcagatgccactagataattttaaaagcatcatattagaaatactttaagaagacttatataagaaatagaagattgttgaattttacagaggatttggttcattaagacccagattctgtaagttttcattctgaaattctagttaaacatattcaccatttttcttaggaatcttatacaataaatccttcaggttgcacaaaagcaaattattagttttcattagaaactctggttctgaattacaatcataggttatataaatttaactgttagatggtctataaatcttattaaaatatgtgcaatatttatggaagtcaaacagcttcatatcagtgataaagattgttattaaaagataaatactgtctgttaatttacatgggcctcaagttcctcgtttataaaataagagagttggacactgattcttaacatctcctccacatttaaaattctctcttctcagcccttagattctagagagaaaaagctgcagttactcagtaagtccattctctgatggaaagaccagtgtgtagtgcctgtcaattccttaggattaatcaaatgtaaaatcacaagtttgtgtagctgtaacctttcttaaatgtacatgatttatgtacatgcttttagaaggtcctactatatttgtattataattagtttaagtaatttttattacatcatgtattgctttattcagtttgaatacatttatttatttatttgcagtatcaaccagaaacactaccaattgcatcaaattctcccagtttttcctggttgtcaatgcggttttcaatgcacaattaagtcatagccatttggttcgtaccaaatgtgtcagaatctaacagcatccgataggctgtaagttggggagttgctaagaaaatgcaacgtggtacaggctgtccgcctcagccctggaaatctcccagacctcccccagcttcatcctgtgtagcacgactcaacgtgcaccctgaatcttctcaggtcttccaggtcatgctgtagctgtcactgccatgcagcccttttttttactccggacagctcatgtactgaagcgtcatgaaagaaaggctgtggtctgagcccttctctcccatctcctgtctttgtcctgtcaagtgctggagccagagctcctacagctgcccttggtggtttctcctgttcagcgatggtggcacaaaggttctgctattccagggctccagcttcctcccaggtctacccagagctccagatgggggtctgaattaacctctcttggtggcctggagatttttagtcattgacaagaataccttgtaaccagggaaccccaaggcccagtaaatgattctgtataccattttcttgaaggtacaagaagattctgccgactatggggatctttgggccagtttgaggattgctttccctctgaggttctttctctctgtcagccacactttctcacccaacttcagacacaccctgccagcctttcccctactcattcactcttccccttccctcaacttaatcgtctatcccgttgcctgctgtttgactgtgcactgaaggcaggtggatggagtcagtcctcagttgcccctgctggccttcctggtgcttaccatcagcccaatctttgcacagtccttgttgttcttacttctctgcatgcattccttcagaagatcagtcatcaactttttcttaattcctctgtgacacacaatgggaattcaaaggaagagatcttaaaagtcacaacagttctttatcttaataatcccctccccattcaccttactacatgcagactcacctcacacccttacaacttgaagctgaaaatttaaaagtaatttccctttttgcagcttttcctcaggttaaggctttgatctgcctgagagtaactctaaaaggagggaagataaatatgggataaaatccacaaagtgtagcttctaattcctttggaagtttaaaaaatttccacatatctgatgcttcttttgtcaggtgcagaagcacaaaaacatattccgaagccaactgatagggaatttggggattattgtcagtttggagaatttgctgtgttatttcttcatttccatggatagctcatagttggctctttctgggtgagtaattatgtgtaatatagatcaaatcttttactaaggttacagctacatgttaggggaggctatgaaaatactatattattataatttcagtgcagtgattgttgtgagaaataactttcatggtaaccctaggaaaatgggcacctgccaccatcctgagaagtcctcacacaatgccctttctctcttacacacacacacacacacatacacacacacacacccccgtcactaattcatagagttccttagcaggcatagtcaaggatcctctgggtaatgtcagctgcttagtgataaaacagagccaaaactagtgcatcctgttgaaagtaatgcagaaacagtacctgggtccagatatgctttcctgcggcgctttcctctgttacctcgtttcatcctcacagcagcatggacggtaggtggggtcgcttctacaatcatttctgatgatagcttgggaatagagataggggcagtgacttgcctgatgtcgcacagccctctggctgtcctgctttcccatatggagcagtggtggtgtgggcacctgtgatgcaggagactttaaaaatgtcgtgaggtcacgtgctgcccctcctggtacgtgtggaatgcccctggccagcaaggggtgcttttttatcagagttggcagctggcatgtgggaaccgagcaagtgctgcgtaccaagttacttgttttaaggagaccaagtgctcagcgccaggtggttttcttttttgtcatagttacttgctataactcagcttgacttctgtcatgaatcagtgctctctgggaggatgcaatactctgtttgggcattaattggtagcaggttgtctcaaccaaaaagacaggaaacagcaaaagcctctctgaaattaagaggaaagttactctccccacacccatcagagtctttattggagccaccaggtgagctgtgcagcctggacaggcctgcagctataggccaccttcccagtttaggtcctcagcacaggggagcccaagtcactgggtgccttccgagggctgtcactgggcaggccatatacaagtcagtgtgtgcgtgggcactgcagtgtgtgcatgccgtaggtgttgatgggtgctaggaggggtgtcgtgtgcatgcgcgttgaagaggatctgtattgccgtgacctctgttcatggatgagtgcattgtaatttgttctcaggctgtgctgtgagggccgccttaacccttgctcccttcccttctagagctgccttaagttctccagaacttttcttctgtaaaggatatcttgcctggaagggatatcttgccctgtttctcaaggttttgtgagagttttgactggatgtggccctgcatgaccctccttctcctgtacttcctctttcctttccaaatgggaattagaactgtggggcagcaacagtctcagagccagtgagaggccagcttagagaatgcttctgagttagtgggactctgtgtcacaagtaagcaaatgaatatatgaaagaaattatggagataagttagattcttggtaatacttaaatgtcttgctttctactaacccttttgtactaaaggtaaagggtataactcaaactttttgtggacattcttttcaaaattttttaagaaccctgtactataaaaggttgagtaaaaacaggaaagcgtgctataagttcaaatctgttgtattaccctaaattagataaaccaacctgaattatagtagatttctcaatagatgaggaactgaaaaatactatgtaaaatatcttccaaaatgctttttatactttttttatttgtaatttggtctatctaaaatgttcgttagcttaacttaatgggcgttattggattcatatgactaacgtttcctcagtattgtaatgcttgaaatatttgaaagaaaaaatgttgttttttagttgaaactggtatatataattcagtgcttggcaggttagtatatttttatgcatttttcagagtcagcagtttcaaatcttattgttatcatgttataaaattttagcccacatttcaggctccgtaaatcatttgagccattattttttcccaacaaatggtgaattttttctttaaatgtggatatatatgttgtaatttatgattcctggttatgtatttttgtgggatcctgcagtaaaattgacttttttgtgtctttgggagatttaaattgcgctaacagtgttgcgcaaaaatgagttcatgccatttaacatattgtattttaattattaactgtattaatttactatgaaatggacatccttttaactaaaatggaattgaacattgcagttttcaaatatttttccttgttgggtctggaaaaggaattctactttgatctgcatagaaaattttgatacaattttttgaaagttcttaggtgaaacatttacccattaaaaaggaagcagaaatactgagacatgaaaggcattatcaactaactctagactctagaacccattctagcatatctcacgtgcaatttttaaaaataagttaataattcatctcatatcaacaaaagcctttgaaacatgggttttcactagatatcacctagtgctaagataaaaaccaaaacaatatcagaattacatttatgctctaaatttgtagttgtccattgttgtgcttagtaaatgtgtgtcattaatgctgtattctcctagctattatggaaacttgtttaaataaagatatggatataaagagtttttgtcagtgtcttataagcaaatccactgcacattttaaaacaacaaaacaagttgttttcctgaagactagtgaatgtaaatataatccctccccatgagaatattctaagaagtcttggaaatttaaaagttgacgagttcccctcctatactggacaccctagtaatatatatgataaagaagagaactgccaaacacttaagcaaacagaaacagctgaagaagaggtagtgtcttttcttcaagggaaagtcatgcctaaatatattggaattctctgacagagaaatagacataaccaagggaaatttgatatgcataatctacttagattttcaaaagattgagggtgtcatttgtgtcaaaagttctacttttaatatagtgggacagtagacattttttggcataagacatagatcaaagaagtatgcagatgtgcttttttgggtaaggaaacagagcagttattcagatctgtggtggaattagtctcatctttatttatgataaggagaaattaatatcatcatgtaccacataacattttgggtcaacaatgcaccgcatatatgacagtggtcccataagtttataatactgtatttttactgggaccttctctatgtttagagaaacaggtacttaccattgcctgcaatttgcagtacagtaatgtgctatacaggtttatagcctgggagcaataagctattccatatagccagggtgtatagtaggctataccatctaggtttgtgtaagaacactctgatatttgcacaatgatgaaattgcctgatgatgcatttctcaggacatatcccctttgttagtaatgcatgactatgactgtacatggttttcatgtagattatacacttcctacttccatgacacattcattcaactcatttattaagtacttttctgggcaccgcaacaggcccttgaaatatagcatcttccaaattaaattcaatcactggccccatgaactacagcagaacaccaatatgttacaagtaataaaatgtcaaaatttgcaaacagtttctttttttcttttttatttttgagacaaagtctcgctctgtcgccaggctggagtggagtggcgtgatctcagctcactgcaacctccgcctcctgggttcaagtgattctgccacagcctcccgagtagctgctacaggcacccgccaccacgcccagctaatttttgtatttttaatagagacggggtttcaccatattggccaggatggtcccgatctcttgacctcgtgatccgcccgccttggccccccaaagtgctgggattacaggtgtgagccaccgtgctcagccaacagtttctttttctaaattaattggaaccaaggcaagattatttcccaataataaaatcacgctcatccagttgcattttggtatgatcattaggattctttctggggcatatgacaaaaatcaaactcaaactgacccaaccaagaaggaaatgtattacctaacacaattaaagttcagagatatatccaggtgcccaaacattgacatcagggatctccttttctttccttacttttggcttcattcttagtcatgttctccctcaagtgacaaagatggccctcagtagtgtttggcttcattctatggctctgccttcagtaattctcagtaaggcatttcaggatggagtctcagtggcttaagtcctacttccatcctcagaataatcactgtgtccagatgagtgctctgactgtcctagcctgacataccccccactgaaactaaaaattgggtaattcacagaaaacataggattgattaggtggtagtgggagttcaccagaggaaagacagagtatagttcacagaggaaatgaaagcaatgcatgtctacagtaatgcattctcctgaatgggaaagaaagggacacgaattgtgtgcagcactgggagtgtgccatccatgtgaaagtgtggagctgctgggtgggtttcctgggtcttagcagtcagcataagtgcacaaagaagtaagcaaagtgttacacaacaagaaatatgaaatcacatttaccaccccggaaagggacctgggaagacatgtgatttgttcacattgatcaccttgctactgaaaccaaaatatgatggacattattcaaaaggagagaaataaaacctgccatacagaccacgttagcaccatgttggccagctatgggcagttctggtcattgggtttcaaacaaaacacaagggaatataagaggttcagaagagaataagagataactgaaggaaaaggatactgggacctctagatctataatcaaaaaggaaaaggggcagtgctaaaaatagatggttagctagagcaagtttttgcctgaatccaggccattgggggcgaggcggtcagataagaggtaggagatcaatcccatctgggtcctctgttaacccgtaactcactaattaaacaaaatctaaacttagcgtggtggcgggcgcctgtagtcccagctactcaggaggctgaggcaggagaatggcatgaacctgggaggcggagcttgcagtgagccgagattgcgccactgcactccagcctgggcaacagagtgagactccatctcaaaataaaagaaaaaaaaattatgcttggcacagataaggaaaacatgaactacttaccaaaacttaaatatggtaaacagacattttgaaacttcagcagttactggaaaagaaagaaaatactagtttatgttgtcaaccatgtatatctgaagctcatttcctaagagtctatattatcaagaaagctaaatgaatttgaagagagtttggtcaatgctacttgtgaccaaaaaaaatttctactgagaagatctgggttgtatcaaatcttcaggttataatctaggaagacaaatggtttcttttcacatgtacacccatggtctgcgaaaaataggtctccgggctgaatggcctgtgtctaggatgaccctagctaggatggtgattactgtgcaaaagaatggggctccttttggagggaagtaagaagctgttaaaaacaacctcatgaaaacagaagggagggaggaaaatacaggtaggaatggggttggtcaacagaagtgagatgggcaaagaaagacaggccaaaagcccatggaaaaccattcttgagttgacattaaatacaacaggagaaatatttctcacatttcaaaagtagcttttaggaattccacttctgacatgatagcatgaggagctttgcagacaactcccaagggaaaccagtgaaaccagtgagaattattttaaaaacaaaccaaacccccaattctttaaagtctctagaaatggtcctaagggcatacaccaaatgaagaagtgcttattcaagaaaacatactaaagcttgataaagagaatgagcttgttgtatctgaaccaagattcctccctccttccatcttccaggtcaatgagacaaaaactccactctagactggtatagccaagaactcagggcttcctctctgccagctcacagttggagggctgtcttcctgggaggggcaggatgtcagcacttctcatcctgctcccagccacctcttgcttaagctaagtttcaaataaatgcagtcaacaggtggggggggtcccttctacccagcccctactcatggctcacaggctctaccttggggacatcactgctgaaaatactgggaccccagtgcatcttgttcaggcttttaaggtggtgctctcatcctgggaaaggccaaccaaaaagacctaaggccactatcccccatccaccgagcatttggctcccatcactcaaagagatgcaagccattgtcctcatccccagctccagaacaatggctcagagattttcaccaggagcagaagcaggctgtaaaacagaaagctccaaattacttcctaaaggaactgacttcatttgcaaaagagtgtggagaagttcaagcctaagggcgtttcaaaaacagtgaaggttgcagtgactggggattgggaggggattggtagattcattagagttatcggctgaactttaggctataactttcctggagagaactgggagaagagacagccaggaggagtccttgcaggatcagaacaagtctcaaacattgacctcaagaactatcctttcaaaggagcccaaaattgatcagatactgtctgtgaaacaatgtgttccttatagcattgttgaaaatcgtaattggtggagtttaacagctgaatgttaacacagtcaaagtgaagctagccaaaaccactgtcatcccaggtttagcaggctacactgcctgagaagcagcatcagaggcttcccactatggagtagtggaggagggccaaatagatcttattgaaataagccagctggtcactaaaacataaataagcccagtttatttacaaaaacaaggaccagtatgcagagctactacattatcagaaatatcttgattataaccaaaaaattacaagacatgcaaagaaacaggaaagtatgacttataagcagaaaaaaaaatcaggcaacagaaactgcttataagaataacaaggtgttagattaacaaagatttcagatcagccattataaatatattcaaagaactaaaggaaactatgattaaagaatacatttgatgaatgacaacaacaatacaaagaacaggagggaggaataggaaccttttgatattataaggtacttgtactgtaccttatacactgtaaagtgatatcatgttctgtgaagatgggcatggattcgttatcaatgtgtattgcaaactccagggcaaccactataaaaagtaaaaatagaagtgtaattaatatgctaagaaaagagaaaaaactgaatcacattaaatgctcaattaaaaccacaaatggcagaaaaaagagtggaagacaaaaaatagaaacaagaccaagggcaacaaatagaacagtaacaaatatggtagatattaatccaaatctatcagtagtctgtgtaaatgtccatggtctaagtacacaaattaaaagacagattgtcagagtggatcaaaacacaagacccaactatatgttgtctacaaggtgattctaaaattcaggtggaattgcaagggacaccaaatagccagaacactcttgaaaaacaatagcaaagttggatgactctaatttcaaggcttactacaaagcaacagcaaactagaccatctggcactgaaagtaaagatagacatagacatcagtggaatataatttagagtagggaaataaacctatgtgtttatgatcaattgatttcaacaagagtgccataaccattcgatggggaaagaatagtcttttcaacaaataatgttgacacaactgaatagctaatgcaaaataataaagttaggcctttatctcataccatatacaaaaaacaaacaaaactctgctggatgcagtggctcacatctataatcctagtgttttgggaggccaaggtacaaggatcacttgaggccaggagtttaaaactagccttggcaatgtagtgaccccatttctacaaaaaaaatttatctaggcatggtggcatgcacctgaagttctagatactacagaggccaaagagaagaatcacttgagcccaggaatttgaggctgcagtgagctatgatcataccactgtgctccagcctgggtaacagagagagaccttgtctcaaacaaacaaaacaaacaaaaactcaaaatgggtcacaggcctaaatgtaagagctaaaactataaaacttagaagaaaacaaaaggataaatcttcttgactttcgattgacaaagggattcttagatatgacaccaaaagcccaaataacaaaagaaaaaataaaccgaacttcattaccaatagcacatgaaaagatgcagatgcctggcatgagggaaatgcatatgaaagccacagtgagatactacttcacacccaccagaatgcctagaaccaaaaagtcaggtaataacatgaattggcaaggatgtggagaaatcagaactctcaggcactgctggtagaaatgtaaaatggtgcagccactctggaaaacaatctagtagttcccccaacagttaaagaacagagttaccctatgacccagcaattccactcctggaaatacccaagagaaatgaagacatatatgttcatacaaaaacttgtacataaatgtttatagcaacattactcctaatagccaaaaggtgggaacaacccaaatattcattaattgattaatataatggaatgttacttaatccctaaagaatcactgaaaagttaactcaagaaatagagttctttttaggggggaaatttaaattatgcacttaataaaaactatcaccaaaaaattcaagaaaggggaaacagagggagaaaaatacatgtgccatatagaaaacaacaaatggcagacataaatccaaccatatcaaagactacaagaaatgtgaatggattacacaccccaataaaaaggcagagattatcagactggatttaagaaaaacaaaaacaaacaacaacaacaacaaaaacaggcacagtggtgcatgcctgtaatcccagctacttgagaagctgaggaaggaagatcactagagtccaggggttcaagaccaacctgggcaactgttctgtgtgggagacctgcgaggggagaaggcacacacaatacttttaagggtaaacaactttatcccatgtaaatggcaatgcagataataataagcagatgatataataagcaaattgatataataagcaaattgcaatgggaaggggagaaaggataagatatatatatatatttacactcaccagactatggagaattcaccaccagacccgtaagcaacagcctgggctccagagtcggccactcactggtgtagatgaggagaggtctcatgaagcttcagtgcagtctgggacccaagctctttttgtaacaagttgtttggcatgaggcccaatcaggaggccctttgcgactgggctcaaggaacccaaaaagtcaacttttttttttgcaattgttgtttttcaataactaacgtataggaatagattgaaatggggatttctccaaaaaagtgctggatgaatgccttaaggggctcacacaacctattctgggacttggtgaccattgtttgtgtccatgttcaatttgatatttaacttttcctccacagcaacatagcaagactccatctctaaaaaaaaaaaaaaaaaaaaaaaaaaagaaaaagaaataaataaaatggccaggtgtcaggtgtggtggctcacgcctgtaatcccagcactttgggaggccgaggcgagatcacgccattgcactccagcctgggcaacaagagctaaactctgtctcaaaaaaaaaaaaaaaaaaaattccatatcctaaatgtcagagttctaactataacacatctagaagagaatctttatgagcttaagctaggcaaaaatttattagataacaacaccaaaagcatgatccacaaaattaaaaaatgataaattggacttcccccaaatttaaagtttttgtgctgcctaagacaccatgaagaaaatgaaaagacaatccatatagtgggagaaaatatttgcaaaccatatatcggtaaagggtttgtgatcaaaatgtttaaagatggtagattcaatacctgtatttactcaaccttcctcctgaaactccggtaagtaacaataaactcacaaaggaaaacagaatgaatgaggaatgacagcaacagcttggaagatgaaaaacagatggataaatgtcttttattttcacaagcaaagaaaactgaaacctaacccgggacaggcagaagcccagaagcaatccagtttgcactacataattccgaaaagctcaggaattaggttcagaggcagcaggtaacactgaaagtggcatgcagctgaaaacacaggaattggttgaaaatctgtttaaatagcagttcaagtggacttgaacagacatttcacaaaagagaataccaaagtggtcaatagtcatcatagaaataaatgcaacttggacccacagtgagacatcataacacactcatcagaaaggctattttttaaactgaccacatcaagtggtgaggatattaagcaactaaaagtctcacacactgctggtagaagtatacattgatataacaattttttacaaatctctttagcattatccgttaaagttgagcattacatacctgtgatccagcaattctgctctgtttatgtgcccaacaaaaatacatatatttgtgcatcaaaagacacatataaaatgttcatagcagcattattcatagtgggtgtaaactgaagcaaccgaaatatttatcaataggagaatgaataaattgtagaatatttatacaatggaatactactagacaggaatgaaagacctcaaaccgcagctacatgcaacaagatgaataaataccatgtaaaaagccaaatgcaagagttacacatgtgattccatttattaaaaacatccaaaacaggtaaaacgcatctatggtgatacaaatcagaacagtggttatctttgagagaaaatgatttgaagaaacagagaaagttttgggatatcggtaatgttctacgtctggatctgggcggtggttactttggtgtgttgatgtgttccatgaataagaatatattgagctgtacacttattatttgcacacttttctgtatataattttattcttcaataaaaattttctttaaataaaaaaggcagctagattctctttttaactctgagcaatcaggcagctgtcactactcaccttatagattttctttttctttatacaaaatagaattatttgggcaataatataaataattttgtatataaataaatgcaaaattaaatttaccatgatcctctctttgtggcatttatcattattgatccatgccaggcctctctttatattttttgatcccctttttgaaatctccgattccatttctctccctcataggtatccactcttgcatatttaatgaatgactttgtaatttatcctccttacctctattcacacatacttgtacccatgaacaatattcagtattgcagtttttgtgagtttttaaatattaaagacttgggctagacatctattcaacattgttttttatttctgagtcaagtagatcatgtctattcctactaacagctgtagagttttacatgtatatactatttctttttttatttttctctgctgtctgccatgtatatactattttatttattcccctattgatatttagatgcttccaactctttgataaataactatgttgtgatgaacatctacttaactgtctctttgggtgactgtgagaatttttctgcctacatttattttcataactattctcaaattgctctccaggatggcagtatattcccaccagttatgtaagcaaaaaaagtttttattttttttatttattttttttttttttttgagacggagtctcgctctgtcgcccaggctggagtgcagtggcgcaatctcggctcactgcaggctccgccccctggggttcacgccattctcctgcctcagcctcccgagtagctgggactacaggcgcccgccacctcgcccggctaattttttgtatttttagtagagacggggtttcaccgtgttagccaggatggtctcgatctcctgacctcgtgatccgcccgcctcggcctcccaaagtgctgggattacaggcgtgagccaccgcgcccggccaagtttttattttctcacatcctaggcagtatctgagattgtctaacctaaatgtttttgccaatatgatgggtaaaaagcaatatctcattgttgttttcatttgtatttatctgattactgctaaagttgacatctccttgtatgctaacaagccatttaagtgtccccatctgtgaattgcctattaatttttgtcagttttaaaaattggatttcttttctttaaccgattaacaattcttctatatggaaactactataacccaacattttaaagatattatccctcttttattcctaataatttcccggttttaagttttaatcgtgaatccatctggagcttatttttggatgcagtgtttgccacggatctgcttttattgtttttccatataacgggcccatctaataaatattattttatttccctatctggtccttaaggctaccgtataatgtagggccctgctggggggctccagcatgttccattactcacgtatccgttctcacgcaagtgtcacactgttttaatgactactgctttgttatgtccctaaatatatggcaggacaaatctctcctctttgagaattgtcttagttatacagggcttttattctatatgaaatatagaatcattgtacaattctccaaaagttctgtaggattctgacgccaatatattaggcatatatattgatttgggtagaagtgacaccttgaccatattaaatattcccagccaggaaaatggcatgtctcccgtttacctgggccttcttttaagctctttaagagaattttaaacattttctccacaaaggccaagggcatttttgcgagtgtaatctctggatactttatattttcactaatattgtaaatatcttgtattgcatagacaatgctcatataaaggaccattacttatttttgtatttgattttgaatacgatgaccttgctggactcttaacacatttctttgtgttcagtacgttgattcccttgggtcttccatttaaatggtcgtatcctctgctctttgaggagctaacactcgggccgggcagcctccggatgcatctgttcctgcctggcagcgcgccccgggccccaaccttctccacccgcgctcccgccaggtgcagccgcccggccccggccaatggcagcgccgactagccgggccaagcttggagggaccaatcccgccgctgccccctcccctcgccgccaactcgggaacgggaacaggaggccgttggaaaactttgggcaagatggcccggcggtgatttccgcggcggtctctcctgcgcccggcctctgcggcgcaggcccagcccccgagcctcgcacgttcggcagccccggcctggccccggcccctcctgcccatggcggtggccgagctgtacacgcaggtaggagggtccgctgggctcctgggagcgctgtgggggagccggccctgctaacgctgactcgacctggcgcccgggccacacctgccacacctgcgcacctgacacggcagggcgggcgggcgcgcgctgggggccgcggaggcgccgcggaggggccacggggaccggggacacgagcgagcgtcgcccctccatttaattatatattaaaataacaaatanttacctattnaaatcaacatataatcatataaatttaagataccaatgcnatacgacagcatataaattaaagattagatacaggatgagaataaaaatttaatagtgaaaaaaaaatagaatatnaaaggaaaaaataaagtaaacattgaaaggatgaatataatcgggcaacacggaggattacctcaacagcgctcaaatgcgttgtgaaaccctgcgggaggaaaacaagaaaaagggcagcacccccagcgccaatgcatggggacctaaaatccccagtgccaggggtcggggtgcgtccctatctcgcgggagtggagcgcctcggtcccttcataccacaccacgggtggaatcagagttgcccatgcgtacgtaggaagatgagacgacggccagtctcatggccccacctgggacccccttgaacgagctggcatagaagcttatgtcctcagtgttcgggctgctttctagaattctgtgtctacaaagtgcgtgaacgtgcatgtaggctcatcagaagctgaagcagcatgggtcacaggcttgagggcactgcagtggcaccaagcgcttggggagcccaggggccacgaggtgcagtcgtaggctctttgcctaacatctgtactgttagcaacagtacaaacaccacagtttctaaagcgcctttcatataccctgactctgggaaacactagagcattcctcagaagcttcctttctgctggctggggctccacctcttacctcggaagggcagcgttcccacatatgtcccaaaccctctgagatgggcttgggtaattatttggataaagagtgtgacagtgttagcacttttgaaaaaaaaaatccatttgaatagccataaagcctgatcctcctatacaccagttggggaaatctagagacctcagtattcagacgagtggaactagaatccatccatttccccggacacatgctctagctttctactttaaaagatgcttttgctgtagatagaaaagatagttatttaaaaaatcatgtttcaatggtttaagcaaacgtttttcttctactttgattacttagtaacagtccggacacaaagcaaccgaactgtagtttctcctctattgcatctccattaactggagttctaaatggacagtgtttgaattgccctagttttgttctagaatattttcaccagtgagactgtgagccctcagacagccaacagcgcttcttcagccttcagtttactggaagtgaaagaaaagtcttggactagtcttcgacgatactttggaggacagagaaaaatgctgctgctgaacctatttgaggtgacagtatttccagaagcagaaacacacaggtgcaagcacccctatttttaggtgcctcaaacctcagatatttattaaatgtctagtaagtaccaggcacaatgtaagaaaactgataggaaggagtttaaaggtacaagcttggagggaatgagaatctgagaatcccagagactgacgcagcctgatggccattcccactgaccttgtgtccacgtagacacctgtgttcctaggctgccacctcccttcctggtgggcagttagcccccattttgtctgttctggaggtgtgaaggggagggccatggcagccagagagcgaggtcagggctttattccccagtgtgggttttgagtgggggctggcagaatcaagggtggtgtgttaggactgttagatttgttatgtatgccagcagcgcccttgggctgtggaggagagaggccggggtcacgtagctgaattctcaggtctttccaaaagagaacaaagtacagatcctcctgcagtgcaatggcaagatcttgcctcacagaaacctccgcctctcgggttctagcgattctcctgcctcagcctcccaagtagctggggttagaggcatgcgccaccacgcccagctacttttgtatttttagtagagacggggtttctccatgttggtcaggctattctcaatctcccaatctcaggtgatccacccacctcggcctcccaaagtgctgggattacacacgtgagccaccgcgcctggccagaacttccttttgaagtaggctttctgcagctctaaaaaggagtttgacaaacaacttggagtagataatcagttctgagactctgtagtggccaattcttgataaatttggtaattcatgtacaattcttttggggggcatatattttgatatttgcctttaaagattaacattcattgttctgattatgaaagtaataggtacatattgtagaaaatacatccaactctcaggtgtctcttatgaggatcccattcctaatccattttaatgaagtaagcttcatgacgttagtaataaatattttcaatagcagacctggggtaggagctgtgtagcccgtggcaacaaggatgggtgtgggtgtgtgtgcctgagacaggcgtgtctgtgtgtttctttatgaggcctccatcgtcctatctgcacaagagtgtgtgtcactgcctgccaggtcattcttccattctcgttctctcaaaacttacacatccatgtcacgtttcggcaagcttctgctttttgctagctgttaaggattaaagcaactcaaatgatttaggggtagtcatgattgatatccatccagtgacttttctgttttattgattaagtaaggcgatttatattaactaatagataggttcctcatccagcattgtcctagtctagtacttgtaactgtgaactttgtttgtttgtttgtttgtttgttagnttttcttttttttttttcttttttcttttttttttttattgatcattcttgggtgtttctcgcaaaggggggatttggcagggtcacaggacaatagtggagggaaggtcagcagataaacaagtgaacagaggtctctggttttcctaggcagaggaccctgcggccttcctcagtgtttgtgtccctgggtacttgagattagggagtggtgatgactctcaacgagcatgctgccttcaagcatttgtttaacaaagcacatcttgcaccgcccttaatccatttaaccctgagtggacacagcacatgtttcagagagcacagggttgggggcaaggtcacagatcaacaggatcccaaggaagaagaatttttcttagtacagcacaaaatgaaaagtctcccatgtctacctctttctacacagacacggcaaccatccgatttctcaatcttttccccacctttcccccctttctattccacaaaactgccattgtcatcatggcccgttctcaatgagctgttgggcacacctcccagacggggtggtggccgggcagaggggctcctcacttcccagtaggggcggccgggcagaggcgcccctcacctcccggacggggcggctggccgggcggggggctgaccccccccacctccctcccggacggggcggctggccgggcggggggctgacccccacctccctcccagacgaggcggctggcctggcgggggctgaccccccacctccctcccggacggngcggctgccgggcggagacactcttctcctcccagacggggtgg

SEQ ID NO: 11902 - DNA, 175 bp, Homo sapiens
aggtcttccaggtcatgctgtagctgtcactgccatgcagcccttttttttactccggacagctcatgtactgaagcgtcatgaaagaaaggctgtggtctgagcccttctctcccatctcctgtctttgtcctgtcaagtgctggagccagagctcctacagctgcccttggtg

SEQ ID NO: 11903 - DNA, 117 bp, Homo sapiens
gctaatttttgtgtttttagtagagacagggtttcaccatgttggccaagctggtctccaactcctgacctcaggtgatccacccacctgggtctcccaaagtgctgggattacagg

SEQ ID NO: 11904 - DNA, 2403 bp, Homo sapiens
tccattttgtcggtagaggcagaaggagaaggtcggattgtagaagctggggtggccggcagctcgctcatcggtgttcgtgggctttgtcggtccgtgcctcgtctctccctggaaagggagggaggcttcaacgtcgagagggagccgctgccgcgttagttccgagcttgaagtcactaggacttctctcaaacttgagtgctgaggagactcagatgttggcctcagctcctaggctgaactcagcagatcggcccatgaaaacttctgtattgagacaaaggaagggatctgtcagaaagcaacacttgttatcttgggcttggcagcaaggaagaggacaggtagtggagatcctgcaatctgaaaagcagactgaaaggtgacaaagaagctgaagatgggtggtagagagaggtataacattccagcccctcaatctagaaatgttagtaagaaccaacaacagcttaacagacagaagaccaaggaacagaattcccagatgaagattgttcataagaaaaaagaaagaggacatggttataactcatcagcaggtgcctggcaggccatgaaaaatggggggaagaacaaaaattttccaaataatcaaagttggaattctagcttatcaggtcccagcttactttttaaatctcaagctaaacagaactatgctggtgccaaatttagtgagccgccatcaccaagtgttcttcccaaaccaccaagccactgggtcctgtttcctttaatccttcagataaggaaataatgacatttcaacttaaaaccttacttaaagtacaggtataaaataagacaaatgtttaagtttagttatgttcacagatagttgtcaattggtctgaaacaaatttgctagggaatctatttgtgtagaactaattaatgtaaaaaaaatagacttcatctcgtgttgtgtgcactgtgatataatggtagtatcagtgcaacttaaactaatgattgtaattgatattaagtgttctcaactgagtaacttttaagtggaaaccaagtttagatttggggagtggtaaaggaatcagctttttctattgttaggggaagatagtaatttatcattcatggaccagtagattgttgaaagttggtgaatcggattataagcttctggctaacacaaggattcagaattaggtaaacatctgaaggtttagtatattagaaacacccaaaccagtaatatgctaacctgatgcactgctgaaagaaaatgtgaatttttcgtaataattgcattttagtgaattgtacagtgggtggaaagggcatttggagctcattagaatgagacatagtacaccccaatggccctgtttattaaatgtagtggattaagtgtctgtcaacaaatacaccaaaaccattttttatagaaacagtatttaatggtcactcaatagctttcaaaatacatttttgtattacagcactgcacaagctattctaatagtgatctggcctcctcattcctgccaagcttgctttggggagttggataatgtgaaaattttaagtacctaggggagaaagagccatgtaaatatctgtaataaacttgtagcatatgtaaagttttcttggcctttatcttacaaaaatggaatattttagtatgaatttgctgaatgtaagaccgtggactgttttttataatatggcctaattttaaaggtccaaaataacttgtttttaaagtttgcccttgtgctaaagtgccagtgtatgtatgttatacttgatttggttgtaaactatatttcaaagtaaaccctagtgtaataagttttataactaaaaaggtttaagctgctaaaactatttttaagagatgtgaaatgcagtatgggactatctttttttcctcctctaagcccaaagattaactagagtccctccaaccttatagatttttggctttcacaatcttataacctaggatacaggtagtttcgagtatggtgccagtgatgttttgtttttgtttggtcaaggggtaggtgcaacccaatggaccacttatgcaaaagatgtaaactcttgcataatacatcgataacatgttttgccaactttaaatgcttaaacataagcgaaaccagtagcaagtatgtgggtcagtttaaaaattttgattgttaatgccctattttctaatttggcacctcttttgatgcctaagcaggtaagcagatgcctaagctgtatttctccaaataaatcaagaggaagtactgcccaagttaaatattgatagcctaaagacaaattcatgtagtacttaatgtacatgatatgaatttgaagcataaaattaaatttttccccattgaaaaaaaaaaaagtaaa

SEQ ID NO: 11905 - DNA, 1889 bp, Homo sapiens
ttgttcataagaaaaaagaaagagaccatgcttataactcatcagcaggtgcctggcaggccatgaaaaatggggggaagaacaaaaattttccaaataatcaaagttggaattctagcttatcaggtcccagcttactttttaaatctcaagctaaacagaactatgctggtgccaaatttagtgagccgccatcaccaagtgttcttcccaaaccaccaagccactgggtccctgtttcctttaatccttcagataaggaaataatgacatttcaacttaaaaccttacttaaagtacaggtataaaataagacaaatgtttaagtttagttatgttcacagatagttgtcaattggtctgaaacaaatttgctagggaatctatttgtgtagaactaattaatgtaaaaaaaatagacttcatctcgtgttgtgtgcactgtgatataatggtagtatcagtgcaacttaaactaatgattgtaattgatattaagtgttctcaactgagtaacttttaagtggaaaccaagtttagatttggggagtggtaaaggaatcagctttttctattgttaggggaagatagtaatttatcattcatggaccagtagattgttgaaagttggtgaatcggattataagcttctggctaacacaaggattcagaattaggtaaacatctgaaggtttagtatattagaaacacccaaaccagtaatatgctaacctgatgcactgctgaaagaaaatgtgaatttttcgtaataattgcattttagtgaattgtacagtgggtggaaagggcatttggagctcattagaatgagacatagtacaccccaatggccctgtttattaaatgtagtggattaagtgtctgtcaacaaatacaccaaaaccattttttatagaaacagtatttaatggtcactcaatagctttcaaaatacatttttgtattacagcactgcacaagctattctaatagtgatctggcctcctcattcctgccaagcttgctttggggagttggataatgtgaaaattttaagtacctaggggagaaagagccatgtaaatatctgtaataaacttgtagcatatgtaaagttttcttggcctttatcttacaaaaatggaatattttagtatgaatttgctgaatgtaagaccgtggactgttttttataatatggcctaattttaaaggtccaaaataacttgtttttaaagtttgcccttgtgctaaagtgccagtgtatgtatgttatacttgatttggttgtaaactatatttcaaagtaaaccctagtgtaataagttttataactaaaaaggtttaagctgctaaaactatttttaagagatgtgaaatgcagtatgggactatctttttttcctcctctaagcccaaagattaactagagtccctccaaccttatagatttttggctttcacaatcttataacctaggatacaggtagtttcgagtatggtgccagtgatgttttgtttttgtttggtcaaggggtaggtgcaacccaatggaccacttatgcaaaagatgtaaactcttgcataatacatcgataacatgttttgccaactttaaatgcttaaacataagcgaaaccagtagcaagtatgtgggtcagtttaaaaattttgattgttaatgccctattttctaatttggcacctcttttgatgcctaagcaggtaagcagatgcctaagctgtatttctccaaataaatcaagaggaagtactgcccaagttaaatattgatagcctaaagacaaattcatgtagtacttaatgtacatgatatgaatttgaagcataaaattaaatttttccccattgaaaaaaaaaaaagtaaa

SEQ ID NO: 11906 - DNA, 744 bp, Homo sapiens
tattttagtatgaatttgctgaatgtaagaccgtggactgttttttataatatggcctaattttaaaggtccaaaataacttgtttttaaagtttgcccttgtgctaaagtgccagtgtatgtatgttatacttgatttggttgtaaactatatttcaaagtaaaccctagtgtaataagttttataactaaaaaggtttaagctgctaaaactatttttaagagatgtgaaatgcagtatgggactatctttttttcctcctctaagcccaaagattaactagagtccctccaaccttatagatttttggctttcacaatcttataacctaggatacaggtagtttcgagtatggtgccagtgatgttttgtttttgtttggtcaaggggtaggtgcaacccaatggaccacttatgcaaaagatgtaaactcttgcataatacatcgataacatgttttgccaactttaaatgcttaaacataagcgaaaccagtagcaagtatgtgggtcagtttaaaaattttgattgttaatgccctattttctaatttggcacctcttttgatgcctaagcaggtaagcagatgcctaagctgtatttctccaaataaatcaagaggaagtactgcccaagttaaatattgatagcctaaagacaaattcatgtagtacttaatgtacatgatatgaatttgaagcataaaattaaatttttccccattgaaaaaaaaaaaaagtaaa

SEQ ID NO: 11907 - DNA, 1628 bp, Homo sapiens
aaatcgcctgaagatagtctttcaaatttggacatttaaaaaagaaacttttactgtagtcatgaagtagtatcaaagtttaccacaagtttgtattgagagaagaacaaacaatatatgctaatatgaaaaacagctctacttagaaagctactgcttgggttttcttattaggcatagttctccagactgagttggttttactcatctacatgatttttccttgccttatggaacagaaattcaggcccactcgaattcagttattttagggctctttaaaatccagtatttgtgatttaaatgatgcggagggactttcattacctgtgtctttgcttatttctctctggccctcagaacaccccaccctgacctttaggggaaattgacagaggcagagggtttcacctgcctcaattgtcaccagccctgttacattcttccttccaagccttagcctcacagggaccttctcattattgaacaattgccttcaaagcagtagaatagcccaattgttatggagattaaagataccgattgcaaaactcctgtaaataaaatcttcactgacaaacccagtttcttttcataggcttttcttctgtaatctctttctggcagaacatctcatgttttgatgttagagattcagttaccaaccacagtaaataaagcaaaataataatagaaaaatagtatagaactcaccctaaaaacaaacattggccaaccatgtttattttttgtctctctttgcactcctgagaattgataggggaagaatgtaccacctctaattcaggtgatttctgattagcaagctatggaaagtcttcaggttgagttttagccagttcacgctcccctaaatggcatggaatagactattttctgttttaagaaaaaatagaacaatggcactaaatgcttgactgaatgtttgactaaatgttgactgaatcatggataggaaagattgggcagaaaagacagccactgcctccagacacaggatgccacaatcctgggcaccatcattattccatacaaccttagggtcatttttagggtttagaactttctcaatagggtttcaagattttgaaaagtgtcttccaattctgatctccgtagatcctgttatgggaattaacctttttggaaggggattcttgttcttaaagatgaaattccctactttctttcctggagggaatcagtatgggcagagggaagaggagatggcgattctgacctgtgtgtctcatgtcacctaacacctatggggtggcatgaaacttgagctttaaaacacaccaggggccaggcacagtggctcatgctggtaatcccagcactttgggagaccgaggtgggtggatcacctgaggtcaggagttcgagaccagcctgccaacatggcaaaaccccgtctctactaaaaatacaaaaatcagctgggtgtggtggcgggcacctgtaatcccagctacttgggaggctgaggcaggagaatcgcttgaacctgggaggcagaggttgcagtgagccgagatcaggccattgtactctagcctgggtgacaagagtgaaactccatctgaaaaaaaaaaaaaaaaaaa

SEQ ID NO: 11908 - DNA, 1628 bp, Homo sapiens; identical to SEQ ID NO: 11907

SEQ ID NO: 11909 - DNA, 1628 bp, Homo sapiens; identical to SEQ ID NO: 11907

SEQ ID NO: 11910 - DNA, 1628 bp, Homo sapiens; identical to SEQ ID NO: 11907

SEQ ID NO: 11911 - DNA, 526 bp, Homo sapiens
gtagccacacagcagcctcaatgctttgctgcttaagtatttcttccacaaatatcctagttcatccctcttaagttctgcattccattaagtcctaggacacagacacaatttcacccagctctttgcaaccttatattttataaatatggcctttactccagtttccaataccttgttcctcatttctatctgcagcctcatcagaatggcctttaccagcattctaccagcactctggtcacatacacttaagtaatcacttaagtaatctctacgaagatttagacttcccctagttctaaggtcttctttcagagccctcaccagaattgcccctaatggcagaaccgttcttggcaatgcaggcttttttctagcctgctcctccaaacttgttcagccttcacggttatacagttccaaagccacttacacactttcaggtatttgttgtagtaacaaccccacatcttggtaccaactttctgtcttagttcttttgttaaatgcctgagactgggta

SEQ ID NO: 11912 - DNA, 414 bp, Homo sapiens
agaacatctcaagataaaaagggaggaagaaataatgtgactagggattgcacttcctggagttgcaggtcacatgagggacacgaacatggtggtttgattaagtctcgcgggattataacactgttgtggccactctcactccattagtgcatctctccgcacatatcagatagcaaattatataatgataaagttattaaaatatctgtaaaagtcagcacaagctcaagggctcgacttggcctttctgcccactaagtggtttatttagctctctcatctcaaggccggttaatcttcatctatactttgttgtaaatcacccgctatgtggaacagccataactgcctgagttttaagatgcgcttctgttggtcgtccaacaaggctggtatcttaaagatgaatgc

SEQ ID NO: 11913 - DNA, 1644 bp, Homo sapiens
gtagccacacagcagcctcaatgctttgctgcttaagtatttcttccacaaatatcctagttcatccctcttaagttctgcattccattaagtcctaggacacagacacaatttcacccagctctttgcaaccttatattttataaatatggcctttactccagtttccaataccttgttcctcatttctatctgcagcctcatcagaatggcctttaccagcattctaccagcactctggtcacatacacttaagtaatcacttaagtaatctctacgaagatttagacttcccctagttctaaggtcttctttcagagccctcaccagaattgcccctaatggcagaaccgttcttggcaatgcaggcttttttctagcctgctcctccaaacttgttcagccttcacggttatacagttccaaagccacttacacactttcaggtatttgttgtagtaacaaccccacatcttggtaccaactttctgtcttagttcttttgttaaatgcctgagactgggtaatttataaagaaaataaatttaattcacagctgggcacagtggctcatgcctgtaatcccaccactttgggaggccaaggcaggcagatcacttgaggtcgggagttcgagagcaggctggccaacatggtgaaacccccatctctactaaaaatacaaaaaaaaaaaattagctgggcatggtggcacacacctgagtcctagttacccgggaggctgaggcaggagaatcgcttgagccggggaggtggaggttgcagtgagctgagatcatgttactgcactccagcctgggtgacagagtgagattctgtctcaaaaaaaaaaaaaaaaaaaaagaaagaaagaaaacaaaagaaatttatttcatatggttctggaggcagggaagtccaagagcatggtgctggcatctggtggggtccttgctgcattaacccaaggcagaaagcaaggggcacaagaaagcatgtgcaagagagcttgcttttataacaaaggcacttcaccaataacccactcacatgattatggcattaatccatttatgagggcagaatcctcatgacccgtttgctccctgcaaaggcctcatcaacaccaccacagtgggatctaagtttccaacatgtgaacttttgagggacataatcaaaccacagcacaagtatattagtttcctgtggctgttttaacaaataaccacaaacttggtggcttaaaacaacagaaatgtattctctcttagttctggaggccagaagtccaaaatcaaagtgttggcaagaccatacattctctgaagcctctaggggaggatacttccttatctcttccagccactggtggcattccttggcttgtgactgtatcagactgtatcattccaacttcttcttccctctttatatggcctcctttgtgtcatctcttttgtctaaggatacatgttactatatttagacccacccaggtaattcatgatgaactcaaaatccttcacttaattatagcttcaaaggcccttttccaaataaggtcacattcacagttctgggggtgaggaaatggttctggagccaccgttcaaactgctgtatctttgtacaaaagacagg

SEQ ID NO: 11914 - DNA, 414 bp, Homo sapiens; identical to SEQ ID NO: 11912

SEQ ID NO: 11915 - DNA, 1644 bp, Homo sapiens; identical to SEQ ID NO: 11913

SEQ ID NO: 11916 - DNA, 414 bp, Homo sapiens; identical to SEQ ID NO: 11912

SEQ ID NO: 11917 - DNA, 1644 bp, Homo sapiens; identical to SEQ ID NO: 11913

SEQ ID NO: 11918 - DNA, 5261 bp, Homo sapiens
gatatatgttgggtaaaggaggaaaacggaagtttgatgagcatgaagatgggctggaaggcaaaatcgtgtctccctgtgacggtccatccaaggtgtcttacaccttacagcgccagactatcttcaacatttcccttatgaaactctataaccacaggcccctgacagagcccagcttgcaaaagaccgttttaattaacaacatgttgaggcggatccaggaggaactcaaacaggaaggcagcctgaggcccatgttcaccccctcctcccagcccaccaccgagcccagcgacagctaccgagaggccccgccggccttcagccacctggcgtccccgtcctcccacccctgcgacctcggaagcactacgcccctggaggcctgcctcaccccggcctcactgctcgaggacgacgatgacacgttttgcacctcccaggccatgcagcccacggctcccaccaaactgtcacctccagccctcttgccagaaaaggacagtttctcctctgccttggacgagatcgaggagctctgtcccacatctacctccacagaggcggccacggctgcgactgacagtgtgaaagggacctccagcgaggctggcacccagaaactcgacggtcctcaagagagccgcgcagatgactcaaaactgatggactctctgcctgggaattttgaaataacgacgtccacgggtttcctgacagacttgaccctggatgacatcctgtttgctgacattgatacgtccatgtatgattttgacccctgcacttcctcatcagggacagcctcaaaaatggcccctgtgtctgccgacgacctcctcaaaactctggctccttacagcagtcagcctgtcaccccaagtcagcctttcaaaatggacctcacagagctggaccacatcatggaggtgcttgttgggtcctaagacccagggacccagcgactatgcccacccagaccccagagcgttcccataaccctgacagttctccacactgtgcatgcacccttgcttgcctttttcagagaaaaagaaaattttacaacaggatcacactagtttttgctttgagcagagttggagtgccttcatccaagtatgaccacttttaatacacttttttgagtggttcctcagagacctactaccctggtataggaaagaatccatttgaagacaatgttgcaatgttgaatgacaaaaataaacagttcaagtgaagcacaaggattaagttggaaaagctgtaaattgcatgtgcatatttgtctattttttctataagttttattgcaagaggtaaagaagaaaactatatatatatatcttatttagataatctcagtaccttttctggcatttttgccctgtataggttgacttggcaattcggcctttttagaggcattaactactcctcgtaagtgttgcatttacatggctgtttagaaaactgctgcccaaatttattttatatttttgtacagattctgcagtttatgatattgtttttctaaaaacaaatgctgtttatacatatgagatagctattttgataggatttgctcacatagttcctgcaaacttcagatgtacaagttgcacttgtacttttatagagttgtaatgttttatatgtgtatggtgcaagagaaaattggatcaaatcaatctgcagttgatgtccccaaatgcaaacacaggcacacacatgcacacacccataaacacacacacagtgctttaagaaagggccaggtgatatcacacccaaatttcacaagcactgaccccctggcaccaacacccgccagtactgtgacttccaaagccagagccacatgtgctcatcaaacttgcattaagcagttggcgggagatggctgtggagctgggggtttaagtgatggttctcttttgctccctcttttgagggtaaagctactgtctttcttaagagtgtatttatgccaagtttgcgcttttaattgtttttattttgttttttaatgaaaacccagatctttcctttttggcataatttttatgatgacctgaaattttacatccgaacaaaattttacatccgaaaagcaaccaacttcttcatggaactcagccctgttgcaatgcttagggcccttaaagaagaaaatctccccagaaggcatccatcatgttgcttaattgtcttctgcagcttcctttccctagagctttccctgtgttgctaagagctgaaaatggcatcttcgtgatcaccacagtgagcttggctcgcctcggccggcccgggatgcactcttacaacatgtgtgactcttgaacctggagttcatcacattacgtcacagcttcccatctggttgctttcctgagtcagctacttcacacttgtcaaggctgttttaccccaaaactcagacaggactttctatgcatgttttccctcctccccccaattcccccccccatcaccttatctcccaggacacacttgagaagtagctttttattcctagtggtgtacatttaattttaaaaaggttgcaatgtatcatgcttgttgccgaaactgtttatggccttcttgtttcagttttttcttttcttccaatggtactttagctgttgagtgcaggttacaacctatattgttatgcagatggcttctttaggaataacttttatatttatttaaaaatttttaaattatgggatgttttgttgttgttgttgtctttgttgttggtcatttgtcaatattcagtcaccaattctgctcacttcttgccatggataaaattgggtctttctggctaattaaaaaagacaactttataaaatggcactttaagcaagccatagttagttttatttttgtaatgcacatggcaaagcaaagacgtttgtgatgaaggaactgctcatctaagcaaaagatttgagtatgatatgataaaggctttctacattctaatttactttttccccccacttgaatgtgttttaaaggctaattatcagctcagtagagcagtgagaaactgatcaaattgcacttgttctcctacaagcaacctccacgcagacacctcgtactgctacaggtgtgtcatttcctttaataggaccagggaccatgtaactgaggtgagggttgtagtagatgcttccagtgtcagtatgcctgttaattttaagagcttccctttcttgcagagaacaagtctgcccagattccatgctttctataactggaggacctggcaaacctgccgcatgctgcacacatctacctacgtacacatatacaatagtattgatgattctgaacaataacagggtaaaacagttggtttgccattgttaaaaactgatttacagtaacttacaacaactgtacttttgttggattagcaaatcatgtgtttaaacaaatcccatatgttgggcaacagttcaaataagcacggagaagtgttgcccaaacttggttctctgactcttatgtatttgtaaggctgggcttcaaaatcaaaacaaaaaccccaaaaacagcaggcaaatgctttttaactctgacaccgttgccataaatccctgatactcaaagtctaacaagaaagacatggaaaattagcagcccattttcagaaagatcaaaatgatctagggttctaattgcttttgcatcctattcttacaaagtgatgtcccaacagggaacagtaggagctggagtgggatctccaagtcccagtttgagtgtgggatgtgcttccagcagtgccttccctttatgaaagacatcacatggcatccagggccaggcaggcagcttgaggtgcctttacgagaaaaccgagctggggctgggagaggacagttattgacactgatgtgcaatgaagtgacaagatgagagcagaatcgtaagagctttgaatttgaagtgagtttttttccccccataagttatttattccttttttctgtgtaaatatatttattttactgtggagcgctaacatctggatcgtaacatgtgcagaatgtatggtaggaatgtattctcttgtaggaatgtaaatctgtattaaaagggggtccaagccaggcccccaggtcttctcattgtatgcacagtccgcattcatttttactcttctctaatatgggtctatttgaaatatgcaaaaggtatgaggaatgttttaatacctccaaatttttaagaaaagcatcaaagggttgatattttttaaagtttttttagtagcactttctctggatgacagaaggagcaaccacatgggcacccttgttcataccaaagggtgagcagtggccagagcctcctctgcacctctcgagtgtctttaccaattgagctttttatcgccatagccccttggagtgccccagctgccctgaggtcaatcaaggaaaatttcttaatgaaataagctccaaagagccaaagtatcaacttacagatcgtttttaaagcttaaatttatgaaccacctttgtggtaaacaatgaattatgaataccgcagggcagccttcttaaatgacaaatgtaaaaaaaaaaaaaaaaaagactctacttcgtgcagcaattgctactctatacgaattgtcttaatttgaaaaccttgctgttacaaattggacctttatacattttctgaaaacaatgaaaagagtatatttaaccttttctggctgtaaatggttaccttcctgtaactgccccgcacctggaggcatggagttgtgtgcatcctgcttatgtacaattgttttcagtgtttctaagaatgagtctgaatggttcttgaaaattagccaggatcaaatgctattgcagacaaagccaataaaaagttggacttcttttggggataacaagttttggaagagaaatgcaggccatatgtgcgcatgaccgagattttgaaaaaagatgtacatagtgacatgtttggtgcatggtttttgaggagggcttttgtcaaaaaggaggtataacctttcccccacagacctgagagctgtgccttttctatgcaatattacagacgttacatcggaacccagatggctgtattcacatgtaggtttgggctgtaatctaaacaattggacagattaaatgtacatggaaatgagcagtcttacttttgtagttttatattatacaataaacagttaaaagatgagagag

SEQ ID NO: 11919 - DNA, 2054 bp, Homo sapiens
gtgcagctggacgctgaccacgactacccaccgggctgctcatcgccttcagtgcctgcaccacagtgctggtggctgtgcacctgtttgcgctcatgatcagcacctgcatcctgcccaacatcgaggcggtgagcaacgtgcacaatctcaactcggtcaaggagtccccccatgagcgcatgcaccgccacatcgagctggcctgggccttctccaccgtcatcggcacgctgctcttcctagctgaggtggtgctgctctgctgggtcaagttcttgcccctcaagaagcagccaggccagccaaggcccaccagcaagccccccgccagtggcgcagcagccaacgtcagcaccagcggcatcaccccgggccaggcagctgccatcgcctcgaccaccatcatggtgcccttcggcctgatctttatcgtcttcgccgtccacttctaccgctcactggttagccataagaccgaccgacagttccaggagctcaacgagctggcggagtttgcccgcttacaggaccagctggaccacagaggggaccaccccctgacgcccggcagccactatgcctaggcccatgtggtctgggcccttccagtgctttggccttacgcccttccccttgaccttgtcctgccccagcctcacggacagcctgcgcagggggctgggcttcagcaaggggcagagcgtggagggaagaggatttttataagagaaatttctgcactttgaaactgtcctctaagagaataagcatttcctgttcttccagctccaggtccacctcctgttgggaggcggtggggggccaaagtggggccacacactcgctgtgtcccctctcctcccctgtgccagtgccacctgggtgcctcctcctgtcctgtccgtctcaacctccctcccgtccagcattgagtgtgtacatgtgtgtgtgacacataaatatactcataaggacacctccttcccgtgtcttgtatttgttgggcctgggctactgctcaccctggttaggtgagcctctaggaaaacttaaaacaaattttaagccaggtatggtggcacatacctgtggtctcagctattcaggaggccaaggcaggaggatctcttgagcccaggagtttgagaccccatctcaaacaaaaaatacaaaaattagccagccacggcgcctgcacttccagctcctttgagagactgaggcaggaagattgcctaagcccaggaggccaagtctgcagtaagctatggtaacaccactgcactccaacctgggcaacagagggagactctgtctctaaaaaaatagaaaaatttgccctgcatggtggctcacgcctgtaatcctagccctttggaaggccaaggcgggcagatcacttgaggtcgggagttcgagaccagcctgaccaacatggagaaaccccatctgtactaaaaatacaaaattagctgggtttggtggcgcatgcttgtaatcccagctactcgggaggctgaggcaggagaatcgcttgaacccaggaggcggaggttgcagtgagctgagatcgcgccattgcactccagcctgggcaacaacagtgaaactccgtctcaaaaaaaaaagaaaaaaaaattcaacattttattttgagaaatttcaaacctacaaaaagttgcaggaatagtgtctatctgaaatacatattcagtcttttctttagaagtcttttttttttttttttttttaaatagagcctcactctgtcacccaggctggagtgcagtggcgcgatctgtaaaatcactgtgagcactgacttagcacatactggaccgttgctcctaggagaaatacagggttgcgttcctgtgagctttggtcgtgatattttcatcagctgatcaatatgtaatcttgttttatgtgtatttctgtttaaagattcatatatatatgtgtatatatatatatggttgagttgttaccgttgaactcacagcccacaggactagaacacatgcctaaataaagtttatctaacatac

SEQ ID NO: 11920 - DNA, 285 bp, Homo sapiens
tttttttttttttttttttgagacggagtttcactcttgttgtccaggctggagtgcaatggtgcgatctcggctcacagcaatctccacctcccgggttcaagccattctcctgcctcagcctcctgagtagctgggattacaggcatacgccaccacgcctagctaattttgtatttttagtagagatggggtttctccatgttggtcaggctggtctcgaactccagacctcaggtgatccacccacctcggcctcccaaagtgctgggattataggtgtga

SEQ ID NO: 11921 - DNA, 14035 bp, Homo sapiens
gggcctcaccccagacaagcggttcctccctgggcacctgggcatgggacttgtggaaggtaagggaggacagagcttgcagtgggtagtgggtggtgtcgcccaagtccctgagggtctcaggtgggccctcactgagctcgactctctccctgcaggttatgattccatgggctatgaaatgtctaagcctgacctccgggctgaactggaagctgatctgaagctgatctgtgatggcaaaaaggacaaatttgtggttctaaggcagcaagtgcagaaatacaagcaggttttcattgaagcggtggctaaagcaaagaagtaagtccttaaaagaaatacagaggggtctcactatgttgcccaggctggtcttgaactcctggcctcaagagatcttcccacctcagcctcccaaagtgtggggattacaggcgtgagccaccgcatctgggccagtcagagtttataaccctgccagattcatcctcaccagtggcctcctggcctggaggttttccacataccccttttctttggactttcttctctgggttcttttacaactctccatagagctttgtcagtatagaaacagtaatcggaacagtctccttcagttattctgaactattggctttagaaataccattctcttgattttaattatcttttttttttctgctttaattacatgacacattaattatcttgagttaggcaacaaagtcttttaaatcagtaaacccaagtgctggagtgtgatccatttgttttctggagcatttagaggtggatatttagcaagcagcatgtgtgtattttgttagaaatgatgtgttttctacctgtgatattatgatttataataagatatatatatttggacttcattttctgatacccttggaattttttaagtgctgtgtctgttgtatacaaatgagatgactagtggccaagggctcctgggtagccttgggatcggtctggttgtcagggaaccaaccctgtgattagaaggttgggactttgagtcccacccctacctcaggaagagcagaggggctggaggttgagttgatcacacgtggccagtgatttgtcaatcatgcctaagtaataaatcctccataaaatccccaaacaagggtcaggcacggtggctcacgcctgtaatcccagcactttgggaggccgaggcgggtagatcacaaggtcaggagttcaagaccagcctggccaacacagtgaaacccctttctctgctaaaaaaaaaaaaaaaaaatacaaaaattagccaggcatggtggtgcgtacctgtagtcccagctacctgggaggctgaggcaggagaactgcttgaacccggaaggtggaggttgcaatgagccgagattgccccactgcagtccagcttgggcaacagagtgagacttcttcaacaacaacaaaaacaaatcaaacaattgggtttggggcacatccaaatagctaaacaggtaaagactcctggagggtgggtgtttgggagagggcatggaagctaccccttccccacatcccttgccctgtgcattgcttccatctgggtattcacctggatcctttgtaattaacgggtaagcataagtaaagtgtttccctgagctctgtgagccactctattgagaatcaaaccaaggagggggtctgaggaaccccagtttatagccagtcagtcagaagcacaggtcacagcctgggatttgtgactgacatctgagggaatttggggcagcagtcttctgggactgagcccttaaccgttagatggatctccaggtgcatagtgtcagaattgaattgaattagaggatgtccaactggtgtgtggcgggagagttgcttggtgtatggggaaaactcccatacatctggtgtctgatgtgtgttgtgagactgtaatagaagataacagtttgttattttctgttctttagagtaccccatgccagttgtgaaaaggcaggcatgagctagtttagacttaatacagacagacactcctggagtttgtacatggaccctgtgcagttttactttttttttttgagatggagtttcgctcttgttgcccaggctagggtgcaatggcgtgatcttggctcaccacaacctctgcctcctgggttcaagcgattctcctgcctcagcctcctgagtagcttggattacaggcatgcgccaccatgcctggctaattttgtatttttagtagagacgggtttcaccatgttggtcaggctggtctcgaaattacaacctcaggtgatccgcccgcctcggcctgggattacaggcgtgagccaccacatttggcccagttttactttttaatgtgggctggtgacaagcagaagcatctgcctgtatctggactctcctcccaagagttggttcggcaccagggcccatggtgagctcagtcttctgtctgccgtctgttctctgcaggaggcctgcggctcactgaccagctggttctcaaggtcacgcctgttgtgtgcatgtaagagtgttgtaggtgcctttgcagcgattgctggctgatgggtgtctgtctttgccttttcttcagattggacgaggccttggcccagtactttgggaatgggacagagttggcccagcaagaagatatctacccagccatgccagagcccatcaggaagtgcccacagtgcaacaaggacatggtccttaagaccaagaagaatggcgggtgagtgcgctgccttctgcccccacctctgctccccagcacctgcggtgtcagccgtagctcgaaagaccctgccatttcactccatggaatctttcaagacaggcctgttgttgccaacctgcaggcaaggtgttggcctaaaagcatagcagggtgggatcaggcctttgaggtgtaaagcactatgggaattcagagcaggtgagaaactgaatgatagtggggtttttttgtcccctgtggataggacatcatatacccaatgtgtaacacatggaggagcatgagcttcagatctaggtgggtctgggttcaaatgccacttatgccgcatataagtggtgtggcctgaagcaagttacttacctgctctgaaccccaatttcttcttttataaaatgtcagtacttacaaggctgtgttaagggtgaggatttggtgaaaatggtcaggactatatagcacattgcctgatgtgttgtagatactcagcagatactacttttgttctctcctagttttagttctgaatggggcctgaaaatctcaactcccttttcgctttaaatatagtagatctgagtgggcaatttagcttcacatcaggttgttggagccagtggctggccactggaggaagttcacggggaaagacgaggtggaggggtggcagccatcattcatcaggtgccgtccctcactggtgtaatgcagggtggtgctctgtaagcattacctcatcccattctcctaactaccctgcaaggcagggatttttatgcagcttagagggctgaggtgcttgcttggagtcaagcagccgtggtgggcagcagagtttgaaaccgggttttcactgcctttttccatcctgcctggcccacctgggactgctgtgctccttgctgctgaataagaaaggaggtttctcaactcctcacctccagccatcattaacctggctggcccaagtgaagagaaggccacccaggctctcagaaacaagaggtctatgggccagacctggaagcaggtgtcagggctcgcgtcactcacagacagaagccagtgccactctaggcttagcccaatgactgggcgtatatttcagcacttaataaatgctgtcgatgggttttccttgctatcggtaggttattggattagtactcattggaatataaggagagagaataactacttttgttttagctctgaattctccaattctctgaattggagaattattattattctttagttattcgtttgttcttctgttattcttttgtaatgcttctctgagttactccagaaggtcaggagattatcttgtgggatttgccactccatgatttatctgttaatttccatttctgagattgtaaatttcttatttaaatgattggagttcggggcttttttttccttcatagtgtacccaggcacactcatgaggaatttgtaaatcacatgcatattagctagtcaaaccctaacgtttcatgactgcaaggtgttgaaaaacattggccaggagagaccgggatgggatggatgggcagtgggtggggtgtagatgttgcaggtgaggctttgtcacaaacagatgggtttccattcctggctcccatccacacatgcatgcatgtctctgggcaggtttccaggccacaccaagccactgtttactcacatgcaaactgagggggcccctgacactgcccagacttggcacgaggcagaaaggcaagaatgtgtgagtgcacagcacagagcccctggcgtcagcttggttggttgttggttttctaaatagaaagcagggccagcaatagctgctttgtgcttttgggatgtgagaaggctcatttttcccaatcaattcaatatgagtgcttgtgtatccagttaagtgtcatccagaaaagggaatgttgtcctcgggcagctgaggaaaggctgccttagctgatggccaacagcggagagcatctcctgcactcctatcatctgacatggcactttgtccccaggttctacctcagctgcatgggtttcccagagtgtcgctcagctgtgtggcttcctgactcggtgctggaggccagcagggacagcagtgtgtgtccagtttgtcagccacaccctgtgtacaggtgagctgggcacctgagtcaggtgcctcctctggagtgtgtacaccatctttcccttgctcctgccagaacccagagaggagtgtcggggattccactcaggccctgcaggggcgtagctgtgttctgcagcagccagttcagcagggctggtccagttctgttgtgttccatgctgtcactgctttggcaggtatgaccctgtttggagtgggccatgggcaaagaaccatgaagggctctttccctgccctctccagatagatgattgctacaccaggcttaggaaattattcacatattaaatacaacatccaagcttgggctacgtagcaagaccccatctctttaaaaaaaaaaatttttatttaaaaaaaaattttttttaagacagtctcgctgggttgcccaggctgaagtgcagtggcgcagtcttgactcactgcaacctccgccttctgggttgaagtgattcttctgcctcagcgtcctgagtagctgggattacaggcatgcaccactatgcctgaccactttttgtatttttagtagagacagggtttcaccatgttggccaggctggtctcgaactcctggccccaagtgatccacccaccttggcctcccaaagtgctgggattatagatgtgagccactgcacctggccaaaaaaaattttaaattagccagatgtggtgacatatgcctataggccaagctggtcaggaggctgaggcaggaggatcgcttgatcctagaggtctaggctgtagtgagccatgatttcaccactgctctccagcctggaatgacagagccagaccctgtctctagaaataaatgaataggccgagcctggtggctcaggcctgtaatcccagcattttgggaggccgagacaggcggatcacgaggacaggagatcgagaccatcctggctaacatggtgagacactgtctctactaaaaatacaaaaaatggccaggcgtggtggctcacgcctgtaatcccaacactttgggaggccgaggtgggtggatcacgaggtcaggagatcgagaccatcctggctaacatggtgaaaccccgtctctactaaaaatacaaaaaatcagccaggcgtactggtgggcgcctgtagtcccagctactcggcaggctgaggcaggagaatggcgtgaacccaggaggcagaactttcagtgagccgagattgcaccactgcacaccagcctgggcgacagaatgatactctgtctcaaaaaaaaaaattttaataatttatttctagtaaatgcattgcatactactgtaaataacttgttttttagggtaataaaatacctattttcaaaagcaaaataataatgacattaatgacattgttttacattttgcaatttgtatgtctggcttaatagaagagagctggattcccgtatctgcttctgcagtcagcctgctgagtcattgcatgtgctggaacctccaggaaactccgttgtatacacatggaagaataagagcaaaatagacataacctcttagaattttttttgagacagagtcttgctctgtcaccaggctggagtgcagtggcacaatcttggctcactgcaacctctgactcccaggttcaagaggttctcctgcctcagcctcccgagtagctgggactacaggcgcgtgccaccatgcccagctaatttttgtatttttggtagagatggggtttcaccatgttggtcaggatggtctcaatctcttgattttgtgatccgcccgcctcagcctcccaaagtgctgggattacaggtttgagccaccacacctggcctataaaagagttttgcactctccttgaaagggctcaggcaccctggaaccacacttggagaactgctgatacagagacatgggacttctcagaggtgtttttattttagtgaattactgggatcttagatttcatctgcactgtttcccactgtccactcctgtgatgactggtgggggcttgtggtgggctgatagagggcctcacaggggacttgtgtgggcttcctgatgcataaggaatggtggagagaggcctagggctaaagcagccctcactggactaaggagaagctggcatctggttgttaatgttttttctcatcttctggcctcactaggttaaagttaaagtttaagcgcggtagccttcccccgaccatgcctctggagtttgtttgctgcatcggcggatgcgacgacaccctgagggagatcctggacctgagattttcagggggcccccccagggctagccagccctctggccgcctgcaggctaaccagtccctgaacaggatggacaacagccagcacccccagcctgctgacagcagacagactgggtcctcaaaggctctggcccagaccctcccaccacccacggctgctggtgaaagcaattctgtgacctgcaactgtggccaggaggctgtgctgctcactgtccgtaaggagggccccaaccggggccggcagttctttaagtgcaacggaggtagctgcaacttcttcctgtgggcagacagccccaatccgggagcaggagggcctcctgccttggcatatagacccctgggcgcctccctgggatgcccaccaggcccagggatccacctaggtgggtttggcaaccctggtgatggcagtggtagtggcacatcctgcctttgcagccagccctccgtcacacggactgtgcagaaggatggacccaacaaggggcgccagttccacacatgtgccaagccgagagagcagcagtgtggctttttccagtgggtcgatgagaacaccgctccaggtgaggcagggaggggcatgggaatccctgccttcagttttcaggtgtttacctcagagactggggacagcagaaagaaggcaaggcagggtcatggtgggattgggaggggcacctgggctgccttgcacctcacttttcctcacttgatcactttcagcaaggtgataattgtacagtcctcattccaaattaaagggtagctaccagtaatggtgtcacttgccctatgcctggcactatgctaagtatacttcctgtgcatcttccatcctcattgggtaagcattatgatcacaattttacttataagtgagaaaggtgagacccagacacatgaagtgggtattgctcagggtcccatagcaacagacaccaggatgagtacataggccttcccagtcccatggccatgtgcccttgcagctgtcgtgacccttggcagaccataagcatcagcctcatttctttttttttttttttttttttggagactgagttttgctcttgttgcccagactggagtgcaatggtgcaatcttggttcactgcaacttccacctcccaggttcaaatgattctcctgcctcagcctcccaggtagctgggattacaggcatgcaccaccacgcacagctaattttgtatttttagtagagacgggggtttcaccctgttggttaggctggtctcgaactccacctcaggtgatccacctgccttggcctctcaaagtgctgggattacaggcgtgagccaccgtgcctggcccagcctcatttcttcagatgaagatgccaaccccgatgatatttaggaacctgcccagggtgacacagcttgggccaatgtccgggaactgggtgtcatgagaagtggcacctggacattgcatcaagttgaatggtgtacgtggaggcactttgaatggttcctcctgctccagtgcacaacagagcttaagtagctgagaatgacccaaaggcctagtgggagctttggagttgagcaaatctggttccaaagctcagcagtataaccttgaacaaatgacttagcctctctgcctcaagtttgctcaacaagatggtccctgcctacattcatagggttcctgttttagaaaggagtttagtctcagactatgattcttacacatgtgtcactagcccggcatgcacagaaagaaaccagaggtttggtaaaaactgtgggacttggaactggctaccagtgctaatggggcccagagatggccattgcagtgagagacccacatttgaagtgagatgcagtctggcctcttgtctccccacttggaaggacatggtatctgacctccaggctggctgactgactgtcctgggtaaatgagcagctggtctggaaaggcctgttgaggggacaggaagggatccagagctggactttcctgcatggaggtgggccgcaggttgccggtcataggctgcttgtctttcccaccctaccacacaggccagcttgcttgggtttctgcctctgtaaaaagggccggcatgaaagtccacttaccaagtgagtgtgggacaatgtctccaaagcttaggattcttgagggagaggtgtcaggtaacataaggcagcaggcacatcgcacctcaaccttacagagttggacacagtgtgaagggaggctggctggtggggtgtacatggctgtataaaaactgattcagccggtcgggcgcggtggctcatgcctgtaatcccagcactttgggaggccgaggcgggtggatcacgaggtcaggagatcgagaccatcctggctaacacagtgaaaccccgtctctactaaaaatacaaacaattagccgggcatggtggtcggtccctgtagtcccagctactctcgggaggctgagacaggacaatggcgtgaacccgggaggcggacttgcagtgagccaagattgcaccactgcattccagcctaggcgacagagccagactccacctcaaaaaaaaaaggccgggcacggtggctcacgcctgtaatcccagcacttcgggaggccaaggcgggcggatcacaaggttaggagatcgagaccatcctggctaacatgatgaaacccgtctctactaaaaatacaaaaaataaagtagccgggcgtggtggcgggtgcctgtagtcccagctactcgggaggctgaggcaggagaatggcgtgaacccgggaggtggagcttgcagtgagtggagatcacgccactgcactccacactccagcctgggtgacagagcgaagactccatctcaaaaaaaaaaaaaaaaaaaaaaaaagtgggtcaaccctatcggctgccgccctttttttttttttttttttttttgagacagggtcttgctctgttgcccaggctggagtgcagtggtgtgatcacagctcactgtagcctcccaggctcaggcatcctcccgagtagctgtgaccacaggcatacaccacacctggctaatttttgcattttttaaagacaaggtttcaccatgttgcccaggctgatcttgaactcctgggctcaagcaatcctcctccctcagcttcctaaagtgctgggattacaggcatgagccaccgtgttcaggacttgccacttctgcatgtcagttctaacctcacccctcccctgactctcccgacagggacttctggagccccgtcctggacaggagacagaggaagaaccctggagtcggaagccagaagcaaaaggccccgggccagttcctcagacatggggtccacagcaaagaaaccccggaaatgcagcctttgccaccagcctggacacacccgtcccttttgtcctcagaacagatgagctcagggtagggtagagaacgccactttctcagacctgtcccctttgtgtttagaaatgagttaaccaggaccaagtggccatttagtgtcctggaaacttagaggacagtgttggcctttggagtcgggccttcttgtgttaaggggcacaaggtccagatcactctggagcaggccagctctgctggacagtgaccctcttcccaggcctcaggagtgaccatagccactgctgaaaagtcacgcagctgctccctcggaccccccaaggatggttgctgttagcagaggattggtgcagtcccagctgaagcccactgtgtgccaaaggaagaagctcccagggctgcttccttcacctgcagaaagccccaagtgagccaccagcactcatggggcagtccctgtccaggctgcccagggcttctcatagacgtcctgagaaggacggtgtaatgcaaggaaatggctgtggtaacactgatccttcagaagaagcttcattccctcttaatctagttaagccaggacatccagaattcattgctttaataaagaacccaggccgggtgcagtggctcatgcctgtaatcccagcactttgggaggctgtggggggcggattgcctgagctcaggagttcgagaccagccagggcaacatggtgaaaccctgtctctactaaaatacaaaaaattagccaggtgtggcggtgtgcgcctgtagacccggctactcaggaggctgaggcaggagaattgcttgaacccgggaggcggaggttgcagttagctgagattgcgccactggacgacagagcgagactcagtctcaaaaaaaatttaaaaatttaaaaaaataaaaagaatccaaccccggcagggcgtggaggctcacacctgtaatccagcacttagggaggccaaggctggaggattgcttgagatcaggagttcaagaccagcctgggcaacatagttagaccttgtctctatttttaaaaatataacaagcacagttgtacacgtctttagttcagctgctcaggaggctgaagtgggaggatcctttgaacccaagagtttgaggctgcagcaagccatgatcacaccactgcactccagcctgggtgacagagtaagaccctgtctcaaactttttttaaaatgaaagaatccaacctttttttactctgacctgcgagagtgcagagggtctggggaacatttgcagaagcaacaggtaccagccagtgctggaaggagctcaccctgggaggtctcgtcagcctctgtccttcatggctgtcccttgtgtcccatgtggagagcccttcctccctttccacatggtaagcactgagcccaatttcttctcaccccacagatggtccctcagagcagagatgtctaatgaaaggttcagattcagatcactaactttccatcttccactttttccagtggtggccatgttcccccgtttgccttcacaaaaaccttgtgaataatacaagccatatggactctgatttacagtttagaagatgagcagaggtgggtgtgagttgcccagtcatgttgctagttgttgaagaaactaggattgttctcaggtcttgggctcctggcccatagaccagtggctctgtgttctgatggggtattggggaggatttttacaaatgcaggttcctgagattgttcctggaacatctccgagtgggtgtgggttgtggccctgcgtgtgtgattttgcctatcccagctccggggtaccaccaaccactttttgtctctgtgggtttacctactctggatattttgtttaaatggaatcataccaggctgggcacagtggctcacgcctgtaatcctagcactttgggaggccaaggtgggcagatcacctgaggtcaggagttcgagaccagcctgaccaatatgatgaaaccccgtctctaaaaaaatacaaaaattagccgggcgtggtgtcaggcacctgtaatcccagctactcaggaagcagaggttgcagtgagctgagatcgggccattgcactccagcctgggcaaaaagagtgaaactctgtctcaagaaaaaaaaaaaaatgaaatcctaccatacatgacatcctgtgtctggtttctttgacttggctgatgtttgtcaggctcatccacattgtagcatgtcagtcctcgatgtttatgataagctgatagcccactgtatgaatataccacacgattatccatttgtcagttgatggacattgggttgtttccactttttggctattgtgaatagcactgttgtgaacattggtgtatgagtgtctgatgacttgttttcagttattttgggcatatgccgaggaatggaattgtagttttataccataactccatgttttgactttttgaggaacctacaaattttccacagtggatgcaccactttacacccaccagcagcacaccagggttactgcttctccatatccttgtgaacacttgttcctttccttttcttgtattatagccatcctagtgttttgtcatcctagtgggtatgaagtggcgtgtcattgtggttttgttttgcattttcctagtcattaatgacattgaccatctttccacaggcttactggccattggtatacattctttggagaatgtcgatttaagttcttcacccattttttattttttattttttatttttttttgagatggagtttcgctcttgtgcccaggctggagtgcagtggtgcgatcttggctcactgcaacctctgcctcctgggttcaagcagttctcctgcctcagcctcccaagtagctggaattacaggcatctgcctccacacccagctaatttgtttagtatttttagtaaagacggggtttcaccatgttggccaggctggtctcaaactcgtgacctcaggtgatctaccagcctcggcctcccaaagtgctaggattaacaggcaggagccatcacacctggtctcttcccccatttttaaattgtgttgtctgtctttgttgttgagttgtaggagttcttaatagtttctggatatcagatgcctttgtggttttcacatctctgcaggcaactgtgtgtctcaaaagcaaactgcaggattgggctgcaccatggactgggccaggcatctgagatcagacagacccaggctcagctcccacttcctggcctcttctgccaccctgggtgtgcagcctcatccttggagccccagttgcctcatccgtaatggggtgtccttgttcatattgaggctctctagtgaaggcttacggtcaggcacgactgcaaattaaagcttcacaaatcaaa

SEQ ID NO: 11922 - DNA, 114 bp, Homo sapiens
tttttgtatttttagtagagacggggtttcaccgtgttagccaggatggtcttgatctcctgacctcgtgatctgcccgcttcggcttcccaaattgctgggattacaggcgtg

SEQ ID NO: 11923 - DNA, 1307 bp, Homo sapiens
gctgagactaggcactggccaggctgtcacctacagtggtttcaacctcctgctgccagcaagacagcatctcctgtcctttttgtgcaggaaccatagctctgttgggttaagtgttttcctctaccaagcagctaacctggccttgaaacctaatctctgatgccatgtccccccaagccccatcagagttttgtaaaaagcccctccctgctctccacaccaatgctgagagcccatggggtaactggaggcttccctgccatcttggcaaagaagcctggctgacgtcctgcacatgcttccccaggtgattgcttgcacttaacagcagaggaaacgagaccaccccacacaacttgtagcagttgaggagtctctgcctgatcccaccccggatacttagagcatccagaattaaaaataagccttgtcaccaacatccggctcccccactccccagagccaggctcaatgtgcccaacagcgctggggcccgcacctggaggcactggcttttgagacactgggcagagaccccactgccctttgggatgaattcaccacctgcctcttatagaatccggccgaagacctgggatgttcacattcagctggatctccaggtttcttggactggaacacaggtggccccagctcaatatgctcaccagggtgttgccactcacctgttgaccgtccctaccagggacagatctgtgcaccccatccccaccttagaccaccagctcacacacaggtggtgttggtgcagtggttaatgttaggtgtcaacttcactagattaagggatgccgagatggctggtattttttctgggtgtctgtaagggtgttgccagaggagagtgacatgactcggtggactgagaaaggaagacctaccctcaatgtgggtgggtaccatccaatcagctgccagcacggccagaacaacaggtggaagaagggggatgagcaccttgctgagtcttctccagccctctccctcttccgtgccagatgcttgcttcctcttctctgctgttggacatcagactccaggttcttcggcatttggactctgggacttgcaccagcagcttcctggagccttctgccacagactgaaggctgcactgtgggctttctggttttgaggcttttggacttggactcagctatgctaccggcttctttccacagcttgtagatggcctattctgggacttcaccttgtaatcctgtgagccacttctccctaattaactcgctttctatatattacatacagcctattggttctgt

SEQ ID NO: 11924 - DNA, 22635 bp, Homo sapiens
gttcctgacgtcagtcgaaatggagatccgtttgtagctacctccatcgtggaagcgattgcgactgttgacagagctataaactcaacccgaacacatttgtttgacaggtatcgtggggctgtaaacacgctgaccctcaaatcactgagctttagggtgaaggtgggagtgattaaagaatgcatgcagttctaatatatgaattttgatttgattatctgatgatcaaaatgtttaatttaaaaatcatgaacaacatgggcatctgagttttctgggggttgaaataacagaaggatgtgtgcttttcaaatagaatttggctatgatccacaaccaaaacattctttgaaaatttcaactcattcctttggcttatgactaaatgatttggcaaaaacaaatagtttaaaagtcattagtgtatttgttcacgttgctgattccaaagcagtttttctgcatcttatgtgaaatgcaatatctgtgattttctctattgacttaattaattatttgtttttagtgtcttccggtttttgtctgtttgttttgtttttgttttgttgcctcccacttcggatgaggaaggtatagtacattatgttgtagaaagtagccgtagaaatattaatagcaatgattatattttggggtactatgaattttatcttcagtaatttgtttcattcttcctttcttccccctaaactctggttagccgtcctcgttctccaaatgatttgctggccttgttccggtatccgagggatccttacacagttgaacaggcacgggcgggagaaatctttgaacggacattgcagctcattcaggagcatgtacagcatggcttgatggtcgacctcaacggaacaagtcagtgccaaagccttttcttcctcctccatggcctgagtaacggggttgaacacgcctcagttaagtcacattcctagggaagagttccagcattttctttcccactgtgcttatgaactgtgaaattatttccttaaactgtgattcctcttgagccctacagccctgtcgctctcactttggtttaataggaatctctgggggacgtgaagtcccttggagtgctgatcaggctacagcaggtccacctgccctgagtgggttatgccatcctggccagggtgggttatgcaagcccagtccctctgcaacaaatgagccataagggaggacttggcagcgtgcttgctccctgagtgacgttgtgtcctgggaatgcggtgccacgcgtattaggagggttgttttggaagagtcccgggtctgtgaaaccagctgatgagatcacctcgggctggtgtggagatgctgttgggggaggtatgtcccccactcactctgctctggcactttgccgttgcccagtaaataacagatgcctttacatgtcacgattgtccttgctggtagtagtactattgatgaacccatagaagaccctgactttctcatgtaaaaacatcattttcagcagcagctggttactcatggttctgtacacacacacacacacacacacacacacacacacacagagcacggaggagaatgtaacagtagctgtccctgtgggatgaaagaactgctttataatttttcagttttccaaattgttttcattgagcataacttttacgattagagcaaaaaatgttcttcaatggttaaatgaaagagacgtggaattgagacctgtagggtgatatatgcccgtcttcggagtagagtgttgctctgagccagccccgtcctgttaggttttggagccctgttggtgctgaagcctgggcaccagccaatgtgaagctgtatgttccgcagctcctgcttcctgatcctctcctggcctctcgtggctgggggcgggggtgggggcagggcaggaaatgttggagttggagacctctggatgtttctgcttttctcgatgggtgaaactccagcctcacctcccaggcacattcttggggagaagcatcagagcccattttgttatttcaacaagtatttattgggcactttctgcttgtcaggtgcagggggagactaggatgagaggtaccaggcatgggtcccagccccttcccaagtccctggtgccagtctcctggtagaaaggccatgttctcttctccagagaatgaagagggagttactaagtgtaatttcttgctactccctacctttcttcatttagttacaggatcagatctttaaacattactgtggcagcccagcaagtgggttctgccgccaccacagaaataaagccatctggaaatgtctcctcaaaggcaggctgttggaagctgttccttgtgaggaattgcatgtccattgtgtgtcattacatgccaattatagaaagatttagactcagggaaagacagaaaggaaagagtaaaatcaccccaacaatgtgaaatcattttatacatttgctgtttacccaagcagcagttaggtgcacatgcaggcactcatttcttcacttattcgttccacctgcctgtcagggcacaccctctatgccagtcattgtcctgggccagggcctacagtcacaaacggaagaaataaaaacctctgccctcaaagatcagaccttccagagaaatgcagatggaaaaccagagagaggcccctgcacataagaagccccagcgagtgacccagagagaaacagcaggcgggaggtgggtggtgccctggctgggatggggtgctgttccccatgggcgaaggtgacacgtgagcagggaccccacaagggcgagggggcctccctggagcatctgaggggaccacacatgcagagtcttggaggtggggcacgttggagcatagtggaacagcaggtggtcactgtggctggaaagggggtgaggaagggctgataaagttaaggagatttgtgctccaccagaaagggcctgggagcgaatataaggatatgtcgttggctgtgtatgaaatgggaaccttagggtttcctgcagagaagcaacatggtttgatgcattttcaagcatcgggctgggtgaccactctgcatggggtgaggacagatgtgggcaaaccagtcctgggaaactggggccagggtcggtgccacctgctctggttggcgggtctggtctgcctctgaaccaatggccaacgccacggaaaaagtgaacattctggaggaaagcccggagaccagccccacagcccagccaggcatttgggaggaagtgcttttcctcctggcactctgctttcttggctctatggatgttcaagattgataattctgtaggacttcccaagagtagctgtgaaaatagggccagatgtttcagctcactgtttcagcctctgggaaaagtcagacagaacagaaccaggggctgaggggagcccggggttcatgttccctgcacagacctttcccacccaacacaccagggtgtgtgtttctgacttattctccccagcctggaaaatgcctcacttccaattctttgcattcttatgtgggtgttatggacaccgctcccccacagaaaaggggctgtctcttgttttctttaaaggtgtccatagtgatacctgtgatcttgacaagcagaaatgggctggagaaactttagaaaaaagaagcagtgatggcttggaactctgtgagtatgtgcacacgtgaaagtgtgagtgtggctctgtaagcatgtttgcatgtgagtgtgtgcatgtgtgaatggaaaacatttaagcgtgcatgtgtgtgtgcgtgtgtgtagcttttcggcaggcatgacatgtgcctggaaaggaggagtgttgaggaaggtgaaggcctaggatgtatgaatatgtggaggaagcactttggcgaacacagagatctgagtgtgtctgaccccaggacgtggagtagctgttgcttggagcaggtgtcttgaaggcgaagactaggatctgaacttaggaagatctctttcatctgtggagtgatggcccaggctaccatgtttggaatttcttctgtagctagtgggcaaagacagaaggtctctgagcaagaaggtgacctagtcggagcctgtgccaggctcatgggagcgtgcgcttgctgtggggagggcgtgtggatgacctccaccaggcaggaggcccttctggaattgaaggccagtgccatggaaatcagtcccaggattctgccagagaaatggagaggagggcgcggcggctaggaacattttgaggtagcgtgaaaggaagtggcactcttttggacgttgagggaacagcatgaagcctcagtggaccgagatgtgcagtgacaggtgtcaggaaatgccctgctcggcagcctgtggagaccgatggtgtgcactcgtgtggaggtgtggtgactgtctcttacacggggcgtttaaagtgaggttggaacagtgtcagcctggactggtcaacgtgggtcgggctccatcggttaggggtctcccagaggagagctgctggttgaaaccatgagactgctaagtggggaggggagacagggcccagaaactggggctgtggagagaatacctgtgtttggggctggaggaggggaggagcagttttaccaaacaggaggtgagcaggtttccagcaggaagcgcttgttgcatggcgcacaacaggtttcatgagctgggggtagatagccccatgtcagcggcagaggtgccaaggggtaccgggccctcacacatcctccaggggaattgagtgcgtcttgcttttctccacgtcccaggttaccactacaacgacctggtgtctccacagtacctgaacctcatcgcaaacctgtcgggctgtaccgcccaccggcgcgtgaacaactgctcggacatgtgcttccaccagaagtaccggacgcacgacggcacctgtaacaacctgcagcaccccatgtggggcgcctcgctgaccgccttcgagcgcctgctgaaatccgtgtacgagaatggcttcaacacccctcggggcatcaacccccaccgactgtacaacgggcacgcccttcccatgccgcgcctggtgtccaccaccctgatcgggacggagaccgtcacacccgacgagcagttcacccacatgctgatgcagtggggccagttcctggaccacgacctcgactccacggtggtggccctgagccaggcacgcttctccgacggacagcactgcagcaacgtgtgcagcaacgaccccccctgcttctctgtcatgatcccccccaatgactcccgggccaggagcggggcccgctgcatgttcttcgtgcgctccagccctgtgtgcggcagcggcatgacttcgctgctcatgaactccgtgtacccgcgggagcagatcaaccagctcacctcctacatagacgcatccaacgtgtacgggagcacggagcatgaggcccgcagcatccgcgacctggccagccaccgcggcctgctgcggcagggcatcgtgcagcggtccgggaagccgctgctccccttcgccaccgggccgcccacggagtgcatgcgggacgagaacgagagccccatcccctgcttcctggccggggaccaccgcgccaacgagcagctgggcctgaccagcatgcacacgctgtggttccgcgagcacaaccgcattgccacggagctgctcaagctgaacccgcactgggacggcgacaccatctactatgagaccaggaagatcgtgggtgcggagatccagcacatcacctaccagcactggctcccgaagatcctgggggaggtgggcatgaggacgctgggagagtaccacggctacgaccccggcatcaatgctggcatcttcaacgccttcgccaccgcggccttcaggtttggccacacgcttgtcaacccactgctttaccggctggacgagaacttccagcccattgcacaagatcacctcccccttcacaaagctttcttctctcccttccggattgtgaatgagggcggcatcgatccgcttctcagggggctgttcggggtggcggggaaaatgcgtgtgccctcgcagctgctgaacacggagctcacggagcggctgttctccatggcacacacggtggctctggacctggcggccatcaacatccagcggggccgggaccacgggatcccaccctaccacgactacagggtctactgcaatctatcggcggcacacacgttcgaggacctgaaaaatgagattaaaaaccctgagatccgggagaaactgaaaaggtgagctgaagaggctgtgtgggatggctcgtgtacctaggcacctggaacacctgaactgtggtgtgtgtgttatttgtctctgtgtgtgagttttgttcgtgtcgtgcagaggtgagatgaaggtcaagtccatgaaggtcaagatgggaacctgcagcctcccgtggctgcgtggttgtggggagggggcagagccaggggtggatggacggtggagggcccttccaccggcctgttttgttccaagagaggagctttgctgagctgtggcacattttcagcttagagatgagctatacttttctggcagaggggttgactgcagggaaaaatacactgttcgcaccagaaaacaccaaaactgacactgtggctgttgggcagcttcgggttcctgctgttgtatcaggggcagagagagaggcagagcttggtgtctgcagatccgggcccttggggccaccagcccctaaggcttggcctgtagcatcttccatactcactgtgttgcccagacccaggcctgtggggccacctgcccatgaccgccacagatggcgccgcttctgagccacagccttgatcacctgtgggtgcggttctccttgttctgccacaaaggcaaaatgggacgctgtcacccctgagacaagggaagctggccaggtagattaggagacctcggaccctgtggggtggaaaaaatggcaaagttttacaggcaaagcagtgaccacagcactacccaggcctaggactggggtaggatcagggctgccgggtccatagccagtccccttcccaggactcggtgccacagtggggttctcattaactcagaattccccaaagtggagacattcagcggctctcctttttgctagatattcacatcttttactcactaccttttttttcatgttatttctaccagtttatttgctttttgtattttaaggaaatagaaataattgcagccaggcccggtggctcatgcctataatcccagcactttgggaggctgaggtgagtggatcacgaggtcaggagttcaagaccagcctggccaagatggtgaaactccacctctactaaaaactacaaaaattagctgggcgtggtggcaggcgcctgtaatcccagctactcgggaggctgagcaggagaattgcttgaacctgggtggcagatattgcagtgagccgagatcacgctactgcactccagcctgagtgacagagaccccatctcaatcaaataataataaataaaaataaaataattgctcatcagtgttttcccattgtgattcttctcagtccttggattatgaatcagattcacaggtcactgtgtattaggagatgttattcccattcaaaaacattgttttaaaaagaagaaaaaccctttcttcttaagactgtcttcctgtatttgatggactctgcagttgactcctaagttacttaacgctgaagttaggacataccctgttaggatctgacctgtgccttctaggggaaagtgattttttacttgtaatttattgtaagttatgactaaatgaacatgatgtcctattaaatttaatatgttccagtattcatttaaataatgcgcttaaattactggcatttggaagtgtgtgcgcactccgttaatccagtgtaatttttttatcatggttttgctgaattaggactgatgtgaactgtctgtgttttttatgtgcttaaatatcctcctttgttcttgtccaaactgacacagattactctcccagatgattctctcttttgccaaacttatttcaaaacatttcaaaagagctagatgtggagcccagcgccaggtggaccgcggctgtgttgcatgctaggtccctggtaaagaagttaaggatgttacccacacactgagcccctcgtctctttatttatgttttcctgtctcagcccattgctgactaaggggaaatgaaacataaacatgagaaaagatgcatgaccatcagagaccatggggccaggaggacttcacagggcagaggggttgccttcggcagactgtagagattgtgtagttctcatctactttgtgtttcacggccgcacggcgagtggatggcgtggcgttggcctgggctcgcctctgctgcccatccccagccgtgggacattccggaactgcgaggtctcttccctggaggaagctccttggattcaggtggaggctttagactctggtgagcctaaggaatgtgactattccagcccctgtgagtccctcccagcggtgggggacagaagagagcaggcacccagagcaggagccgcccggagcaggagggagtcctctgggaaaaggtgtggacgcttctggtggccctagtgtgctgtcctcagccacagaccagatgctgccagggtcctcccgaccaagtttcactcccaggggacatcttagagctagaagttcaacctgaatgtcattgaacttagaagaaaaagggacaatttgtctttgaaagactaaatgctagtttacataaaattgtgtttattctacggtaagaccaatggccagtgaggacacagccctgtgtgcatcctgttcagtaagcaacaaaatctgtcttgatcctagggttcagttggtggtcactgatttgagttttgtagaaaagggcagtgagaattatagaatatatatatgttaaaaatcgagtagagctttgaatagcagttgaaacaggcatcatctgctgcgtagtcgagttctaagatgagattagctgattcgtagtagaagttgtgacatgttgcttataagcctatatttctaaggaattggaagaagtcgatgaaaatgtttgttcttgaacacataaacctaagttttttgccctatctttgcttagcagatattttctttatggcaaatatattttcaatatatagtagaatcaaatgttattctttaaaaatgtatatacttttaaaaatacacatgaacaataaactatatacatttagctatatatagtttattgttcatatgtttattttaaaaagattggaagggtatacattatgatgttacgtgtggttatccctgaatagttggaaaaggtgtggcttaaattttcttccttatcttttcttggcttttctaaatttgttataataaatgcgtttgtgtgtgtgtgtgtctcacatatataatagaaagtagggaaaatcctttaaagcattgtggagagatgcagcaaagaagtaaatattttctttgttaagtaaaattctaaataatgtaaaatagtgatagaaagaaagaactgtttttatatttgctgtattttttaccacgtgcagctttgttaggtagatttcagttttctctttattttttaggttgtatggctcgacactcaacatcgacctgtttccggcgctcgtggtggaggacctggtgcctggcagccggctgggccccaccctgatgtgtcttctcagcacacagttcaagcgcctgcgagatggggacaggtgagcacgtgcaccagaaaggggagcacgctcctaagccaccttcttagggactccagaggagaagagctgtcctggttgagactgagggaggcacgaggccctagtgtcttctgtgtgtccccggttgagaatgaggaaggcactgaggccctggtatcttctgtgcaccgccttgggcttacatgtccttgcagcctcaaaactcaaccacaccaggttcaatgatgcttttcccaccccttcatttataggaatatttctgttcctgtaaacctgttggacagtccatacagctaaaccactgtgggactttagaggagtttgggcttcgggcaagatctttgttttatctctagtctactgttattactttactttaatgtagtggaaaggcagaccctacctattacaaactatttcagcagacctgaaataactgccatgccagttttgttttgtttttttaaagttgcccatcgtctttgttgctagtcagaagagctaacactgtcgttctttttttttttttttttttttttttttgagacagagtcttgctctgtcacccaggctggagtgcagtggcgcgatctcgactcactgcaagctctgcctcccgggttcaccccattctcctgcctcatcctcccgagtagctgggactacaggtgcccaccaccacacccggctaattttttgtagttttagtagagatggggtttcactgtgttagccaggatggtctcgatctcctgacctcgtgatccgcccacctcggcctcccaaagtgctgggattacaggcgtgagccactgcacctggccaacactgtcatttttacaccagattgtctgcctttggttttgttatggggtaggggatgtgagcagtgtgtgagtccatttttaagtgacacctaatcaaacctagtggtttctgtattgctgtgaactaagcaggggagattttaactcagctcctagtgacctgtgagtctcctgcccttctctgatcctgctttcattttgggggatccaggttgtggtatgagaaccctggggtgttctccccggcccagctgactcagatcaagcagacgtcgctggccaggatcctatgcgacaacgcggacaacatcacccgggtgcagagcgacgtgttcagggtggcggagttccctcacggctacggcagctgtgacgagatccccagggtagacctccgggtgtggcaggactgctgtgaaggtgcgtgccaggggcaccatgtctgttcctttttcatccctggttttggtgactgcttggcgggtgcttaatgacctgcagatgtcatcctaatcttgaaaactgaaaacaaaatattcagctttagatttaaatcgtgctgtatccatgctgagatggactgcggagccaaaaatatgaacaaagttggtgattctgaggaattggcagtgctgtgggagaacattcagaataactaaaacactaagagaaacagaaacccaggcttcagcaagatgtgcccctaatttttccttaaagcctaatgtatgtctagcttccagtacttgtgtagccagataaaagacgaaaatcaaaatatggaagaagcatatcaaatatatcaggttttcttaaaagttaatctgaatgttgtaaatatctgtaacataagtgactgaagatagatgttatcaaatatctcgtgaggagccctgcaggtaggaggtggtctcatgattggcgcggggggccctgtagctgagggacgccctgatatcaatcccacagccccggcactcgtgccctggagtgccagctccgtcttccctgcagaggcgtcagtggcctgctgtgtgaggcgatggttctcctggctgagttcctgcttcgcattcctaactcccagtcttggttaacctccatttccattactaatttgaacataattttggctttattcaaactatgatcagatccccataaaataccaaactggggatgtttagaacccaagttgtggagcactcactcttgtggtgagagaagcagggcccaccacaatggggggatctggggacctgcggtgagcgtgaccgggaggtggggccagatcccggcctcacccggcaatctgtggagcttgtggtgtctgtggacacttggtagtttaagaagagacacacaaagtacagacactgtccacatattctccaccacctcatttttcctgaagtaatagttctggccaagagcttatttaatttagtaagcgttgaaatctgcactgataatagagctgtgttttagcagcttcttctaagagagtgcgtgcctctgtgtctgtgtgcgactgtggggtgtgtgtgtggagtgtgtgtacctgtggggtgtgtggggggtgtgtgtgatctaatcctgcatctgcctcctcatctgcaccccccaccacccacacacacatgcatggaagtatatatgataggagaattcacataaaaaataaaattatgcttgctaggtacccaattttccaaattatttacatgcttgttattacatctgttggaaacttatatctgttttttgttttattgttttgttttgtttttgtttttgttttatatcctcactggtttatccaattcaaaatgcttttctacaagcatggtagaaaatttgttctgtttgtagaaaattgttctcttgaaaatgattaggaaaagccaatgatacaaaaacccattttctgataactttaccaggcccctgttagctgcttattaagaagtacagccaggctttctgttcttttgctaagaaaatccaaagtcctttgaaagacttcatctttaaagccagtctttgttccccgcatgttacaagcccctcctcctctcagggcactgtgggagaggcttagctgctgaagcaattgctgacattgtttcttccggacacttttccctcttaaaataccaggcatggccttaagctgacacagcttagagaatacttgataagctttacctgtttttattttaccccaaaagccatatctaaatacagcagaaaaatacgaaaacagaactcagatttgacagaaccaaatgtcaattgctatttacttttcaattaaactttttaaaaagacacattgggggctgggcggtggcacatgcctgtaatctcagcactttgggaggccgaggcaggtggatcacctgaggttaggagttcgagactagcctggccaacgtggtgaaacccgtctctacaaaaatacaaaaattagccgggcgtggtggcgggcacctgtaatcccagctacatgggaggctgaggcaggagaattgcttgaacccaagaggcagaggttgcagtgagctgagatcgtgccattgtaccccagcctgggcaacaagagtgaaactgtctcaaaaaaataaaaaaataaaaagacacatttaaagcgaacgtccttgagctacaacttttcatcatttgcttcgttgatgcctacaacaagtgctgtgtggggtctgcactaggtctgggaagccagcctgctcctggcttggccagcctgggcagcacagagcaggtgcaggccaggccgctgagcaggtgtggcccagccgtgccctggggtgtgaggaagagacggccatcctggagggacggaggtcccatcaaagagttctggggttggggctggtgtgcgctttggcagggaccccacagtgcctgggaccgtgtcctggccctgctgcttccctgtcgccctgtaattctaccagggacccaccccagacctgcacagccctgggtggaccccacctgccagtgaggctcattcttgaccccaggtgttgctgggaggggctgcggtagtctgggaggcagctgctgttttatgatgtatttgtgtgcccaggagttttaagaaactctgctcttctctgctcctgagacgatttgtgggtggaagaagcgaggggtccagccagctgggtttactcagaagctgtatagttaactgcggaaataaacacattcagtgggactgtttgtgggctccgctgtgggggcagagggagctttaggtctctgtcttgaagatactctttccagccagtcagacaaatgctagaccagaaggagccggccgcccttcaagggagacaggaaagctagcatggggtctgaggtgtatgctgcacgtgcctcttctcttctcatagaatttctactccagtggcttcctgagacattagcattttgcaaaggtccatatttgcccttcactttcgtgctctgccacagctttcttgggtggggatgatgtacaagacagactgaacaccccattacttcgttagatagtgtgtccacagggcccaggtgggacacggcactgagggcccctcactcacccggggaccaggagggacacggcactgagggcccctcactcacccggggaccaggagggacacggcactgagggcccctcactcacccggggaccaggagggacacggcactgagggcccctcactcacccggggaccaggagggacacggcactgagggcccctcactcacccggggctcaggtgaggcatagcactgagggcttctcagtccaccacaggttgagaaggaagccactcctaggcagggaggtgtttgggctacattcaggagaagcagggtcaggccgcctcttgtctgacactggggctggcagtgtgacgtagggagtgtagcataattttaaggcactccagagtgcagattgtcatctggccatcggggagggacccccagaaacagcagactctgatctccgaggcagagtgcctgagcctccatctgtgggtggagggaactccgcgagggtgtggttagatggcgtggtgagcctcctcagtgtgcccagctgtcctcagggcggccagcaccaggaggtcatgagggctggggcacaggtggagagaggcttggcccctcagaccaggagagggtaagagccgcagaccagctgccaggttgcctcactgaaatgtgccacagtttgttccacgggcagccagtgaagacttcatagttggcaggatgtgcttaatttccccgaggtcagagccttcagagctgacattctgctttgtgcttccattttagactgtaggaccagggggcagttcaatgccttttcctatcatttccgaggcagacggtctcttgagttcagctaccaggaggacaagccgaccaagaaaacaagaccacggaaaatacccaggtatggtggtctctgaggtcaaatgatgtgcagaggggccctcgcaccgcgggcgtcgggcagtaggaccggcatcctgctgtgggcctgtggcgaggatggttcctggcagggacgtcccagggcactgggggccaggccgcagcctgcgtcctgctgtgctgcccactcagagcatcaggggcggtgcacacccaggaaaccttgaaatgagacccagctcagagcatcaggggcggtgcacacccaggaaaccttgaaatgagacccggcgtgacctgccaaggttatatttccctcctcctcctttcccctcaccacagtgttgggagacagggggaacatctcagcaacagcacctcagccttcagcacacgctcagatgcatctgggacaaatgacttcagagagtttgttctggaaatgcagaagaccatcacagacctcagaacacaggtgaggtgcctggcggcctgtgtccccccactccaagattccacagcagcacagccctgcccgaaccttctgggtatagcattttattcccaggcaactgttcaactgcccacacaggacccagaccctggagccttgggggtgtcatttctgcacgctgggtcaggccgggccatgtgccactggtgtccctgggtttcccagcagatgggggtcaccaggcaggggcaatctgtgtcacggccgtgtgactgccagccaggtgaccttgctggagggaacacaggattaggatgctgtaggagagttcagacatgaagtcctgttcttaagcctcttattcaggaataactctgaatcatctctcccagggcgtggtaaggaggcacttccaggtcagccctccacaactgatccagcctctccgggtgtgaggaaagtcctggtgtctgtggtacgaccacagggattttcagacggggctcttctctggcgctctgtggaaatgagttctgtcctctccttcctatcccaggaacttacttctgctttcttcagtgcctgtggtgggggttatctctgggattttacgtaagggggtggagattgagacctatggctaaatagaaggaagtgcgctcactccgctggtgtggatgggattcccaaggtgcgcaggtcctggctgtctgcagcacatttaatctgtaagcacagctcctttcctactcacaggactcttagcccttaggtttgggagaaacttccatcatctcctagtgtagccccaaggtaacccccagccacagggagaggtaccctgactactcctgtgcctgccccctcatcccgtgcagctgcaggtcctcctgcctctgcagccttgagaccaggtgcaagtccccaggcagctgtcagagtggacgacatgtggcaggtcctcctgcctccgcaacctagagaccaggtgcaagtccccaggcagctgtcagagtggacagcatgccgcaggtcttcctccctccgcagcctagagaccaggtgtacatcccccaggcagctgtcagagtggacagcgtgtggcaggtcctcctccctccacagcctagagaccaggtgtacatcccccaggcagctgtcagagtggacagcgtgtggcaggtcctcctgcctccacaacctagagaccaggtgcaagtccccaggcagctgtcagagtggacagcgtgcggcaggtcttcctccttctgcagcctagagactaggtgtacatcgcctggcagctgtcagagtggacagcgtgcagcaggtcttcctccctccgcagcctagagaccaggtgcacatcccccagcagctgtcagagtggacagcgtgtggcaggtcttcctccttctgcagcctagagactaggtgtacatcgcctggcagctgtcagagtggacagcgtgtggcaggtcttcctccctccgcagcctagagaccaggtgcacatcccccggcagctgcccaagtggacagcatgcagtgttcactcagctccacctggcactaggagagaagcagagacaaacccaggctgacccttggggtccgtgctggggcctgggtgccctaggggggtccactggggaggggggtctgtgaaccccaaggtcattcagggcaggccttgtgcacaggtgaccctggacagcatagcagaggcagagggggaccagccaccccacctgtgtcggcaaataccaacgccctatgccctcccatgttgctgattctgtccacaatgctggacttccttccaccctcaggatgaacgggcagctccctgggtggcagcgctgggtctgagaaatgtggatgttccttgtgattttgcagctgctgacagcacagggtgtgtgccgtctgtggtcatttccctgcaccccatgtgtgcagaggtgttcgtgtatcttggtgactgcagaggcacacacaggccggcgtggtcactgcttctctctggctgtgaattaaagcaggtcagccgcagacacagaggtgacatgcaggtcacctggaacctctgcagaccgtcctggctgccacccctaagtgctctctggcccctgtgccactgttcctgaggcttcctttttttttttttttcccccatggtttcagctagaaagttctaagctttgataacttaagtgccagttgctaatgaatgaggcatgcaggaaagatggctttcatttagaagccgtatctgaggcatttcccaaagtgagtaactgtttggctagttaggtcctagatgtccagctgtcattatgaaatgcagatggtacggtgaggggacgtccacctttttcagcatgatgtgtgcataggtgagacactgctgctgcacaggttggggaccacacacttatggctgacaggagatcaaagaagatgttttaattgacatgagtaagtgggtggcttgctgaagttattcacagccatcatcagacagccttacctgtggctgagcatgctttatgaaggcttattagaagaattgggatatttatgataaataatttgtgttcatttcagacatcacagacagtttaggttcaaatgcaagggacggaaaactccaaatccaggatggttttaatgaggtgcgagtttacttttccctcagtcgtggagattgctggaccctccgcagtgcagggtccctgctgcagcttggtgctgtactgtgggtggcctcttcccaaggtcacctcatggcccaggcatttccggccactgtcaccctgtctgccccccggccctgcaagatgcaagagagggtttgaggaaggagacccttccaggaggcttctgctacccctgtgcatggcacagcggttggaaaggtcaccttgttatggggccccgtgcttccagagaaaagccagtggtgttgttactcggaaaataaggcagacttgactctggggattctgagtgatcatcgttcgttctggtggaagtgtaggtgcaggacgttctcgtcatctggttgaatcttgctcccacagtcctctgagaacgtcgcctttgtgactacggtttttatttgacagcacggtggtgggaatgtcttccattggggcgtgtggtcagctgccgccagtctaataaggacattggagattctgtaaaagttcttcagaaatattcccctcaaatgttgtttattttaaggcattattttcagtgaaataacatcttttaatacaagagccaagctgttactctgaagtgcccaatgaatgaatgttctttgcattgctgcagataaagaaacttgaatcacggctcagtaccacagagtgcgtggatgccgggggcgaatctcacgccaacaacaccaagtggaaaaaagatgcatgcaccatttgtgaatgcaaagtgagtatggggggctctatcttcatgtcctaaggtatacgcaagtccgagagtcccatgtgaccactcaggtgggtggcccagatgtcagggccaggcccctccccgcctacctgtgctggcctccatccctccttcactcctatggaagcaccaggcaagcccagctctctgtgcacagaggacgtgctaggaggcccagaacctcagcatggtccaaccccacagagggcgggcagcccctactctgtgcagggccacctggggctgcttgtgtgcactggcttcacctcccaccagctgtggcaggaatactcatgccatggaaacccatgaatggggtagatcagctcctccctgcagagctggtgggtaaacactgacctgcccaccactggccctgtcccatctccagtcagagctgggggtgttacagaggtcactggagtccctgcaaagggagactggtggcaggtggagggtgccctggtgccggcaatggacagacgtctggctggaaccaggctccgtggaaagcttggggcatagtgtgaggaggcaggatggggaggacagcgcgccagcccgggcacttctcttgccatggccattgggagaggacgcgcatcagtgtccctgagctggtcaggtttgggaagggcagaccggggaagagcaaagccctgtcccttcccccctctctctagtcccatcctgcttcctgacaacgcccacccccagacacagtccgaggggatccaggtgtgaggtgggaggatgtgtccagctggtggtcttggcccctcagggtgagaggaccgtgggcatggacggaagggtgggacgggagcctcagggagacttgttatgggggctcccattaactcatacctgtctgcaactatgaaatcctaagagaaccacaaaatccatgcccacagggcaagtacagcgggcaaggcaggggcctcagggcaaggcctgactcatggccgtggctgacacctgtcccggagctgacaggctttgctcacctgaaggccatcccagagctgacaggctgtgctccgtctctcttctccaggacgggcaggtcacctgcttcgtggaagcttgcccccctgccacctgtgctgtccccgtgaacatcccaggggcctgctgtccagtctgcttacagaagagggcggaggaaaagccctaggctcctgggaggctcctcagagtttgtctgctgtgccatcgtgagatcgggtggccgatggcagggagctgcggactgcagaccaggaaacacccagaactcgtgacatttcatgacaacgtccagctggtgctgttacagaaggcagtgcaggaggcttccaaccagagcatctgcggagaaggaggcacagcaggtgcctgaagggaagcaggcaggagtcctagcttcacgttagacttctcaggtttttatttaattcttttaaaatgaaaaattggtgctactattaaattgcacagttgaatcatttaggcgcctaaattgattttgcctcccaacaccatttctttttaaataaagcaggatacctctatatgtcagccttgccttgttcagatgccaggagccggcagacctgtcacccgcaggtggggtgagtcttggagctgccagaggggctcaccgaaatcggggttccatcacaagctatgtttaaaaagaaaattggtgtttggcaaacggaacagaacctttgatgagagcgttcacagggacactgtctgggggtgcagtgcaagcccccggcctcttccctgggaacctctgaactcctccttcctctgggctctctgtaacatttcaccacacgtcagcatctaatcccaagacaaacattcccgctgctcgaagcagctgtatagcctgtgactctccgtgtgtcagctccttccacacctgattagaacattcataagccacatttagaaacaggtttgctttcagctgtcacttgcacacatactgcctagttgtgaaccaaatgtgaaaaaacctccttcatcccattgtgtatctgatacctgccgagggccaagggtgtgtgttgacaacgccgctcccagccggccctggttgcgtccacgtcctgaacaagagccgcttccggatggctcttcccaagggaggaggagctcaagtgtcgggaactgtctaacttcaggttgtgtgagtgcgttaaaaaaaaaaaaaaaaaagaatccctatacctcatttgtatttttaaaatgcgtgatgttttatgaaattgtgtccattttttaggtattagatatggcagaaaaaccatttccactatgcaaagttcttttagacgtcagtgaaaatcaactctcatacctcatggtctctctttaattgaccaaaaccttccatttttctctaaatacaaagcgatctgtgttctgagcaacctttccccgaacacacagcttcagtgcagcacgctgacctgagtatccaccatgtgccaggcacagtgctgggcacacgaggcaccaaggtccgggccacctgcccgcagcaaggcccagctgaggtggtggagggagcccctgaggtcaggggccgtttcggttcagggtggcaggtgtccagcactggggtatggcgtcgaggcttccatggggtgggggaggccagcttccttctgacaggatgggcgcatacagtgcctggtgtgatttgtgcacaacccgtgttccaggtgcacatcctcccaaggagacacccagacccttccagcacgggccggccaagttgctgcggcggaggcagcatttcagctgtgaggaaggtcattggattcatgtgttttatctgtaaaaatggttgtcttaacttcttaacctcatattggtaagtgattgataaaaattggttggtgtttcatgacatgtggacttcttttgaaatagcaagtcaaatgtagtgaccaaattgtggaagagatttctgtcaaataggaaatgtgtaagttcgtctaaaagctgatggttatgtaagttgctcaggcactcagatgacagcagattctgggttctgggagtgttctgtgcctcttacatgccctggaggcctcatggtctcagtgctgaggcggcacacctgtagcacacctgcgtaatgtgcggtctgggccagtcacaaggaattgtgttgtctaagccaaagggggaagctgactgtgatttaccaaaaaaaattctgtaattcaaaccaaaatgtctgcggaatcaccagtttgatactctctgtaatcagaacagtgggcagtgcctgggtgaacgtgtctagcagccactgtgcgggatcgctgtaacaggagtggaatgtacatatttatttacttttctaactgctccaacagccaaatgccttttttatgaccattgtattcagttcattaccaaagaaatgtttgcactttgtaatgatgcctttcagttcaaataaatgggtcacattttcaaatggagaatggctttat

SEQ ID NO: 11925 - DNA, 3975 bp, Homo sapiens
gatcctgaaatggaaaatgaagaacaaccatcctctgaaaatgattctcagaatcagagtggtgaacagatttcatcaagttctcaggaggttgatttggttgatcaagagtcttctgaggaaaattctctaaattctcacccagaatcattatctctagcagatatggacaatgctgcaagcatttccccttctgaacagacttctaatcccacagaaaaccatgagactacaaatcttaatggtgaatgtacagatttagataaccagcttcaagaacaatcagaaactgaggaagattccaatcctaatgttagctggggtaaaaaggtccagcctatagactccatattagcagactggaatgaagatatagaagcatttgaaatgatggagaaggatgagctatgacttgctaaacaatctgttggtaggtatttaaaaagaaaaggtaaactgtgtgtggttaatagacatcctaatactaagcaggctttctaatgggaggctttaagtatggtgatgaacaaccacgttctgactggcgtagttatcgtaggaatctggagcatgctgtgttagaattgaccttgtttaaaactgtcccatcaaaaatggaaatccacagttcccccttcaaatgcagcactgcaccaccctgcaacacctcaggccagggaaagattactgagcattcctgcgaaccagatttctgttgtctctggatagacaagaaacaaaattcatttagtagtggagtggggaataggagtttggatagccttctaattaaaggaagctcgcctttcttggttttgggggttagaggctcttttgggaagatgcatccgagtattgtggcattctgattatgctgccttcacaaaacactctaagtgacctaagtggttatgaagcaaatgcatttatggtgaaaacagtctttgctcattgctttctcttgtttcatttagtgacaaatgatcaagatgacttgattttttttccttcttaacaatgtcttttttatttaaaccaaaggtgaagccagtgtactttctcagtgagttctctgcataaagactaatcagtgggaccaggtaaaaaggtcatataatacattgtggagattgcttacttaatacttctgaaaaatggagtaagggagaaactgtaatgttgcaatatgaacctcccattgggccttccatagggaaagctgtgactactctgaaatggaacctagcattatatccttgtagggtagattataaatcatttccagttcatttctcttagaggtgattacctctagccatcagccttactccatcccatgtttggtatgcaatttgagccacaaggctcgtatcgccaacagctatatacattttgttccatttttctgtcttacagagccatgatagaactgtggttagtgagttaaaattcctggagtaactactgtttttctcctttgaaacttaggtttctaaagttgcacctaaggaatctgtcacattttctgttgaatcatggtttttgtttttgtttttaacagatattccttctgatacggacttgaaaattagtgtatggtgacctgtgtttaaaaaaaaaagtacaatacaactacatatagctatatagcttaatgagacttccaccccccccctttttttttttggtttgttgttgttgtagtagtctggtgctggccacatttaagtcttaaaaatttttaaattttgttgttgatgtttgtagacagccctgttgttgaaatcatggctttattcattttatttattttttaaacttgcctgaatttgttctaaaggaatatttaagagacataattttcttctctttaccataacattacacaaaactttttcctaaaacacggttgtgaggtactgatgaggtgtaagtggagctgttaaaaacagcagtgctgtattgcagttatgtatattcgtgtacagtatgtttagatcccaggtaaacatattcttttctgagaggataaatacctgcattcagatattccaggtaaatataattgagtcagggagtagtaaatctgatggagaattcactttggggaggggaaaaagaatagtatgcaagacccttattggcttttaattatacctgaaaccaaaatggatatttttagtctctctgcatgtgagatttggtgtaacaagatagaactataatatatacagtatatggaaggatagatatagtgctttgttcattttaattgcaaagctgccaaaatagttgaagcttaattacttgacttgccttgatttataggactggggcttggagaaaatgagcagatgttcctctaagacatcgattacagaagccttatatacatggatttgattttgtatttgtagctgaaagtcactgttgtctaaaactaacttttctaagttatcaaaacaacctaatttcttttccaacaaggagaacttaatggcatgaaggattgtgtgacacattggaaaagccagcttactgccactctcttcctttggccattagagggaggtgttgcctttcattgacgcttagaagcaaattgttcacttgttaagaaaagtaaatccttaaaaaaagaaaaggaaaaaatttaaccaatttttcttaatacccagaaggaattatactcaatatttccctagttaagaaaagaggagataatgttcgtctaaaaaactccaacgttgtaattacaactctacattcatttacttacttgacatactgccacaaagtagtttttgagttcattaaaaattccaaaggcattagttgttttttttttttttagtgttttgttttttagttaacttttatagacattttagtaacttgctaaagattcaggggattctatgaaaccccgaatttagaaacatctggtctacctcagttaaatgttgactgcttagaaatatagctgaagtgatcaccacagccataaaattgtttaagaaagatttatataatgtttacaaatctggaatcaaggattttagctgaaatcctttaagagatattagagcaagtatttaattcaggtattttcaagttttaaaacttaacctgtttacctactaaaaataaaatagctagtttttttctgcatataaaagttcattgaaatgatatgcccttatttgcaatacttttcccataaagttttaagtgtgaaagaattgtaatttactagatatgtttggtatgggatattttgttaggcaagttttcttttttcttcttaaattgcaataggcttccaaaaagagtataattgtttcagaacaaattaactcttggcattatacgtctccctttttctttacagtattagtaaaaagaaaaattgtacactttctgattttaacttcactaatgtaattactctctcaagaagcttttaaaatttaaattaccatcacacaaccttttttatagtaaagccaacatttgttctctcaccaaaccccatgccaaattcatcatgaagaaagctcagcataagtaattcaaatactgcttataattttagaggggggtagaatttagtaaatattccagccggtcgttttatgcacaaggcttcagtcagaacatagaaaaaaaaaacattctgtgaatgaaatattgtatgttcagattttataaaagacatttttaaaagcccaatttacagccgtatattttcttatgatgtaatttatgaaaaagatgtctgtactaacaggtgctgtaacactactgttgttggattttattgtttggtgataaatgtatacaatatttctaagggaaactatgtactgtgatgtaaaagtctgggcaaaatgtatataatcctgtatataattatgtatttgattataattactgattgtaaagatttaataaaatatgtaaatattccagttt

SEQ ID NO: 11926 - DNA, 304 bp, Homo sapiens
gcacccatggattcaaccaactgtggataggaaatattcaagaagaaaaaagcatctgtattgaacatacagagattttttttcttgtcattattctccaaacaatacagtataccaatgatttgcataacatttacgttgtattaggtattataaagtaatcaagagatgatttaaagtacatgggaggatgtgtgtcagttatatgcaaatactgtgtcattttacataagggacttgagcatccaaaatccttatctctctttcataacgtgtcacagttgagttttctatttattttccg

SEQ ID NO: 11927 - DNA, 2217 bp, Homo sapiens
gcggccgcagtgaggagactcggccatgctacgcgcgctgagccgcctgggcgcggggaccccgtgcaggccccgggcccctctggtgctgccagcgcgcggccgcaagacccgccacgacccgctggccaaatccaagatcgagcgagtgaacatgccgcccgcggtggaccctgcggagttcttcgtgctgatggagcgttaccagcactaccgccagaccgtgcgcgccctcaggtgtgcggccggggggaggtggccgcccgcgcgcgctggtgacggtgggagtgggcggagagggtgctgattcctggcgcgtctgcacccaggatggagttcgtgtccgaggtgcagaggaaggtgcacgaggcccgagccggggttctggcggagcgcaaggccctgaaggacgccgccgagcaccgcgagctgatggcctggaaccaggcggagaaccggcggctgcacgagctgcggtgcgtggggcgggaggcggggcggggcggcgcggcctggccggcctgggagaagcccgggccccgctcagcctcggccctttgaccctcacaggatagcgaggctgcggcaggaggagcgggagcaggagcagcggcaggcgttggagcaggcccgcaaggccgaagaggtgcaggcctgggcgcagcgcaaggagcgggaagtgctgcagctgcaggtgggcaacgtctccggagggtgggactccagccggggacgcggcttgcggggcactgggaattctgggcaccgcgacgcgggcgctggctatgtgcagagacttacagttggcaggtccggatttggagaggagagtgccagtcaggcgcaaagacccggaggtgagcggagtaattggacagtgttcaggtacctagcaggtctgtgggagggaccctgcgttccacaaagaggttgtattttgcataacaggtgatgaagccatgaagggttaagtatttcaggctaggattagcaggtgtgcgacttaaaagcagggagaccacttaggagtaatgcagtgagaatggatgaggcttgatttaaagtatagaagggtggctgggagcggtggttcacgcctgtaatcccagtactatgggaggccgaagcgggcgtatcacttgaggtcgggagttcgagtccagcctggccaagccccgtctctcctaaaaatacaaaaattagccgggcgtggtgtgcgccagtaatcgcagctactcgggaggctgaggcatgagaatcgcttgaacccaggaggcagaggttgcagtgagccgagatggcgccactgcactccatcctgggcgacagtgagactccgtctcaaaataaataaataaataaataaataaagtaatggggggaaggatgagttagagtgattcagaggggaccactgagggacggatttcacctaccaggacgtgagattttcatagctggcactcggggctatggctgaagtgtctgagaaaagaggaacgtggaaaagcaacctgatatcactccactgggaggccagaggggctctcaaataggacctgggttccaggcatgcttccccagggagagcaggagctgctttctcagtggggtgagaggccagcaggctgggtgggctggctggcatgtgcccaaggctcctgttcagctgggcttttctctcccgataggaagaggtgaaaaacttcatcacccgagagaacctggaggcacgggtggaagcagcattggactcccggaagaactacaactgggccatcaccagagaggggctggtggtcaggccacaacgcagggactcctaggggcccagtaaggacagtgcccgccagggaccatgtatgtatcatggcggaagagttggccctgacctggaataaagcagttggtgttgcttatgaggaaggttcagccttatccagcacagccttcacgttttgccctctgctgtcaccacttggtcagaaacttccaaacgcagtgccctgttctgccggtgtgtacagcctcagcgcaccaggagaccctagagtggtttccatctcacagagaatcagacagggccacagccccctcaggcagccaggtcatctgagtatcattaagagtagtgatgggaagattacagtctgagggccaaacgtgcctgcttcctgtttttgtaaataaagttttgttggaacacagccacaccca

SEQ ID NO: 11928 - DNA, 2216 bp, Homo sapiens
gcggccgcagtgaggagactcggccatgctacgcgcgctgagccgcctgggcgcggggaccccgtgcaggccccgggcccctctggtgctgccagcgcgcggccgcaagacccgccacgacccgctggccaaatccaagatcgagcgagtgaacatgccgcccgcggtggaccctgcggagttcttcgtgctgatggagcgttaccagcactaccgccagaccgtgcgcgccctcaggtgtgcggccggggggaggtggccgcccgcgcgcgctggtgacggtgggagtgggcggagagggtgctgattcctggcgcgtctgcacccaggatggagttcgtgtccgaggtgcagaggaaggtgcacgaggcccgagccggggttctggcggagcgcaaggccctgaaggacgccgccgagcaccgcgagctgatggcctggaaccaggcggagaaccggcggctgcacgagctgcggtgcgtggggcgggaggcggggcggggcggcgcggcctggccggcctgggagaagcccgggccccgctcagcctcggccctttgaccctcacaggatagcgaggctgcggcaggaggagcgggagcaggagcagcggcaggcgttggagcaggcccgcaaggccgaagaggtgcaggcctgggcgcagcgcaaggagcgggaagtgctgcagctgcaggtgggcaacgtctccggagggtgggactccagcggggacgcggcttgcggggcactgggaattctgggcaccgcgacgcgggcgctggctatgtgcagagacttacagttggcaggtccggatttggagaggagagtgccagtcaggcgcaaagacccggaggtgagcggagtaattggacagtgttcaggtacctagcaggtctgtgggagggaccctgcgttccacaaagaggttgtattttgcataacaggtgatgaagccatgaagggttaagtatttcaggctaggattagcaggtgtgcgacttaaaagcagggagaccacttaggagtaatgcagtgagaatggatgaggcttgatttaaagtatagaagggtggctgggagcggtggttcacgcctgtaatcccagtactatgggaggccgaagcgggcgtatcacttgaggtcgggagttcgagtccagcctggccaagccccgtctctcctaaaaatacaaaaattagccgggcgtggtgtgcgccagtaatcgcagctactcgggaggctgaggcatgagaatcgcttgaacccaggaggcagaggttgcagtgagccgagatggcgccactgcactccatcctgggcgacagtgagactccgtctcaaaataaataaataaataaataaataaagtaatggggggaaggatgagttagagtgattcagaggggaccactgagggacggatttcacctaccaggacgtgagattttcatagctggcactcggggctatggctgaagtgtctgagaaaagaggaacgtggaaaagcaacctgatatcactccactgggaggccagaggggctctcaaataggacctgggttccaggcatgcttccccagggagagcaggagctgctttctcagtggggtgagaggccagcaggctgggtgggctggctggcatgtgcccaaggctcctgttcagctgggcttttctctcccgataggaagaggtgaaaaacttcatcacccgagagaacctggaggcacgggtggaagcagcattggactcccggaagaactacaactgggccatcaccagagaggggctggtggtcaggccacaacgcagggactcctaggggcccagtaaggacagtgcccgccagggaccatgtatgtatcatggcggaagagttggccctgacctggaataaagcagttggtgttgcttatgaggaaggttcagccttatccagcacagccttcacgttttgccctctgctgtcaccacttggtcagaaacttccaaacgcagtgccctgttctgccggtgtgtacagcctcagcgcaccaggagaccctagagtggtttccatctcacagagaatcagacagggccacagccccctcaggcagccaggtcatctgagtatcattaagagtagtgatgggaagattacagtctgagggccaaacgtgcctgcttcctgtttttgtaaataaagttttgttggaacacagccacaccca

SEQ ID NO: 11929 - DNA, 1334 bp, Homo sapiens
gccatggccagctccaggcgaggcctcctgctcctgctgctgctgactgcccaccttggaccctcagaggctcagcactggtcccatggctggtaccctggaggaaagcgagccctcagctcagcccaggatccccagaatgcccttaggcccccaggtgggtgtctcccagcctcatggggaggaagaaagtgatggccgggggctcccccaccctcctggagcctgaggtcggggtagggaggacagcatcagttcccttctaaggaagggccctggacactgcagcaggcagcccagtccagactgcccatggcctcccaagtgatgccctggctcccctggacgacagcatgccctgggagggcaggaccacggcccagtggtcccttcacaggaagcgacacctggcacggacactgctggtgagtagggtgagaggtccccagcatcaagaccagccactggtcatcagaggccattgtggcttagggttgggtgctgggagggtggggagaatgaaacaccactgagatgccccctgccacagcacccccagccatttctcagtgcccctactgcacacagcagggtgctgtctgctatccttcctatttcccaggaggattctagacaatttacaaagcacttgggttaaagaccaaagtcactagtagactagaaggagataattgttctataagacagtggtggccatgggatcccacaggcatcctgacaagccaatgactgtcttgaggtggacagaccccaggccagtggaaagaggtgagggatgcaacctcactcaaacagacaacagggccaagaggaccaggtggtgactgacatgtgcactaggaacatctcagggactgcagagctccccaagaccatagcagaagacaggcgtggggaaatggtttgctactgttttgcaaatcaaacatttacagtgcatcaggagagcccggtaactaaagaagaaagtggttagttcctatgaggcaatgtcttaccgcctgatttgtgtgtatgtgctgaggtttctatgcgtcaggcttgtttagggtggacaagagggcatgcccaagggagctggagatccccacactagctggatcctcaggcttctacgggaggcggggggcgtcctgctgtgggaggccacatggggactgggggggacgagaggggagagaaccaggaagatggcagctcggcggttacgagaccagtgtcctgagacatgaccgccacctctccctccgcagaccgcagcccgagagccccgccccgccccgccatcctccaataaagtgtgaggttctccg

SEQ ID NO: 11930 - DNA, 225 bp, Homo sapiens
tttttttttctttcttttttttttgagacagagtctcactatgttgcccaggctggagtgcagtggcacgatcttgctcactgcaagctctgcctcccgggttcacgccattctcctgcctcagcctcccaagtagctgggactacaggcgtctgccaacacgcctggctaattttttatatttttagtagagacgtagtttcactgtgttagtcaggatggtct

SEQ ID NO: 11931 - DNA, 1333 bp, Homo sapiens
gccatggccagctccaggcgaggcctcctgctcctgctgctgctgactgcccaccttggaccctcagaggctcagcactggtcccatggctggtaccctggaggaaagcgagccctcagctcagcccaggatccccagaatgcccttaggcccccaggtgggtgtctcccagcctcatggggaggaagaaagtgatggccgggggctcccccaccctcctggagcctgaggtcggggtagggaggacagcatcagttcccttctaaggaagggccctggacactgcagcaggcagcccagtccagactgcccatggcctcccaagtgatgccctggctcccctggacgacagcatgccctgggagggcaggaccacggcccagtggtcccttcacaggaagcgacacctggcacggacactgctggtgagtagggtgagaggtccccagcatcaagaccagccactggtcatcagaggccattgtggcttagggttgggtgctgggagggtggggagaatgaaacaccactgagatgccccctgccacagcacccccagccatttctcagtgcccctactgcacacagcagggtgctgtctgctatccttcctatttcccaggaggattctagacaatttacaaagcacttgggttaaagaccaaagtcactagtagactagaaggagataattgttctataagacagtggtggccatgggatcccacaggcatcctgacaagccaatgactgtcttgaggtggacagaccccaggccagtggaaagaggtgagggatgcaacctcactcaacagacaacagggccaagaggaccaggtggtgactgacatgtgcactaggaacatctcagggactgcagagctccccaagaccatagcagaagacaggcgtggggaaatggtttgctactgttttgcaaatcaaacatttacagtgcatcaggagagcccggtaactaaagaagaaagtggttagttcctatgaggcaatgtcttaccgcctgatttgtgtgtatgtgctgaggtttctatgcgtcaggcttgtttagggtggacaagagggcatgcccaagggagctggagatccccacactagctggatcctcaggcttctacgggaggcggggggcgtcctgctgtgggaggccacatggggactgggggggacgagaggggagagaaccaggaagatggcagctcggcggttacgagaccagtgtcctgagacatgaccgccacctctccctccgcagaccgcagcccgagagccccgccccgccccgccatcctccaataaagtgtgaggttctccg

SEQ ID NO: 11932 - DNA, 291 bp, Homo sapiens
ttttttttttgagacagagtctcactatgttgcccaggctggagtgcagtggcacgatcttgctcactgcaagctctgcctcccgggttcacgccattctcctgcctcagcctcccaagtagctgggactacaggcgtctgccaacacgcctggctaattttttatatttttagtagagacgtagtttcactgtgttagtcaggatggtctcgatctcctgacctcgtgatccgcccgcctcggcctcccaaagtgctaggattacaggcgtgagccaccgcgcccggccg

SEQ ID NO: 11933 - DNA, 4822 bp, Homo sapiens
aggaccgagaggagcggaagctgctgctggaccctagcagcccccctaccaaagctctcaatggagccgagcccaactaccacagcctgccttccgctcgcactgatgagcaggccctgctctcttccatccttgccaagacagccaggtaagtgtcagaggaccaggcctgggtcagagctcctctatccatattaaaggctaggatagaaggagccaggctcaggacatgggggatgggacaaggtcactggggagaggtgcctccatgtccagccctgctccagtaggcaggagggaaactggtgtcagatagccctggagttggtacctggcactgagtcctgtttgtccttctcggaagcacctgtcatgtcatctctgtctcctctccccatagcaacatcattgatgtgtctgctgcagactcacagggcatggagcagcatgagtacatggaccgtgccaggcagtacaggtgagcacctggccagcgtgggtccctcaggctacttgggctcccaccctccatcactgttccagctttggagcctggcccctagtccaagcttctcatttggtgcagccctggagactgaccacagatcacttgggtgcttcagtagttattcatgtcagccctgtttaccctgtgacactcttgagggcactgaggccaagggagatgggcctagattgagtctgtgatgagctgagaccttccctcccagatacccctcctcgacaccctgcttctctggcctgaggggatgaggcttacctgggctgggcagggcagactgtagcttaactgcctacccccaccccctctctcttggtcagcacccgcttggctgtgctgagcagcagcctgacccattggaagaagctgccaccgctgccgtctcttaccagccagccccaccaagtgctggccagtgagcccatcccgttctctgatttgcagcaggtgagacacccctcacctgcccctgcccacccttctcacactgcccagggtatggcagagggttcacccactctgcctcagaggaggtagggaaggtggagttagggagcctggtagccttgtaggccccagctccctcccacctcgttctcttaactttttatgtctttcctatctccttcctgcaacctttattgtttcactcccctttgttcttttccttctgtctctcccatccctgtctttctctttgccttcctgttccccttcattccctccttctccatcaccatctaatctcccctccccatttttcctgattgccctcctcacctgtctctgttcctctcctccccggcccctctctgtctcaggtctccaggatagctgcttatgcctacagtgcactttctcagatccgtgtggacgcaaaagaggagctggttgtacagtttgggatcccatgaagagaggggtccttggacagctcttctcctctcttcatcccatctctaccccacccccttggcccccagcctcactgcggcttatacagtaccctaacctgctactaatcacagagaaaaatgtgaagaaggaggagaagaggaaggctagaagcctgagcaagtgagggtagaaccttttgggactggcctttgaagctctggccagggatggggtgggggccaaaaggacagagcctggtatgtcttcatagtcattgagaatgtggagataccagtttgggtggggggtgatcaccaggggacctagggagatccccttcccaccctctctgttggcctcagagtcactcctgccccctctccctgacttggtgctcacatgcacctcactagggtttgtgaccagggtctggatgagcttgaatttgaatgaattgagtttgtatttctagaaccctgggtttttacatgtttggtctttttttgttttggtttgtcaccctcgataaaggaagtatattcatccatgtgctggttctggcccctctgttctacccattctacttttgattacttaggtctatgagagtaagatggggggaaggggacatcttccagggatattgaagatgaacccaagagacaagggtttagggtgtcagctcttagctgagacctggcttgggctaacctcagactggatgagactgttcttgtcccttgtccagtgatgatgggaacactgtcaaagctgaacagacctgaatctgaggcagctttgattcttgggggccctgcctcagactcaatggaattaccaacagcccctgggggtgaagggagacatggcgggttggggggtggagagagaaagcagaccaggctcttctgggaatacctaatatggagtcagcaagcaaatgtttttaagcagaagattctttttatcaaatgaaatcttaagcagaatcccagcatataaaacagaatggaattactttgatctgattgaagtgggggctggtttcagagatcataggccatcttcttggcctgtcatggaggcctgtgaggcatctctacagaccctggtactctgtgaagagtttggaaattactgatctactttaacccccaaatctctaagctgaaaagtacaaaggggcccagagagttagataaatttcccaaggctgtgtggtaaacccacgtctccagtgtcccaggccagcaggcctttccctcaattgcctccctttttcagcaaaataagactagagctggccaggtgcagtggcttatcctgtaatcctagcactttgggaggctgaggtgggcagatcacctgaggtcaggagtttgagaccagcctggccaacatggcgaaaccccatctctactaaaaatacaaaaaaaggctgggcgtggtggctcacgcttctaatcccagcactttgggaggccaaagcagacggatcacctgaggtcaggagttcaagaccagcctggccaacatggcgaaaccttgtctctactaaaatataaaaaattagctgggggaagccgaggtgggtggatcacaaggtcaggagatggagaccatcctggctaacatggtgaaaccccgtctctactaaaaatacaaaaaattagccaggcgtggtagtaggtgcctatagtcccagctacttgggaggctgaggcaggagaatggcgtgaacctggaaggcggagtttgcagtgagccgagatcgtgccactgcactccagcctgggcgacagagcgagactccgtctcaaaaaaaaaattagctggatgtggtagcaggcgcctgtaatcccagctactcaggaggctgaggcaggagaatcgcttgaacccagcaggcggaggttgcagtgagctgagatcgcaccactgcactccagctggggtgacgagtgaaaccgtctcaaaacaacaacaacaacaacaaaattagccagtcatggtggcaggcgcctttaatcacagctactggggaggctgaggcaggagaatctcttgaacctgggaggctgaggttgcagtgagccaagatcgtgccactgcactccagcctgtgtgacagagtgagactccgtctcaaaaaaaaaaaaagaaaagaaaaggctagagctacttgcagttgcctgagttagagaacatctctacaaggtgtaagtgacttctcatctgctcaacagctcaaattatttattgtcaaaccatgctgtctatgcttaggcctttaggactactagggtcgtgggagcctcaaagtgtattctgcttggtccaggccttcttgggcttgatgttcatgcgtttccagacttcagctgtggtgcggtctgctttggtgaccccactgaagtcgaacgtggtgatacgggacagggtgcacagcacatattgcctgtggggaagacttaggctgggggccagcacccccaccagaatccccttccccctccactagttgctgttgtcttccctgactgcaaggaatggagggacttgagcatagtttgggaaagattaggtttatcctgactgagagcaaggaatgcttagaggtctgttactcccttcccaggtccaagcatggcagaagaatggtcgtagatttcttgtttctcctcctcctttcctttaggggagcccagctagacgctacctccaggggcagggcacttacctataccctttctcttcctccatggggttcccatggagtgtcaggctacggagccgaggaaggacagccagcttattcacctcccccaggcgctggatgctgttgccgtgaagatagaggacactcaggttgaagaaagttgttaggacctgttggggagggaaaccaaaagccaggctagacaggacaggaccctgaatctctgctcagggctgactcgtgggcagagaaggaagaatgtggggaacaacctgccctccactccaaccctccacagccatactgtatgactgtaacctacttttatttatgttttaagacatacagggcatcacactgaaaaggagctgtgatctgagggtcaggagtgtgggcctgggtaccagcactgccactgacttgcctctctctcagccttagttgccccttcactgaagacctttccagctttggtgatctacgattctatcacagcaagcaacaggaagacagagcatcatgctaggcacataagaagcttttaaaatactggttaaattgagatcaccacaccaggggaatagtgtccaagtcatgctccagctcctttcccctcttagggatcttggactagaaaaggcaactttgtttatttcttaaaacttgaatctgagtcacagaaa

SEQ ID NO: 11934 - DNA, 1967 bp, Homo sapiens
aggaccgagaggagcggaagctgctgctggaccctagcagcccccctaccaaagctctcaatggagccgagcccaactaccacagcctgccttccgctcgcactgatgagcaggccctgctctcttccatccttgccaagacagccaggtaagtgtcagaggaccaggcctgggtcagagctcctctatccatattaaaggctaggatagaaggagccaggctcaggacatgggggatgggacaaggtcactggggagaggtgcctccatgtccagccctgctccagtaggcaggagggaaactggtgtcagatagccctggagttggtacctggcactgagtcctgtttgtccttctcggaagcacctgtcatgtcatctctgtctcctctccccatagcaacatcattgatgtgtctgctgcagactcacagggcatggagcagcatgagtacatggaccgtgccaggcagtacaggtgagcacctggccagcgtgggtccctcaggctacttgggctcccaccctccatcactgttccagctttggagcctggcccctagtccaagcttctcatttggtgcagccctggagactgaccacagatcacttgggtgcttcagtagttattcatgtcagccctgtttaccctgtgacactcttgagggcgctgaggccaagggagatgggcctagattgagtctgtgatgagctgagaccttccctcccagatacccctcctcgacaccctgcttctctggcctgaggggatgaggcttacctgggctgggcagggcagactgtggcttaactgcctacccccaccccctctctcttggtcagcacccgcttggctgtgctgagcagcagcctgacccattggaagaagctgccaccgctgccgtctcttaccagccagccccaccaagtgctggccagtgagcccatcccgttctctgatttgcagcaggtgagacacccctcacctgcccctgcccacccttctcacactgcccagggtatggcagagggttcacccactctgcctcagaggaggtagggaaggtggagttagggagcctggtagccttgtaggccccagctccctcccacctcgttctcttaactttttatgtctttcctatctccttcctgcaacctttattgtttcactcccctttgttcttttccttctgtctctcccatccctgtctttctctttgccttcctgttccccttcattccctccttctccatcaccatctaatctcccctccccatttttcctgattgccctcctcacctgtctctgttcctctcctccccggcccctctctgtctcaggtctccaggatagctgcttatgcctacagtgcactttctcagatccgtgtggacgcaaaagaggagctggttgtacagtttgggatcccatgaagagaggggtccttggacagctcttctcctctcttcatcccatctctaccccacccccttggcccccagcctcactgcggcttatacagtaccctaacctgctactaatcacagagaaaaatgtgaagaaggaggagaagaggaaggctagaagcctgagcaagtgagggtagaaccttttgggactggcctttgaagctctggccagggatggggtgggggccaaaaggacagagcctggtatgtcttcatagtcattgagaatgtggagataccagtttgggtggggggtgatcaccaggggacctagggagatccccttcccaccctctctgttggcctcagagtcactcctgccccctctccctgacttggtgctcacatgcacctcactagggtttgtgaccagggtctggatgagcttgaatttgaatgaattgagtttgtatttctagaaccctgggtttttacatgtttggtctttttttgttttggtttgtcaccctcgataaaggaagtatattcatcca

SEQ ID NO: 11935 - DNA, 1967 bp, Homo sapiens; identical to SEQ ID NO: 11934

SEQ ID NO: 11936 - DNA, 509 bp, Homo sapiens
tgatactcttcctaatatccacagggagagaggatgatatgactcccaatatcgcaggtggggtacaaaaccctgtgatattgttcctaatatccagagcgaaagaggatgatatgactctcaatatcgcagagggtgtacacccctcctataatattgttctgaataccctgggagagagaggataaggttacgttgaatatcgcagggaatgtacaccaacccctctgatacccttcctaatgtgcaggggaagagaggaaaatttcactcccaatatcacagaggcagtacaccccacttgtgatgttgttcccaatatgcaagggggagtacaccccacttgtgatgttgttcccaatatgcaagggggagaggatgatactactctcaatatcgcagggctgttcacatccccagtgacattttttcctaatatctaggggagagacaattatatgacagcaaaggtcgcagggtctgtacatcccttcctgatattgttccta

SEQ ID NO: 11937 - DNA, 1142 bp, Homo sapiens
tgtttttaagcagaagattctttttatcaaatgaaatcttaagcagaatcccagcatataaaacagaatggaattactttgatctgattgaagtgggggctggtttcagagatcataggccatcttcttggcctgtcatggaggcctgtgaggcatctctacagaccctggtactctgtgaagagtttggaaattactgatctactttaacccccaaatctctaagctgaaaagtacaaaggggcccagagagttagataaatttcccaaggctgtgtggtaaacccacgtctccagtgtcccaggccagcaggcctttccctcaattgcctccctttttcagcaaaataagactagagctggccaggtgcagtggcttatcctgtaatcctagcactttgggaggctgaggtgggcagatcacctgaggtcaggagtttgagaccagcctggccaacatggcgaaaccccatctctactaaaaatacaaaaaaaggctgggcgtggtggctcacgcttctaatcccagcactttgggaggccaaagcagacggatcacctgaggtcaggagttcaagaccagcctggccaacatggcgaaaccttgtctctactaaaatataaaaaattagctgggggaagccgaggtgggtggatcacaaggtcaggagatggagaccatcctggctaacatggtgaaaccccgtctctactaaaaatacaaaaaattagccaggcgtggtagtaggtgcctatagtcccagctacttgggaggctgaggcaggagaatggcgtgaacctggaaggcggagtttgcagtgagccgagatcgtgccactgcactccagcctgggtgacagagcgagactccgtctcaaaaaaaaaaattagctggatgtggtagcaggcgcctgtaatcccagctactcaggaggctgaggcaggagaatcgcttgaacccagcaggcggaggttgcagtgagctgagatcgcaccactgcactccagctggggtgacgagtgaaaccgtctcaaaacaacaacaacaacaacaaattagccagtcatggtggcaggcgcctttaatcacagctactggggaggctgtaggcaggtagaatctcttgaacctgggaggctg

SEQ ID NO: 11938 - DNA, 9391 bp, Homo sapiens
tgtttttaagcagaagattctttttatcaaatgaaatcttaagcagaatcccagcatataaaacagaatggaattactttgatctgattgaagtgggggctggtttcagagatcataggccatcttcttggcctgtcatggaggcctgtgaggcatctctacagaccctggtactctgtgaagagtttggaaattactgatctactttaacccccaaatctctaagttgaaaagtacaaaggggcccagagagttagataaatttcccaaggctgtgtggtaaacccacgtctccagtgtcccaggccagcaggcctttccctcaattgcctccctttttcagcaaaataagactagagctggccaggtgcagtggcttatcctgtaatcctagcactttgggaggctgaggtgggcagatcacctgaggtcaggagtttgagaccagcctggccaacatggcgaaaccccatctctactaaaaatacaaaaaaaggctgggcgtggtggctcacgcttctaatcccagcactttgggaggccaaagcagacggatcacctgaggtcaggagttcaagaccagcctggccaacatggcgaaaccttgtctctactaaaatataaaaaattagctgggggaagccgaggtgggtggatcacaaggtcaggagatggagaccatcctggctaacatggtgaaaccccgtctctactaaaaatacaaaaaattagccaggcgtggtagtaggtgcctatagtcccagctacttgggaggctgaggcaggagaatggcgtgaacctggaaggcggagtttgcagtgagccgagatcgtgccactgcactccagcctgggtgacagagcgagactccgtctcaaaaaaaaaaattagctggatgtggtagcaggcgcctgtaatcccagctactcaggaggctgaggcaggagaatcgcttgaacccagcaggcggaggttgcagtgagctgagatcgcaccactgcactccagctggggtgacgagtgaaaccgtctcaaaacaacaacaacaacaacaaaattagccagtcatggtggcaggcgcctttaatcacagctactggggaggctgaggcaggagaatctcttgaacctgggaggctgaggttgcagtgagccaagatcgtgccactgcactccagcctgtgtgacagagtgagactccgtctcaaaaaaaaaaaaaagaaaagaaaaggctagagctacttgcagttgcctgagttagagaacatctctacaaggtgtaagtgacttctcatctgctcaacagctcaaattatttattgtcaaaccatgctgtctatgcttaggcctttaggactactagggtcgtgggagcctcaaagtgtattctgcttggtccaggccttcttgggcttgatgttcatgcgtttccagacttcagctgtggtgcggtctgctttggtgaccccactgaagtcgaacgtggtgatacgggacagggtgcacagcacatattgcctgtggggaagacttaggctgggggccagcacccccaccagaatccccttccccctccactagttgctgttgtcttccctgactgcaaggaatggagggacttgagcatagtttgggaaagattaggtttatcctgactgagagcaaggaatgcttagaggtctgttactcccttcccaggtccaagcatggcagaagaatggtcgtagatttcttgtttctcctcctcctttcctttaggggagcccagctagacgctacctccaggggcagggcacttacctataccctttctcttcctccatggggttcccatggagtgtcaggctacggagccgaggaaggacagccagcttattcacctcccccaggcgctggatgctgttgccgtgaagatagaggacactcaggttgaagaaagttgttaggacctgttggggagggaaaccaaaagccaggctagacaggacaggaccctgaatctctgctcagggctgactcgtgggcagagaaggaagaatgtggggaacaacctgccctccactccaaccctccacagccatactgtatgactgtaacctacttttatttatgttttaagacatacagggcatcacactgaaaaggagctgtgatctgagggtcaggagtgtgggcctgggtaccagcactgccactgacttgcctctctcagccttagttgccccttcactgaagacctttccagctttggtgatctacgattctatcacagcaagcaacaggaagacagagcatcatgctaggcacataagaagcttttaaaatactggttaaattgagatcaccacaccaggggaatagtgtccaagtcatgctccagctcctttcccctcttagggatcttggactagaaaaggccaaactttatttcttaaaacttgaatctgagttcacagaaagtaagtgctgtactttattgactacctcttccacaggagaacccagcacaggtcacagtgggtgcgcagtgacagttagaattttacttcagcctctgatgtaccagttgtttgttgggtttcatgtattttcttttcttttttttttttttgagacggagtctcactctgttgccaggctggagtacagtggcgcaatctcggctcactgcaacctctgcctcctgggttcaagtgattctcctgcctcagcctcccgagtagctgggactacaggcgcccgccaccacgcccagctaattttttgtatttttagtagaggcggggtttcaccatgttggccaggatggtcttgatctctcttgaccttgtgatccacccacctcggcctcccaaagtgctgggattacaggcgtgagccgctgtgcccggtggttttcatgtattttcattcaatcctcacaaaacctttatgatactggcatattatccccatttttccgacagggaggctgcagttttgagaggttaggtagcttgctcaaagtcacagtcagtaagaggcaaacccaggatttgaacctacatctatctgtctggccccctagccttgtgctttggactgtaccatgctgcctcattacttccttgataacatgtaggagtggagaggttgggggctgaacaaagtggcttcaggctcccctgactggattcctactgttaggaactcacagggtcaatggaagtcaggtcattaaaggacaggtcgatccaggccaggttctctgggtgctccaacagctgtgaagccacctggttgaagtctctcagatcattgagaacattgttattcagccacagggactgggtcagtgatttccccgactttgaacgcttcagtggtcgtagtcctgtccttggctcctcatttaccagatctgtggggacaaagtgagacttgggtatcatctttgcttttttggctttagggggtgggaagggacagagctggaaagattagccatccaggctgtagctggagggtctggaagggccatagccctgtgcctgagtctagtgcaaccctgtcccacagcttccagcaatcagtaagtttagactaagggccagagacttctatctcaagctcttggctttccaggtcacatggacttctcatgtccactgtaccactgggtcttttttataccaaaccagtgtggggttgaggaaaactaagaaccagaattgttgggcttgagctgagtagatgatagcacaaaatcctgaattaactactggtaaagcctatagaattcacttcaatggaatacactttgatatcctgtctctctttccattaatgttgagtacctacagtatgccaggtactggatatacagtgataaacaaaatgagagacagtctgttccagactttgtatgaataatagggcagagagcagacatttgtgccttggaggagcttatatgggcaagatgggagcaagctggcaatatggtgtgataagtgctatataatagttgtagcagcacagaagagaggctattgacccagtatgggagctcagggaagtttcccagggaaggtgaagcctgagctgaatctccatggattaggggatgtttatcaggcaaagaagggtaaacaggcagggaacagcatgaagaaaggtatagaggtacagaacagccagggagtctggggcgggtttgtgtgcctgcacaagtgcttgcacgcactgcacaagggggacagagaggaaaaggaggcaggaatccagtcaaaagtctcaaatgtcaggctaaggatcttgggctttaccctgtgtgtaatgggaaggcactggagtgtttaaagcaaatgattcaaatcttttatttcagaaagatcactcttaagtgtcagtgtggaatatggattttagggagtgagttggaccaaatgaccaatttggctgtttgagtcatccaagcaagacatgagagggccctacaatcaacataatttggttgactggatgtaaaggtagaagaatattaaagggtggttgccagttgtattaactggtaaggaattacagaagaagaaatagcattgggaatgtgatgagttcaggcttagctttggtgtatttgaggttcctgtacaaaaaggtggagaagtcaagtaggcagttggagatgaaggtcggaagctcaggagacacagacttgagaatcattagcatagaaggcatacaagttagggaaagagatgagattcctcagggagagtgagggtagggaggaaggtcagggaggaagaagaatccattagagaagttaaatgatcagggaaaatcaggagaggacagtttaaagatgttcagggagtaaatagtttatagtagtaagttccagggaggtaaggactgaaaagtaattttggcaacttagaagtccctggtaaccttggtaagggctgcttcagtggaatggcaagggcctggaggcagaagccagatggaagtgagtgagttcaagagtgaatggaggctggtttcatgcctgtaatcccagcactttgggaggccaagacaggaggattgcttgagcctaggcgtttgagaccagcctgggcaacatcatgaaaccccgtctctaccaaaaaaagagtgaatggatataagcagttagcataaacaacatcctcagaaagtttggctgaggaggagagagaatagggaataggattatgttagaaccccggtgtatggaacaccccaaagcctcactcccactttttcaaaatgaggtccagttcccattgctgctaagcctttggttccctagttcacccctggggaaggaagtatttagtatttgcggaagctagccagctttcttcactctcttctgctctctactggaaggacaccctttgcccttccacccccacctctcctcctcctcagatgcaggtcaggcaacatccaccagatggctctctgccttaatcctagagtgagcaggacccacaattggggcctggggttgcaggagggtactggaacggcgtaccccagctcatgaattcctaatcctgcttccctccccacacctcctgagaaccctgaaacagaatgacacagatgaatcaaaattaaggtcaaaataaccccacatgaactagtgccccatgtgataaggtagcagcttggggaatgccaccaagcatggggtggaggccaagctcagagggaatcactggtgggacagagttgcctaaaacttgatgctggctggagctgctcttatcaaggatggagtggtatatccaggctgccacaggttgctgctcctctcagattccaccaatgcactacactgcctaagaatctgtaaagttccttgttcagagtaggccaaagcaggtctggaagctggaccacaaatatcaatgctttgggaactggggagcatttagctccaggaagatctgggaaactatgttcctgttttcctctctctgaaaggctgccatgtagctcttgccatgtgtcagaatacaagttagtttgattgaacttccctgtgtcatccctcaaccaccaactggaaggtgttggtaggtgtatatggtgggggacttccttaacactctaggtttgtgaaaagttagaggaactgggttgatggtagcacagattagatgccttccaaaggcactgccgtttcagattctgtaatatttattcattcaccaaatagtgtgccaggtacccccaaactctattgtatcccttaaccccagctgtaaataagtgtttcagaagctctggggaatctgaagggactctgaccttttgggcctttgatgtgcctcacatacctagcaaggagcacaatacctggcatatacatatgacgcacacacacacacacatatataaatgcttttagtaagtgctcagtaaatattgaacggttgaatgaaggatgggccatctgtaccatttacgttttgtgatgtagagttacccttggtactgcttgtctctctcccaattctgaggactccatagagggcagagctacacctcctccatcagagttagaaattcccatgataggtaggaggtatacttccttcccacctctgtcattgcacctgtcttagagatagttactattgcagctaaaaccccttgtgaaacatggattacatcagaagtgatgcagtgcacaataaagatcacagcaggtggctgtgtgctcgtgagagaacaaacgtgagttaccactgtggctgatgataacccaagtagaccctaaacccaatctaagactggtgctatttgccagcttcccgagcttaaaggcagtggctaccagttgcctgagagaagactaaagccaaataatagttctgagatagtggatgttaacgtgtattctgtgaggacagatggactgatgctttaatgaaagaccagataacaaaagccagggatggcagaacttccctaggaagaacggatgactcattgggaatatgacatggctgacagcctccctatgttccctcctgaagggactagctacccatttacaaagacattgaatggcaaaatgggagcgagtgtggacagtgttggaacctgcaataagtgtaggtgatgatggaataaacttggatttggctggaatgagtgtaagaaatttgtcagtaagtatttaaactggaaatatgccagtttgtagataagacccctcatgtttggccagtcagattaggcttgtgtctgcagacagaggagaaaggttttgcctacttgctgggactccacaggagcctgtgttttcctcctctcttcaggtaaaaacaggagaataaaactattggctgatagactggcttcccagttttcttccacttgactttcctgctgtagcctggcttcttttaaagatgatcaactactgtgatagccccctgtttcctttcagatttgctgcttaaaaaaaacaaacaggggcacatgttcttaggatctcctggggctgtatcggggcaaaatcaaatcaaacaaaaagacagaaaaaaacctctcactctcccctaccctccaaaagacagtaacaacacatctgcaagcatatgggaagaatctctttaggcttttaagtagattatggtttcttcctagggaccacactgggcctgctgccttagtgagtggagtactgtgctctgggggctgaccttgaatgacgtggatgcttctgaaggagtagtcaagagggggctcctgtaccgaagtgttcatatagtcccgtttgttcatagttcaggccatcattcaaaggtgcaagcaggtgccctgggagtctgggttcagcctgggaggacagagaaagaccagtgtttcaagtacaccggctttcaggtttccccatagtcctccatccctgctttctgtcctctactactctaggcctgcctggctgtatttccattttaagatatgaaatcactcttccttgcatccttgcatgtatagagcactttctacttctcagagcaccttcacatctcttagaactcatttgagaatcgaacacccatttctttgtctggaaaatgccagatgaagaaactgaaacccaaggggtaaaaggacttgcccagagttaagccagtgagtcagttgtagactgcagtcataatctcctgaatcctactctgagaccttttctgttactctacagtagttactgtggagactgtcttgatacccaccctctggtgacatcaactgggctattctattgcttaacaaatccttgagggcctgcaccgcatctggttggtgtctcaccacccctctcagtctggcccagctggggatttgccaccttctccgcttggcttctctgccagccccattacctttccatccaaataccctactttcagccctatcctgaatgtagccatacacatataaacatacacacacacaaaaccagagtctacctctcactcacctgtcactgatggctgaaactccaccattaggcattcattcctgtgggttcagggattgtttccggttaaaatggaaatactccctgacagggatgaacacaatgttgttatcagtcacttgcaatgtggtgtgaattgtcttatcagatcgtttccaatttgttagctaaagtaaagctgaggtttttctggagacaagggagagccatgagaatactactcacctgggatgaagagagctgacaacacactttaccaaggggtttgtatgtgaatcacacaagcaaaagacaaattgacaaggataaggacaagaacttgtcccagtcgacctcccctttctcattccatccactgctgccacctttgtattattatttgtattacttcacctgctttccaaaaggatttcaggtttacaataataacacagtcataaaacagatgatttgcagaatagtgccatccactagaaatataatgtcacaaatgcaagccatatatataatttaaaattttctagtagccaaaataagtaaaatgaagtggtgaaattaattttaataacttaattttacccaatatatcaaaaaatcattcaatatgtaatcaatattaaaacttactgagatattttacacttacagcacatcccaatttggactagcctacctgtcaaatgtacgtgactagtggctaccatactggacagtgcagattagaaagttaaaaatggaagagaaagatcagaaactagattacaggaagagagagatgtgccaggcactttaagaatctaagcctacatttagctctgaaattcctggcagccaaagcaaaaagagaaaccttgggattgcagttctcatcattg

SEQ ID NO: 11939 - DNA, 2561 bp, Homo sapiens
tttagcagtctgtgatgatcagcaaaaaagcacataaagtaaaaattagttgaccatgctaaattcaattctggaatttttttttatttgggcatttctagaactttttacatttgaaagtacatgatgagtattagtaacgatgacttatgtataatcagaatctttatgacaatttagttttacaaggtcagaagagatgagtttgctaaacccagctgtgatacctcagttggaaagggaattcaaaggtatgctttgtagaacagaaaagtatagtttttttttcatgaactttaatcattttctgtttttcctctatgtgagtcagctacaaaagtggtctaatttttacaacagtagaacttcctccttttctactgtaatcttcccactgactttactgcacaggtatgaaatactagtgtattggatcttcagtaacctttttatttcctagatgattgaaatataggtatttactccatttaaaccaggtgataagatgatgtaaatactcagggagggtattaacttgttacttttgctcgtttggggtgtaaagtgccatgactgaataatcttcaattcatgattctagagtaagtttaatttggaaaaaggggcttcacacatggtggtggttgaacattgattcttttatacttaaaaagatgaaaatgttttgtggactgatacattttatcttactgaatatgaattgtttatgtatctctactgtcaaatagcctttttgaaactcaggaaagacaaaggttcaattacaccacttttgtcaataagcaaaccaggtattttttttttctcctgttgtctggatatggcaatagattttttaaattgctgtgagaacccatatatgaaaagagaggagttgaattgtgtgtgccttttatgtcttgagatttatatgtggaaaagacgacatctacttcaaactgtatttttttcgtttttttttttttttggggaaggggggagaacggggtcttgctctgtcgcccaggctggagtgcagtggcgcgatctcagctgactgcaacctccacctcccgggttcaagggattctgcctcagcctcccgagtagctgagaccacaggtgcgtgccaccacacccggctaatttttttgtatttttagtagagacggggtttagtagagacggatcactcctgaccacgtgatccgcccacctcggcctcccaaagtgctgggattacaggcgtgagccaccacccccggcctgtattttcagagaggagagcttggtgtttttgtggtgccaagtggtaagataatgtctctttgaggcttcctatggactgcctttattttagtaaactcaagacaccagttaacctcaacagagttttggccttattagaatttgttgtgcatcttattgaaagccaggtttacatcacctcaccccattattctttttagttaaataaatttaccatgccaagtaaccagaatggagcaaattggttgatctttaaggcagtaggtttgactagctagctatcattattgtcacatctaatgctaggcaccagaaaccatttgagccaggagtgtgaatgaataattccagagacactttagacattttttaatgttttatatgaacattttacatttgtgtgattgccttagatattaaattttcctagtgctgataaaaacagcaacattcataacttattttatatattgttccaaagaaaagaatttgttttaatggtttcaaaataactgcacctgaatttgtttatgtgccttaagttctctagtgctatttcaacttttttttcaatctaaatgaagcttaccttagataaggttcatatttgtttcctatagagtaaataaacttccccttcttaaattgtgtaataagcaccaacgtgtggttgcttggcagaatgagaatgttaagggagattgttggatgtttggagtttcattatattttttgtttttattttttgatacctaggtgctttttaaaatattcagacaaatatctatcttacattgattaaacccgtgtaaattcatttgcagtatctacatcgaatgtcaaaaaagtatacttatttttgttccatacttatgtacaattttttccctcttcaggctttttcatttacctttttgaaaaagcacttactctccccttccctatcacccctcccccaaggtttctttatttaaatttttattgagagttgttggagctctaagacaatacaaatttagagttgaacaaaagtataatctgctttacaactagtatagacctaaggtcatttgctttcaattagaggctccagagtcttcatagtggaaagaatgctttgtatttaattgttcttagttaagttgtagcacgtgaatacttacttacatgttttgtttaaatatacttcttgcatagtttaattttttaaaagttgtatctaataaaatgtcttttaaccattattacttgactatatggttgtattaaattttgtttacgaaaaatttgtt

SEQ ID NO: 11940 - DNA, 2561 bp, Homo sapiens; identical to SEQ ID NO: 11939

SEQ ID NO: 11941 - DNA, 1249 bp, Homo sapiens
caagtggtaagataatgtctctttgaggcttcctatggactgcctttattttagtaaactcaagacaccagttaacctcaacagagttttggccttattagaatttgttgtgcatcttattgaaagccaggtttacatcacctcaccccattattctttttagttaaataaatttaccatgccaagtaaccagaatggagcaaattggttgatctttaaggcagtaggtttgactagctagctatcattattgtcacatctaatgctaggcaccagaaaccatttgagccaggagtgtgaatgaataattccagagacactttagacattttttaatgttttatatgaacattttacatttgtgtgattgccttagatattaaattttcctagtgctgataaaaacagcaacattcataacttattttatatattgttccaaagaaaagaatttgttttaatggtttcaaaataactgcacctgaatttgtttatgtgccttaagttctctagtgctatttcaacttttttttcaatctaaatgaagcttaccttagataaggttcatatttgtttcctatagagtaaataaacttccccttcttaaattgtgtaataagcaccaacgtgtggttgcttggcagaatgagaatgttaagggagattgttggatgtttggagtttcattatattttttgtttttattttttgatacctaggtgctttttaaaatattcagacaaatatctatcttacattgattaaacccgtgtaaattcatttgcagtatctacatcgaatgtcaaaaaagtatacttatttttgttccatacttatgtacaattttttccctcttcaggctttttcatttacctttttgaaaaagcacttactctccccttccctatcacccctcccccaaggtttctttatttaaatttttattgagagttgttggagctctaagacaatacaaatttagagttgaacaaaagtataatctgctttacaactagtatagacctaaggtcatttgctttcaattagaggctccagagtcttcatagtggaaagaatgctttgtatttaattgttcttagttaagttgtagcacgtgaatacttacttacatgttttgtttaaatatacttcttgcatagtttaattttttaaaagttgtatctaataaaatgtcttttaaccattattacttgactatatggttgtattaaattttgtttacgaaaaa

SEQ ID NO: 11942 - DNA, 432 bp, Homo sapiens; identical to SEQ ID NO: 8050

SEQ ID NO: 11943 - DNA, 127 bp, Homo sapiens
tttttatatttttagtagagacagggtttcaccgtgttagccaggatggtctcgctctcctgacctcgtgatcctcccgcctcagcctcccaaagtgctgggattacaggtgtgagccactgcaccc

SEQ ID NO: 11944 - DNA, 432 bp, Homo sapiens; identical to SEQ ID NO: 8050

SEQ ID NO: 11945 - DNA, 92 bp, Homo sapiens
tttttatatttttagtagagacagggtttcaccgtgttagccaggatggtctcgctctcctgacctcgtgatcctcccgcctcagcctccca

SEQ ID NO: 11946 - DNA, 390 bp, Homo sapiens
tagcctttttgaaactcaggaaagacaaaggttcaattacaccacttttgtcaataagcaaaccaggtattttttttttctcctgttgtctggatatggcaatagattttttaaattgctgtgagaacccatatatgaaaagagaggagttgaattgtgtgtgccttttatgtcttgagatttatatgtggaaaagacgacatctacttcaaactgtatttttttcgtttttttttttttttggggaaggggggagaacggggtcttgctctgtcgcccaggctggagtgcagtggcgcgatctcagctgactgcaacctccacctcccgggttcaagggattctgcctcagcctcccgagtagctgagaccacaggtgcgtgccaccac

SEQ ID NO: 11947 - DNA, 1812 bp, Homo sapiens
gggcagagtagagatgaatagttgggtatggcacaggcggctacctgttgtatcagtgggtatggtttacctcacatagggcacctacacgtgaagaaatggacaacagaactgctttgtctgttggcatggttgtcttattggaggactgcattattggaggactggtttcctcttccctaccaggacaatcctccgaagttctttgagctttttctactgcctatttttgcagcccaggtcagttgatcaggaggtgtggccttgtatttggtccaccttgagtcagatgccgctctgcttactgagtatttttatattggactcaaatcatgatatggaatcatttgtagacagcagacccaccaaaattctgctgcgcagtgacagcagggcagatcacggtgttaactgtaatcatcctggtagggagagggtatttatatactataggacagatggagagtgtgtactgctttcagaggtggaattgcaggctacctgggaggcaatgaatttccgcaacctctccaaaagcaaagatagaagacatgcctttctatctcttcacctctgatgcattcagagctacatcataatgttgcacaaggtcccctttaagagtaggtgtagcctgttagagtccaggcagggcatatgaacatagaacaagtaacttctcctacactcagtcgaaaggccacaacctccacacagaaggtgaggttcttcctgagcacaataatgtagttgccagatcttccacatggctgtatcaatgggcttgactctggagccttagatttgggcaagaacatttaatcatcccttgaaggaccaccagctaggattgttaccatgagagaatatggggaggagctatttaagaggatccaaaatgatgtgctgcagggctccaggctcattttattgtgtcagtcttatttaaaggtgtaagtttctcaagcagtgactagttcagggaaaaagaaaaaaaataaaggcataaggctcaaacaatcctttaactgacctctaagcaggtaataaatattactactttttttcttatagtttcttattttttaccttttttatgttcaactctttagtccacttgagattttttttctggtatgttatgtgaaacataaatcacatggacacttttatatggggcactgtcacgtgcaggattacaaatacctgttgtatttattcattcagtcatccattaccagttcaaggcacattgttagggaccagagatgataaacatcaaaaagaatgtgcttcttaatcggtagcagcttattgtccatttaaggagatcagaggtacataaattactgtatatacaaagcagcatgtaaaaagtgccatgtgagtgatgcgaacaagaaagaatataaaatataaggattgttttttatttttacctgagggcatattagggaactagcagtagattccttctgcctggaataagagttttcccagaagaagtgtcacttgagatgtacctacagggacaggtagcaatcttaatcatgacttgttggatataatgaacagaaatcctcttgtatcatctcaatttaaaaagggagctatccacttatcttgcttctaagaatctattctaaaagtaaactggctaaaacatataatgacctatgcacatagctattttttatggtattacttgcaatagcaaaagactgagaacaacccaaatattatcaatatggggctagtttaaaaaactatgatacatccacataatggaggactgtgcatcaataaaaagaa

SEQ ID NO: 11948 - DNA, 1812 bp, Homo sapiens
gggcagagtagagatgaatagttgggtatggcccaggcggctacctgttgtatcagtgggtatggtttacctcacatagggcacctacacgtgaagaaatggacaacagaactgctttgtctgttggcatggttgtcttattggaggactgcattattggaggactggtttcctcttccctaccaggacaatcctcccaagttctttgagctttttctactgcctatttttgcagcccaggtcagttgatcaggaggtgtggccttgtatttggtccaccttgagtcagatgccgctctgcttactgagtatttttatattggactcaaatcatgatatggaatcatttgtagacagcagacccaccaaaattctgctgcgcagtgacagcagggcagatcacggtgttaactgtaatcatcctggtagggagagggtatttatatactataggacagatggagagtgtgtactgctttcagaggtggaattgcaggctacctgggaggcaatgaatttccgcaacctctccaaaagcaaagatagaagacatgcctttctatctcttcacctctgatgcattcagagctacatcataatgttgcacaaggtcccctttaagagtaggtgtagcctgttagagtccaggcagggcatatgaacatagatcaagtaacttctcctacactcagtcgaaaggccacaacctccacacagaaggtgaggttcttcctgagcacaataatgtagttgccagatcttccacatggctgtatcaatgggcttgactctggagccttagatttgggcaagaacatttaatcatcccttgaaggaccaccagctaggattgttaccatgagagaatatggggaggagctatttaagaggatccaaaatgatgtgctgcagggctccaggctcattttattgtgtcagtcttatttaaaggtgtaagtttctcaagcagtgactagttcagggaaaaagaaaaaaaataaaggcataaggctcaaacaatcctttaactgacctctaagcaggtaataaatattactactttttttcttatagtttcttattttttaccttttttatgttcaactctttagtccacttgagattttttttctggtatgttatgtgaaacataaatcacatggacacttttatatggggcactgtcacgtgcaggattacaaatacctgttgtatttattcattcagtcatccattaccagttcaaggcacattgttagggaccagagatgataaacatcaaaaagaatgtgcttcttaatcggtagcagcttattgtccatttaaggagatcagaggtacataaattactgtatatacaaagcagcatgtaaaaagtgccatgtgagtgatgcgaacaagaaagaatataaaatataaggattgttttttatttttacctgagggcatattagggaactagcagtagattccttctgcctggaataagagttttcccagaagaagtgtcacttgagatgtacctacagggacaggtagcaatcttaatcatgacttgttggatataatgaacagaaatcctcttgtatcatctcaatttaaaaagggagctatccacttatcttgcttctaagaatctattctaaaagtaaactggctaaaacatataatgacttatgcacatagctattttttatggtattacttgcaatagcaaaagactgagaacaacccaaatattatcaatatgggactagtttaaaaaactatgatacatccacataatggaggactgtgcatcaataaaaagaa

SEQ ID NO: 11949 - DNA, 155 bp, Homo sapiens
tgaggtcaggagttcaagaccagcctggccaacatggcaaaaccccgtctgtattaaaaatacaaaaattagccaggcatggtggcgggtgcctgtaatcccagctacttgggaggctgaggcaggagaattgcttgaacccggggggtgggggt

SEQ ID NO: 11950 - DNA, 760 bp, Homo sapiens
gtgttgtaacaactggtgacatttcagttcatgtgactactatgacctaatcactcagtctctcagtgtcccaattccagattcttgggtgacataatattagactcacatattattagactaactaatattagcccaccatggtacagcatgctgaggctggagtcagaagtgagcagaatcctgtaatatttccaagagggaatatgggcagacaggcaatggttagcacatcaacttcatcaagtacttcaaatattttggtttctcaataaatatatacatgagttaataaatctagcatatttagtaaacaacttataatcctacctactgttgtaatgctcagtaaccacttcagagtaacagtaataatagatgactttatactaaatgatggctttacactaaaacaggtttctaaaactatctgtggtaagaaccagttttcttatttgtatttccaaatagtctccataggagaatgatgtttttgtaaaatatgctaaaaatgaattccttgacaaattaaattttaaaaagatatgcaaaattgaaaaaattttttttgttattagattcaacagacagaagattgctacgtcaaattgctctaggtttctaaatgcttagtctcaatttctgtactgatcacacaccagtaacagttccatactttaaatagcactgtactaaaactcacttatctaaatagtaaattttataataatgatggtcaattaatggcatttaatattct

SEQ ID NO: 11951 - DNA, 155 bp, Homo sapiens; identical to SEQ ID NO: 11949

SEQ ID NO: 11952 - DNA, 759 bp, Homo sapiens
gttaaatatgcatgtatgcactattggttaatattttctattttctaataatctacaggtgtctgtagttaacgttgagtcatagtgggacttgagaagtggtgcatagccagtaagctgacttttcccacccataaaaatacatgtgttttgttcttgatactatgtgtgtgcacaacaatgggaaggccattgtcagccccccaggagggacacaccgcctgctgttccatatgaacgatgcttgctgatcctgtgtgtggtcacgcagcgcagttctaccttcccatccctgtgcaggtgactgtcagttctttaaattcacttcaagcagaaaaagcccaggaccccagaacagtaacatcacatccctgtttatataagcctgaagcaagacaagcgtcaggaagaaaatttccactttaccttttttctattaataaagaccttttaagtaaaatctctgtagtgcaagttggcatgagcagacttggtaacttgtctttaaaggagaggtttaaattggaacttttaaaaactagaaaacaacagattgataaatcaattttgtattcgctagatgaagaaggtgctgtattattcccagggataataactctcagaattaatcaggctaaaaagatacatttataaaaatattacagttttatatattaagcctaaattcgatgttttgatgtgtaatatgggataaaataacatactgttcagtgcatgaaaatgacagagaaactaaat

SEQ ID NO: 11953 - DNA, 394 bp, Homo sapiens
gaggacacaggtttcctctaggttgccaaaagtggatgatgaccccagctcagcccagctgtggatattcgctctctgaaaacccctgaactgtttgctctgtgcaatttgtcccaaacgtgatcaactgtctggctctaagacctggtcttggttggcacctcatgattattcccagatgttctgcggagttttgccttgttagagtctaacctgactagaaattcaggctccccttccagctgggctgtgagttgtgtgcacaactggggacaccatagagagagcttcacagccaggagccaaggatggtgtgaagaggctgtgctctttccacctgcatactgtctgctgcctgaggtctgatgcaccatgtgtgtgcctgtgcatgtgc

SEQ ID NO: 11954 - DNA, 25806 bp, Homo sapiens
agaggaggaggaagccggaagtgcatcggccccgggtctgtccgggcgttgcgggattggggcctgggaacgctcggcccccggcagccgagaagcccgtgactgggctgagcagcaccatcccagccctggggcctgctgactggtgaggaacagtgggcggcgtggggagggtcttttctgcgcacaggtcgcaccccaaaccgccggtcccagatcacgggtccccgatccccgcggcccagcccggtcctccgcccctcggcatcctctggctgagaccctgactccgggtctttgctctagcagtagccgatccccgatccctccgccccccactcgagtctgcccagaccccatctggcccctggccctcttcggttgtcgtcccgcagtcccattccggagtctcctgtctccgccccccgaattcccgcagccctccccgtctccgtcagccccgggtcccacccccctatcctctggtgtcaaccctgacagcccagtcccggcttcacctgcagcgaacccggagcgttgctatcctccaccggactgtcaggctctgcgcgccccgcggaggtcggcggcgaccagcagcgactgcggagcgacggcgggcggccccgggcatgtacgcccccggaggcgcagggctgcccggcgggcgccggcggaggagcccgggaggcagcgctctgcccaagcagccggagcgtagcctggcctcggccctgcctggcgccctgtctatcacggcgctgtgcactgccctcgccgagcccgcctggttgcacatccacggaggcacctgttcgcgccaggagctgggggtctccgacgtgttgggctatgtgcacccggacctgctgaaaggtgagggtgctgcgcgctggcccttaaagcctcggtgggggacagaatgtgttctggctgaagcagagatagccagggaccagacacttggttgaaggaaacggccccataactgcctggtgttcatgcccaccaggtggctctgtttggggtccggcccctcattaattctgatgttattcagctaagcacctactcctcacagccatgttaatccggactgctgctattttaggattctgctggaggaaggacgctgtgtatcgagaaaagataagggtgctaggtatcacagttagctggcctcttctaaggatcctgtgaaatacggaaaagcttctttggggcagactgattaatggagaaaaaggaacttttaatatgactaggttttaaaagatatcttagagttctatggtaatcggatgcgtattagagaagaagggaatctgtggcattttaggtaatcggaagaccgttccattgccacccgcagtacaacagtcggaatgtggctcttggaaccattataggtgtgcctgacagaggcaaggttgctttgttcatcatcatgctttccggccagatagacagcagacgatgggagggtcctatgggccccatagtttatcctgcccattcttgtctccagtaaaaattgtgaagtgtgaggacaggactggactgtatcacctgctttttaccctaacaatgatcaatgtaccccaaacagtccttagtaacagcatagttcatcaaccccaaggtcttttgagccatcttgaaggtcttatatcctctctgtgctatcctgtctgtgctattccctggctgtgatgcattccagatgtttactgcaccgcctatcagaagcacttcctgttagatatctgcgtgttacctcctgaagaattcaggcactgggatttggtgaaaaggtccaagttccccgctgtgcatcggaccatactctgcttctgcaggtctaggctgaaaagcctcatccttgtggccaaatgttgcctttctctgagtgttctcttactgttttgcatctctcttgagttttagaagctgtagggtgattttgtagaaggttggggacaactggttgtttccagatttcaccttaatggtactctttgctgggttggctcattaaagccaaagttatgcacacgacagaggccttatatgcagccttttctctgtcatgttgctaatggcacaaagagcattaagcttgagtgagtcttggtggtttttcttttagcacattgccctgtacttgctttctttgaagcacacataccaccttcccaccactagacccatcagatctagaaagctagatctccgaaatctagcactgcatggggtgtgcttagctgtggctcagaaaaatgaaggatctccccaaggctacccagtttagggtggcagagctgggactaccccacctctgttgatgccaatataaaatgatgccgtgtcatttatagtttttatcctttgttttacttcagctgtcataaggagcaatctcataattatttcactttggtgtgcatccttgtcgaaggcatgttaaaaataaaagtaaatttttgagccgggcgtggtggcaggcatctgtaattccagctacttgggaggctgaagcaggagaatcgcttgaacttgggaggccgaggttgcagtgagctgagatcgcgccattgcgctccagcctgggcaacaagagcgaaactccatctcaaaaaaaaaaaaaaaaaaagaaaggccaggaactggctcacacttctgatcccagcactttgggaggccgaggcgggtggattgcctgaggtcaagagttggagaccagcttggctaacatggtgaaagaaaccctgtctctactaaaaatacaaaaattagctgggtgtggtggcacacgcctgtagtcccagatactctgaaggctgaggcaggcgaatcgcttgaacccaggaagtagaggagttgcagtgagcccaagatcacaccactgcactccagcctgggcaacagagcagagcaagactccatctcaaaaaaaaaaaaaaaagtaaattcttggtgcaggttcttctttgttcacatgtgtatttaccctttctaagaaattattcgggccaggccaggcatggaggctcacacctgtaatcccagtactttgggaggccaaggcggatggatcacctgaggtcaggagttcaagatcagcctggccaacatggtgaaaccccatctcaactaaaaatacaaaaattagccaggcctagtggctggtgcctcaactacccaggaggctgaggcaggagaatcgcttgaacctgggaggtgaggttgcagtgagcccagatcacactactgcactccagcctgggctacagagtgagactccatctcaaaaattaaaaagaaagaaattattcaggctccgttttgtcttttgcaaagcatgttttcttaacctttacattacatttgctcacatatttagagaccttaacctgtgtatagtttctacttgcttgcctgtggccatctcctaagagcagtttgtgcccattaataggagagttggcagtggtgcctcatgagctatcacagaagaatcagtaaggaatccggaagtccttgattgcatcttctctcccttttctttgtacctactggttttttggtacccagtgggccttcagacatgtagtatcctgtgtgactgtgctgatcctcagggcctaacagatatcctgacctgagagcctggagtattccacatctcaagagggagcagagctgtcaagcacagatgtggtgcatatagagtttttttttttttttttttaaatgagacagactcttgctctgtcacccaggctggagtgcagcggcgccatctcagctcactgcaacctccgcctcccgggttcaagcaattctcctgtctcagcctcacgagtagttggaattacaggtgctccaccatgcccagctaatttttgtacttttcgtagagatgaggtttcaccttgttgaccaggctgatctcaaactcctgacctcaggtgatccacccaccttggcttcctaaagtgctgagattacaggcatgagccaccgctcctggccacatgtagatacttccagagggagaacagaccctgccaggtctctgccggtgatgggagttgggcagccagcaggccctggagcagccttaccatttctcagcccctgcctgagtgccacattttgacattatgctaagcacaccccatgcctgcttttttcctcctaaacagcatctttatttggtaggtactgtttcagccccacttcaaaaggtcccagctcagggaagctaggtagtttgctcagctaatctgagtggacattgactccaaagtccatactcttactgcaacaccttagtgagctccgagtttatttcccatcaaagctgcctgaggcttatcactttcctattctagttgagttttatcataagcccagccaaagctgtgctttttgtcataacttcatcgcctcagtgttgaggctttagttggtgatcccagggcaaagccactctcccattgtcattcacaaagcttcagaggctttagccaatgaaagctggctccaaagaacccatcctgggctgggtgtggtggttcactcctgtaatctcagcactttgggaggctgaagcaggaggccagcaggatcacttgagtccaggagttcaaggctgcagtgaactatcgtcgtgcctctgcactccagcctgggtgacagagtgagacccttcctttaaaaaaaaaaaaaaaagacctcatcctgggttttctccactgcccctgcaagcggtgcctgcttctcacacagctctcaacctggccctgggtggagatagactcacacctctagaccccagaaagaggggccgcagatagtcatttcttctgagcctttctgcctctcaagtgtggccaccaaagggcactggcaacagccccaggaagcatctttggagaatgaggaagttggggagtagaagtcaggtgaatcacaattgacagcagccactggaagatcaagggccttccagggagagcctgtgtgcctgataggtggtgactggggcagctgacactgccaggccctgcggggcctgttggtgtctgtgggataacctggctgggcactagagggctctgttaagaggcctgtgtcgcaggcctgtctggaagctaaaaaggtcacagtgaggagacgctgagcaggttgcacagatgcataaagagggattggggcattggggaagtgtctctaattcagagggactccagcaagaagggaggcggggtgggacagaagtccttttaagcctttctgcctgcagactgtttgggtcaggagtggttagagcaatgggcagatagacaggaagaggcaggaccttcaaaacaaatctagcctggtgactcaccagtgaccttgagcaaagtcagttccatgggatcctattacagctgcctacttccctgatgactagagggcaccgccaagcagtgtttaccaaaatcaacaggccagagcacagctggaaggtaggaggtgttctgtgtctagccagggcatcgtggactgcaccactggcttgaatttcaagttagggtcctgcgttgcatgccatttctctctcgaataaaatcctacatacataaccttcaggggttttctttagcaatcccctcatgggagcaggtgcttgttgccttccctgctgtaccgacgtctaggaagggaggagagaaagacattgagatactgactccagaagagtctctgagctgggctccaagcctgtctaggataactgcctgttcttccggtgtgctctgagaccctctgaggaaaacccacctgttacatggggcaggcccctggggtatctgttaacgttacccaaagggaatttcatatttggttttctcactaaccctgagggtttactcacagctttggagtggggaaaggcagttatattgaaacaaaacctattggagttttaggtcaaaagtctcttctctctatcatattgtcatacttgtagggtaggcccttagtctggctttagtaggccttggtccacacgggctgacgtgtggtcaaggaagtcttggtagaagaaggaaaggcatgctgaggtgacacactggcccagctgaaacagcctctggttaataacagcacaggtggctgctctttcatgggcacggtgtcagctgacccagcatgccctggtggtgggtggggcagatgttattgttttcatttgatagatgagagaacagaggtccagcgcactcaagggacttgctcaaagtaacacagtctctgctagagctaggattcggcgccaggtcccaagcctttccggtgtcctgaccacttcctagagcaggctctgatggttgcaatgctgcaggagcttagacaccatgcctggcaggttttgcccaataattccccatgtgaggacttaatgacccaaaccttttttgcttcttagagagatttcattgcttcaagctgttcctctagtgagcttagcagctggctctgaggatggctccaacagtattcctgttagcttctgacccctcattcacgcacaactctttaggaattgattgattatctccagggaaaaatacagtggccgagtctggtacttagtgattccgagcagcacagtgtaggggagcctgatcatggtttggaatctagctctgcagcgtgtggcctggaggaagccacttcaccttctggagcccccgactcctcatctgagctgtgtggtaaatcccccaggggggcacttcacccatctgtgtgcacaggctgttccaggaggggtatacaaggcccctccaacaatatttgcctttggagaggagcaggtggacatccgcaaggggagggatgtcctcttggaagctttttatcatgtgcatgtctccttactagtaaaattcatgtataatgaaacataagacaataggagtatatgtcatggatgtacatttttaaggataatcaaatgaacatccttgtgctcaccatccagccaaagaaacaatacaggctccttgaagcctgcacatattacttttcttactccaactgcctggcctcatcagtaatgtgagtggaatctgacacggcctactgcagagcggcatgtgacctctggtaggttattcttggaagcactataagaacactgccccatccctgccacatgccacgtggaccccaagaagaactctcttagcttttaataagatttaaaatacagccaggagatagcccctgtctcctagagcttttctttcagtgaggccccatgcactatggctctgcagggctgggttcaatgaaggctggtcccagttgctggcagggttcacacacaggcaggctttctggcagtagacagttacccaggctggatgcttgggcccaaaacagatggtcagcagacaagagatcatgacagatagttctgagggctgcttcgtgggtgacccaaagccagacagaggtgtatgagccttgtctgggcccagccagcctctgctgggcgaactctgagcctgaggcagggtatgcgtgctcaatcctagaggctcagggcttctctctacccagaacctgtgatgctggcatctgttgggctgagtcagctttgctgggtttaggtcccctccccaggttcctggactttcccccatcagtccaccttcctctgaggtctggaaccagtgtttcttgaagtgtggggcttggatcacctgcatggggattacctgggctgcttgttaaaatccagattcctaggccctgctccagacctagaactcggactctctggggacctgggaacacgctttcagccagtgccacagtgatttgggtatgccctagagattgatgatcacaccccacaccctctcagcctgagatcaagttcaggaaaggacgctatatagcctgagtcttgccagccctttccaaattttcctaaatcacttggtgacccatggcctaaataaaagaagaacttgccagtggctgtaacagaagaaggagaggaagttaaggcccatttcctacttttttttttgaggcggagtcactctgtcaccaaggctggagtgcagtgatgtgatcttggctcactgtaacctccacctcccaggttcaagcagttctcctgtctcagcctcctgagtagctgggactacaggtgcacgccaccatacctggctgattttttaaatttttagtagagacagggtttcaccatattggtcaggctggtctcaaactgctgacctcaggcgatccacccacctcggcctcccaaagtgctgggattacaggcgtgagccaccatgcccgaccccatttctactttttatgaaagcttaaaatacttaatcatggcctggtttctttttggttcagcctttattctaccctatgcttctgggagcttttgcagtttgcatagttatcaaaggagacagacagtatcatctagttttttgtttttttgttttgttttttgtttttgagatggagtctcgctctgtcgccaggctggagtgcagtgacacgatgtcggctcactgcaacctccgtctccagggttcaagcgattctcctgcctcagccccccgagtagctgggactacaggcgcgcgccaccacggccggctaatttttgtatttttagtagagacggggtttcaccatgttggccacgctgatgtcgaactcctgacctcaggtgatccacccgcctcggcctcccaaagtgccaggattataggcgtgagccactgtgcctggtagtgtcgtctagttgaaatgtttttttaaagaatggctaaagtactggagggaaatacaagttgctgtgtgtctgctgcgtggttgttgtcatgggctctccctgcaccatgacccccaggaaccccttgagtgctgtgtcttttctttcagcctcttccttttccttcatttatgcccttgacgtgtgcacgttggcactgtccaaggcttctggggcttttgtggtataaatgtggtggcttcctagcttttcctgttgatggcttgtccccagctctgccgagtctgctgagtcccttttaggtaggtctatttccctttactttccagtttttggaaccttgttttatacctccctttctttttgtgtgggttgccttttaaaagaattcttttgttctcgtagagttcagggagggagctaaactaaatgtgatatagtctaccaactttcctaatctatgtaatactttcttgtagctgcacatttctctaaactgccgcaacttccttcttcctcttttctttattttacttttttttaaaattgtggtaaaatatacataacataaaacttagcattttaactttttttttttttttttttgagacagagtttctctcttgttgcccatgctggagtgtgaaggcgcaatctcggctcaccgcaacctccatctcccaggttcaagcaattctcctgcctcagcctcccaagtagctgggatcacaggcatgcaccaccacgcccggctaattttgtatttttagtagagacagggtttccccatgttggtcaggcttgtctcaaactcctgacctcaggtgttttgcccgccttggcctcccaaagtgtgggattacaggtgtgagccaccgtgccctgccaacatttttttttttttttttgagacagagtctcactctgtcaccaggctggagtgcaggggtgcaatctcggctcactgcaacctccaccttccgggttcaagcaattcttctgcctcagcctccagagtagctgggactacaggcgcatgcgatcacacccagctaatttttgtatttttggtagagacggggtttcaccatgttggccaagatggtctcgatcttctgacctcgtgatctgcccgcctcggcctcccaaagagctgggattacaggcgtgagctaccatgcctggccaatattttgtttttttaagagacagggtctctctcggtcatccaggctggagtgcagtggtgtgattatagcttacagtaactcctgggcgcaagcagtcctcttgcctcagcctcctaaggagctaagactataggcatgcgccaccatgcccagctaattttttttttttcctcaaagagacggggtctcactatgttgcccaggctgatctcagactcttggcctcgagcaatcctcctgcctcagccacccaaagtattaataaccattttaagtgttgagttcattgatattaagcacatgcatcatgactatctgtttccaaaactatcatcatttcaaactgaacctttgtgcacattaaatgataacttcctgttctcccctctccctacctgctggcaaccaccattatattttctgtctctataaactgattattctaggtatctcatatgagtggaattataaaatatttgtcctacatttggttgatttcacttagcatagtatcttcaagttcaacttctttttggaacaaaaagggaatgaatgagtgagtaaatggagaatcagcattaattgacctgtatggtcttagcctctctggctgtctcagctccaaagtcaggcttttcctgccagctcaaaatatcctttagcagaatgcattaacatgtcaggttaactgtcagtgtctttaaaaatggttagaagggcatggcatacacagtgaagtagaatcctgcacttaggctagtcctgttggaaagagaaggacttgaggtacaggagagcagtggcctctgctaatgtggaatttgctccagctaccctgcagaccacccaggagcaggggctaagacagcgtcctccagaactgccctggctcccaggactgtggtggaggggaatcaaactccttctaggtggggacttcctgcaccaagtgttacttggggccgtgaaaatttggttctccctctacagatttctgcatgaatccccagacagtgctgctcctgcgggtcatcgccgccttctgtttcctgggcatcctgtgtagtctctccgctttccttctggatgtctttgggccgaagcatcctgctctgaagatcactcgtcgctatgccttcgcccatatcctaacgggtaagccgtgagcctgctcacagtgggagaggaactgctacagggtgggggcatcctgtctgagttgccggtgggggctctggtttctctgagcaggcacccttccaggagctcatgtgccaagctccagtctttcccagagtgtcagggtgtcagcagcctgctccagtctagctgctaacttgccaggatcacaaacccactcagcccagctgtagaggggaaatgttgctagaaattccacaaggaagctcacagctctctaaaatggcatttgaagctcagacctgacatgagtgaagaaggaaccaggcagtctcccgtgtctcccctggagctcctggtcagattctctcctctccaccttcctgcttccctacagacccgccttttcttgtatgtagctgctgtcctccctcgtgcctgcactgctgtgctggtttgaattgtggtgtgcctactccagctcccaagctgcatgaccctatttgctccttaagacagatggaatctgactggcctagatcaggtcagactgctgtccccaacctcaggccaggaatcccatggtcaagagagctcctccttgcagagtctggggccaggcaggttctctgagaatggggtttgggtagagaggctgtgattgggtcctcaagcatcctagctgtggagtgctcactaattccccttctgtgctgtccctctgtctcctagttctgcagtgtgccaccgtcattggcttttcttattgggcttctgaactcatcttggcccagcagcagcagcataagaagtaccatggatcccaggtctatgtcaccttcgccgttagcttctacctggtggcaggagctggtggagcctcaatcctggccacggcagccaacctcctgcgccactaccccacagaggaagaggagcaggcgctggagctgctctcagagatggaagagaacgagccctacccggcggaatatgaggtcatcaaccagttccagccaccccctgcttacacaccctaatgccagccctgggctctcttcctcggcagcccctccctcaactctgcagctcctctcgcacccagaggagctcctttccccagcaggcctcactggtaggatcctgaccatcttctccaaaccttccccaggagagactctgcctttagggtcatccaagtatccctgctctcagaaccggaggtccactggttttctataatgtactctttccctcctgccacatcctgcccccttcacattcacgagtcattaccagccagggaaggtcatccaagtttcctccagcatgggcgatatctttgggaccgagactttccttggagagctgctgagagcggacagtcccaaaaacaagtgtcaaagggcccaagggaaaggggactgtgccctggaggctcacttcacagggatcagtgtttgctccacagctgtagctctgggctgacgccccccagaccccttccttctcggagtgacccgcccccaggccacctgctccggggagttctgtgcactttactctttggacttctcctcacgtgtgccctggttttatggggagagggaatcgctgttgggaaggcagagcagttgcaaccctctctgcccttgcttcatgtggctggagcccaggcaaggagagcaggagccagcgtgagactgaggccccctggtgcctatcaaggaccagagtgaaggggactacatctcccagcccttcaccttttaaatatgagtggttttaaaaggaaaaaaatgaaaccaggcaacagcaacaatattctgtttttaaaatagggacaagactgttgtcactttttagacatgtatcccattccttttggctctgcaatatttggggctgtagctccttccaagcccatggtagtccctccccgagtctctcccagtagaatgcagcctcccttccctggccccttccctctcagtgacggtgactccctggggccttctcgtggaacccagaggggctgaggactgtggcctggctggcgggccagcgtggtgctcctcaggactgcagcactgagatggaacctggcctcagtttaggaacaggggccacaacagggcaggaacccaccaccctccacataggaatacaaccagtggggccacatcatgtgaggcatcagacccacactgtcagcccagcaggccgggctgtgtccttcagacccagtgctgccctagactctgactcgggactccagcttgccacgtgccctctcccctcttgaatgtactctggtcttgcagtgtgctgctgggactttcttgctcagccatcactctggtcaccttgtttgctctgggtctggctgaattttctgccctgagatctgggcataaagtggatgaaacttgaaagaccttcagtgtagatccagatggccaacctgtccttgttaagttacttgcttcttgggaatcagtgtcccctgctgagctgaaaaggaaatggattccaatctcttccaacctttaaggtgatagatagtttgagcaagactggagaatggacaacactatgaagctgtggctagaaagggactgtcatgtcccatcctttggccagattgactggggatgtccggacagatgcctgcatgggtggtgagggccacatctgcacacgagccagtggctgcttgcagttcactgctgtgatgccagagtgtgttcaaaggtgactctcctgctcttctggactcttctctcaggcaagaaaggctgcaggctgcctgctatgtgatgcctgagcacaaagccaaggaactgaactaagtctttctgttaagtcctgagtttgtcattggcaggtttacttgtggccagctctctctgcccttgggtgtctgagcaggcagaccagaagaccaggcactggacctgcatgccaaagggactggtcatctcctgaggacctgtacatgaccctgtggactgttccgcacgatccggaacccactttttattcactccccatgtctttggccttcctcttctttctctttccctctgccatcctgacactgatagtttgtcatataaattccccgggttgtgtttttttttctagaaaaaaattaaaagggaaaacaaaaccaaaaaaaccagaaaccacgaataagaatggaaatgacaatggctgcctgtcatttttctgtcacgattttcctgatttggtttgttccctttgtctcagagaagcaggagatgttgatgaggctgtatttttttttctttttcttgtttttgagacaagagtctcgctctgtcacccgggctggagtgtaacgtggcatgatctcagctcactgcaacctctgcctcctgggttcaagcgattatcctgcctcagcctcctgagtagctgggattacaggcatgcgccactatgcccagataatttttttgtatttttagtagagacagggtttcaccatgttggccaggctggtctggaactcctaacctcaggttatccacccaccttggcctcccaaagtgctgggattataggcatgaaccaccgtgcctggccaaagatgtaatttaaaatagttagaagggacttggcatgggccagctccgtgcatggcattttcacccccagagcttcctaatcctgttttcacacaggaagtttctaggtctttctagaacagctagaaatagtagctgactcccgcccaaggcccaaccttcaaaccctgagctcttcaggctgcatcctctggtgagctatagaggagaacgtggctcctaaactctagccatcctgtgggaggaaatagacttctttgggctgtggcttgcagaacaaactacactttttttccctctattgtttaaattttatttaataatttgtgtgtttttctgtctttattttctgtatttcacgtgttccttcactccctagaaactgcactttctttgaaaccataggtaatgaatcttactaggagaggcatggggatagagacagttctgggagtgtgacctgtaagcctcctgtagggcagtgccaggccttgattgcccacgttctctccgttccttcttccttcatacatttgatcacacagcctacacccagccccgagtgtgcatcacggtaaaagagctgagggctctcttcagggagcagcccatttaggtctcttttgttgttgttagggagaatacacatctttcttggaagctgggagtgtgttctcatttcatgtccattcagacaaagcaccattaggcaccatgaaatatacagtgacggacaggaccctgtctgcaaggattttatgtccttagttcaggagatggacttgtccacagaaaggcagagtgaagtgggcggccggctcggaaaagtcctgtgcccagaagggagccagttctgacctgagtgataatgaaaggcttcctggaggacgcagcttgagccacacttgatgtgggagtgaactgggatagggacactcctgctgagagaatggcaagagcaaaagcacactggtggccaggaggtggtaagagccgaggttagaaaggtgaggggtgctcatttaaggcactaacagcagaaggagcccaggaaggattttcagaagggaagggagggatgcaaccttattttaatgactggtgacagtaggaagggttctgcctggccttaagtgagggtgttgaaagtgggagacaggacctgccaaaggggaagagggcggtcacagtcaatcccagggcccagtgtctcagccaggtgctggagttgggaatgcgggagccccagtctctgcccacctgtcacgtggcagctggaaggtggcatcaactgcacaggcgaagaggggcccgcacacgagaagccatgggatgtgaagggccgcaaggagaggaccctgggacacaggaagaggtggtgcatctggggcagggcggctttcccaagatgactagagaatcttcagctggcatcttgcctgaaatatccacgctctcagccactacactaatggaacacagatgctatggggagacagaagggaactgacaaacttcatgcccctgttttcaaatagcctgcaatcttacctcttcctctgcattttttggggggagtgacattttaatgggaggcaggaggtttgtggagaagagaaaatgttttttttgtgggggtgggtagagacagtctcaccatgttgcccaggctggtctcaaactactggcttcaggcaatccttctgcctcccttcccaaagggttgggattacaggcttgagccactgcaccaagcctgaaaatgtcgttttgaatgagcccacctgaaacgaagacgcttcattagggttactggtttgagaattaagatcagttctggccgggtgcggtggctcacgcctattatcccagcactttgggaggccgaggtgggtggatcacaaggtcaggagatcgagaccattctggccaacatggtgaaaccccgtctctactaaaaatacaaaaattaaccaggcatggtggcaggtgcctgtagtcccagctactcgggaggctgaggcaggagaatcacttgaacccgggaggcagaggttgcagtgagccgagatcatgccactggactccagcctgacagagtgagactccatctcaaacacacacacacacacacacacacaccacacacacacacacaggttcctcaccataagctttggggaaaattcttggcttttttgctgggggagagagcagtgcccagggaagattggctgatctcagagctggagggtttatgcgggactggccagccccttcagctgagtgggacagcaacacagtgggtggtaaggggcttcataagatgtacaagatgagggagaggcccctccagccaaccctgtgtctaaagagtcaggtaacgaagaactttccagagacagctgtgagtccgtctggcttaaggggttgtacaggtgtctgagaatggggcctgaaggtgcagggcctgcaggctgccctgtttggaaggttcctgtccttctgtcttggtagaaaatggcagctagccttgtaaagggcctccttgtgtagcgagatagaccatgtagccccagatgcccccatggcttcacttccctcttgggggtctctcagtatatgtctagtgccaccactattggtggagagtttccttctggaataaccttggggtggtggatgggttttattttaataaaagaagaatgtctcattcattttttcttatttattttttgagacggagtctcactttgttgctcaggctggagtgcagtggcaagatctcggctcactgcaacctccacctccccgattcaaacaattctccaacctcagcctcccaagtagttaggattacaggcatgcaccaccatgcctagctaatttttatatttttagtagagatggggttttgccatgttggccaggctggtctcaaactcctgacctcaggtgatccgcccgtcttggcctcccaaagtgctggggttacaggggtgagccactgcgccctgccccgttattgattctttccatctgtttgcttcctcatattctaacggggtatgggaaatttgcttgcatgtacacacatgcaatttctttcctttttttctctttttctttctctttctctttctttcctttctttccctcccttccttccttttcttttcttttttctttcttttctttgacaggatcttgctctgtctggaggctggagtgtagtgctgcaatcatggctcactgcagcctcaacctcccaggctcaagtgatcctcccaccttagccacctgagtggctgggactgcaggtgtgagccactacctctggctaatttattttttgcagagacagagccttgccatgttgcccaggctggtacacacccaatttctattatgtgtacaggcctgtgtctttcttcttgtttaccttatcagtccattaggccaggagtcgtgttgttgtttttatttttttttaaggtggagtctcactctgttgcgagtggacaagagtgcgctctggagtgctggagtgcagtggtgcgatcttggctcactgcaatctccacctctgggttcaagcaattcccctgcctcagcctcctgagtagctggaattacaggcgcacaccaccatgcctggctaatttttgtattttttagtagagaatggggtttcaccatgtttgccaagctggtcttgaactcctgacctcaggtgatccgcctgccttggcctcccaaaaagctgggattacaggcatgagccaccacacccggctgggtcacgctttttaatgtgacattcattcagcaaatacactgaacacaagtgccttgtggaggatgcagaaattctaacacatatgatccttgccctctaaggccttccaatccagccaccaggaaagaggaaacctgatgacaccgaaacgtgatagccaaggaacacttcctaaagaagagacttgatctgggccttggagaaggggcaggccttcatgagagcatggtgtaggcagtggtgtgaaagcaggaaaggaagggcgtggctttggggaacactgagttgatgtgagcagctccttcccactggaggtgcagggcaagcaattagctcatggacctagcccaggagggcctggaacatcaaggttgtcagaatgttcacagctgcaagacccagaactgaaaatttcttaactaaatggaatttattgttttccacaattgaaaagttcagcgtagtcggggggactgggctgggtccagggactcaaacaatgacacaaagacacagtttctctccacctctttgctttgtgtgtctgctcaggccatctctccccaaaggtggtgaagatggccaccagcagactggggctcaccctagactcctttttaaggtaacaggatgactctcttttgcccaacttagatcatgccccttaccctgaaccctggcaaagaacgtggagcttcctcctgtggtccaggtagaggatggttacatgtggggtctgggattcagaggtggcaccgctggcagtggttgggacatgtgagcacaagggtgaggcctacaccactctgaggccttggctgccccttctctctcccccagccctcgcctttccatgatggtaagacatgaggccactcaccagctctgccttcttgaagaaaatcagtgtcctatctttgaacagagctgggccttgaagtcaggctcacccactctcaaaccgtgggggaaacagagccttggttacaccagctctgtctcagggattgttttttctgcttctctcctacccttgcccgtttcttcctgctcctttccagcaccctcccagctcctcactttcctgacttttgttttcttttccaagcagcttgagcagtgcttgatgctcctgggtcacagcgtgcacacatcctggctgttctgggtaaccgcacacccaaccccagtcccatccccatatctctatcctgaaatcaacccaaagggtggggagggagcaggcaacagcagacaacagaaggcgggggtactgagagcatgtgctgctattcaggtaccctttgcagtaattccccagaagcactaacatttctgctgatcttggaatgatgctgtattactcagggttctccagagaagcagaacaataagatgtggagatatatgtatatatacagaaagacattataaggaattggctcatacaaatgtagaggctgacaagtcccaagttctgcagggtgagtcagcaagccgagacccaggagagccgaggttgtagttctagtctgaaggccagcaggctgaagatccaggaagagctgatgtttcagttcaagtccaaaaacaggaagaaagctgatgtcaccacttgaaagttggtcatgcaggaggggcgccctccaactcagccttttgttctatttgggccctcagctgatggatgaggatcccctgcgttagggaggcagcctgctttacttgctccaccaacataaatgccagtcctaccccacgccctcacagatggacccagagtaatgttcaagctgatatctgggcaccccatggtccagtccaactgacacataaaattaatcatcacagatgccttcttcagcacatgctcgatatctaacaaatatctctacggtgagattttccccccaaccttgggcccacttaagaaagatgttgaactgggcgcgagggctcacgcctgtaattccagcactttgggaagctgaggtgggtggatcacttgaggtcaggagtttgagaccagcctggccaacaaggtgaaaccccgtctccattaaaaatacaaaaattagccgggcgtggtggtgggcgcctgtaatcccagctacttgagaggctgaggcaggagaattacttgaacctgggaggcagaggttgcagtgagccaagatcatgccactgcactccagtctaggtgacggagcaagcctccgtctccaaaaaaaaaaaaaaaaaaaaaaaaaaaagaaagatattgagaaattggagagggtccaggcaagcattctgagtggatgaaaggttaaaagttctagagaaaaggatgtaatagcaatcttaaatgtgtgaggagataattatttatttgctcaaatgtgtgacttaaaaaggcacgccttctctataggactgtttccttatatgtaaatgaggggctgaactgggtgactttacagtcctgccagccataaagatccatgacttcctgagagggggctgccacgctctgtatccactgtgggagatgaagaaggactgaggaactgagcagtttagctgtagcctgtagtaccagctacacaggaggctgaggcaggaggaccactggaacccaagagtcttgaggctgcagtgcactatgatcatacctatgaatagccactgcactccagcctgggcagcaccaccagaccgcatctttctttcctttcttttttttcttcttttgatggagtttcgctcgtcacccaggctggagtgcaatggggtgatctttgctcactgcaacctccatctcccaggttcaagtgattctcctgcctcagcctcccaagtagctgggattacaggcatgtgccaccatgcccacctaatttttgtattattagtagagacaggatttctccatgttggccaggctggtctcaaactcccaacctcaggtgatctgcccacttcggcctcccaaagtgctgggattacaggtgtgagccactgctcctggcctctatttatttacttacgtgagtttttttttttccaataggtttttggggaacaggtggtgtttggttataggaataggtcgtttagtggtgatttctgagattttggtgcacctaccacctatgcagtgcacactgtacccaatgtgtagtcttttatccttcacccccttcccaccctttaccctgagtccctaaagtccattgtactcatctctattaaaaaaaaaagaaaaaaaggccaggtgcagtgggcagatcacttgaggtcaggagttcacgatcagcctggccaaaatgctgaaaccccatctctacttaaaaaaaaaaaattagccaggcatggtggtgtctcggctgtagtctcagctactcagcaggctgaggcaggaggatcactggaacccaggaggcagaagtggcagtgagccaaaattgagccactgccctccaggctgggtgacagagcgagactccatctcaaaacaaaaacaaaaacaaaacaaaacgaacaacaacagcagcaaaaaaaggccaggttcagtggctcacacctgtaatcccagcactttcggaggccgaggtgggcagatcacttgaggtcaggagttcgagaccagcctagccgacatggtgaaactccggctctactaaaaatacaaaaattagctgggtgtggtggcttgctcctgtagtaccagctactcgggaagttgaggcaggagaatcacttgaacctgggaggcagaggttgcagtgagccaagattgcaccactgcactccagcctgggggaccagccagaccttgtctaaaaaaaaaaaaaaggaaagaaataaattcttttcccatctttctttctttattcttattttttgagacagcgtcttcatctgttgcccaaggtagagtgcagtggcacaatcgcagctcattgcagcctctatctccttaggtttaagcaatcctcacacttcagcctccaggttgctgggactacaggtgtgcaacaccacacctgactgattttttttttttcttttctgtattttgtagagatgtggttttgccatgttgcccaggctgctctcaaactcctgggctcaagcaatctacacacctcaacttcccaaagtgctgggattaccaccacacttggcccttttctcatttctaaagtgggttgtcttttattgttgagttttaagagcttttgtttgtttttgccatcctgtgccactctgttgcacaggatggagtgccgtggagccatctgggctcactgaaacctccaactcctgggttcaagtggttcttctgcctcagtcttgagtgagccactacgcccgcctaatttttgtatttttagagagatagagtttcaccgtgttggccaggctggtctcaaactcctgacctcaggtgatccgcctgcctcggcctcccaaagagctgggattataggcatgagccaccatgcccggctgagttttaagagtttttatatattctagataccagccccttatcaagtggcacagagcaactatggcagagggcctacagagattaagtttgtgccccatagatatacactaaaacattttggagaaatggaaaaatatggattgatactttccattgcaacagaattcttttaaaagacaaaagaaccttagatatcctcaccaaatttcaggatgaagaacacagatattggaaattcttgctctaatcttacctaagggtgtattagtcagtgctgttttagttgcaaaaactaaaaactcaactcaaattagtcatggaagaaaggaatttattggctgagcagcggagaagttaaatcctgaggtgaatttggggctcccaagatgtctgggcctcctcactccccctcttccagctccacccctgatcactggcatcatttcctggccaggcccttctctagccttcagtgtggcaagagagcagtttcatttccggctatctcagagcactgcattcaacagaaaacaaagcaagccctttccttggagtttacaaatgactcaggattcactctgatttgaccaagagtcagaaccctaattggccaagcctgaagtcacttgtctacccctgatactgggaatagaatgcatggatgagagggaggtgggtggttccatgaaaaggaaattcaagcacttttcctaaaagaagggggaatggatgctgaaacaacacgtctcccacaaagggagcagacactgggcttgtgaagctgccccataccttccccacagaactgggtttccctccttggtgcccctgacggagccttgtcttcaccctccattatgtattcatcatgtggcatcgtcactgtttcctcctctgtctccagagtgtcttctcttagttctcagctagtaagagaaggaggctgggcatggtggctcatgcctgtaatcccagcactttggaaggccaaagtggaaggattgcttgaagccaggagtttgagaccagcctgggcaacaaagtaagactcccgtctctacaaaaaagaaaaaaaaagttagctgggcatggtcatgtgcacctgtggtcccagctacttgggaggcagaggcaggaagactgcttgagcccaggagtttaaggctgcagcgagctatgattgcaccactgcactccagcctgggtgacagagtgagacctcatctataaaatttttttttaaatgcaggggtgaaggaaataaggaggtaattactgaaagaatgaaaggtcatgctagaaatataccataaaatgcaatggggactcaaagaagggcaagattaaaggggacaggaaatctattctggggtgtctttgagggccctgagaaataaaacaaaggagtggcaacaggaaccaaaatatcctcttaattactgctagagggctgggctggaggacacagctttagacctgtgaactaagtgagctgctaatgcaaatcccactaggaggcaggctcacccgcccagccatggtagccctcaaccagagaaagcctcctttagtcctgcaggagtgcagccccctcagcgagagcagtgggattttataccctgcatgcagctcacccccaaggtgatggaggggcccactggcctacacaggaccagtttcccctccccacctacctatccaagcagtcatcttttattttccctggggcaaagtaatagaggggtggagagaaggcaggaatgttaccctagtggaactccctgaacaggggaggaaactggtaaggtttccaaaagctcatggagacagtggcatttaagatgggcctctcttaaggtcctgagcaggaggaaatgcagagactctgggccaacactcctagatgtggcttctggtcacccccactgtcaaggtggctccactcttgccccatggctctctgtaataactgccctcttgccttgcctgctggcctgggttgctatggtgcagtaactctacagcttggtacttgggtctcgacttgttcatacatgttggtgcatctctgtgccctaagattctcttccagctatagctggctctgtttctctgcacctgccacactgcaatgagcagatctatttccaggtctggcagcccctgctgctgggctccttcccatagtggtaaactgggccaggctgaagagatgatattaacctaaactgagccagatactcaccaactgcagggaaggaaggaagcaggagtgtgtgcttcactttgcttcctaggctccagacccccaactgcccgctgggaaaacaagggcagctcttgcccacatgaagcagggagcctcgctcctgaggcagggcgctggtggaggctgcctgaatgtgtgttctcactggcgacttggatctggtcctgagaagagttgacccgagatgtctttggccttgcaattccacatacagccccctccttgatgacaaaaacagatgcttccatgaggagtttttgaattcggaagaaattacctgctacgaggaacagtctcacatactgaggagtaagaggacgaatattgtaaacacttttcattctgaataatagactaatagagctttggattgtccatgtattctgaagggaagaaaaggcacttatttgctgccttttggcatgatagtcaaagcccaggggttgcatcagactca

SEQ ID NO: 11955 - DNA, 20835 bp, Homo sapiens
agaggaggaggaagccggaagtgcatcggccccgggtctgtccgggcgttgcgggattggggcctgggaacgctcggcccccggcagccgagaagcccgtgactgggctgagcagcaccatcccagccctggggcctgctgactggtgaggaacagtgggcggcgtggggagggtcttttctgcgcacaggtcgcaccccaaaccgccggtcccagatcacgggtccccgatccccgcggcccagcccggtcctccgcccctcggcatcctctggctgagaccctgactccgggtctttgctctagcagtagccgatccccgatccctccgccccccactcgagtctgcccagaccccatctggcccctggccctcttcggttgtcgtcccgcagtcccattccggagtctcctgtctccgccccccgaattcccgcagccctccccgtctccgtcagccccgggtcccacccccctatcctctggtgtcaaccctgacagcccagtcccggcttcacctgcagcgaacccggagcgttgctatcctccaccggactgtcaggctctgcgcgccccgcggaggtcggcggcgaccagcagcgactgcggagcgacggcgggcggccccgggcatgtacgcccccggaggcgcagggctgcccggcgggcgccggcggaggagcccgggaggcagcgctctgcccaagcagccggagcgtagcctggcctcggccctgcctggcgccctgtctatcacggcgctgtgcactgccctcgccgagcccgcctggttgcacatccacggaggcacctgttcgcgccaggagctgggggtctccgacgtgttgggctatgtgcacccggacctgctgaaaggtgagggtgctgcgcgctggcccttaaagcctcggtgggggacagaatgtgttctggctgaagcagagatagccagggaccagacacttggttgaaggaaacggccccataactgcctggtgttcatgcccaccaggtggctctgtttggggtccggcccctcattaattctgatgttattcagctaagcacctactcctcacagccatgttaatccggactgctgctattttaggattctgctggaggaaggacgctgtgtatcgagaaaagataagggtgctaggtatcacagttagctggcctcttctaaggatcctgtgaaatacggaaaagcttctttggggcagactgattaatggagaaaaaggaacttttaatatgactaggttttaaaagatatcttagagttctatggtaatcggatgcgtattagagaagaagggaatctgtggcattttaggtaatcggaagaccgttccattgccacccgcagtacaacagtcggaatgtggctcttggaccattataggtgtgcctgacagaggcaaggttgctttgttcatcatcatgcttccggccagatagacagcagacgatgggagggtcctatgggccccatagtttatcctgcccattcttgtctccagtaaaaattgtgaagtgtgaggacaggactggactgtatcacctgctttttaccctaacaatgatcaatgtaccccaaacagtccttagtaacagcatagttcatcaaccccaaggtcttttgagccatcttgaaggtcttatatcctctctgtgctatcctgtctgtgctattccctggctgtgatgcattccagatgtttactgcaccgcctatcagaagcacttcctgttagatatctgcgtgttacctcctgaagaattcaggcactgggatttggtgaaaaggtccaagttccccgctgtgcatcggaccatactctgcttctgcaggtctaggctgaaaagcctcatccttgtggccaaatgttgcctttctctgagtgttctcttactgttttgcatctctcttgagttttagaagctgtagggtgattttgtagaaggttggggacaactggttgtttccagatttcaccttaatggtactctttgctgggttggctcattaaagccaaagttatgcacacgacagaggccttatatgcagccttttctctgtcatgttgctaatggcacaaagagcattaagcttgagtgagtcttggtggtttttcttttagcacattgccctgtacttgctttctttgaagcacacataccaccttcccaccactagacccatcagatctagaaagctagatctccgaaatctagcactgcatggggtgtgcttagctgtggctcagaaaaatgaaggatctccccaaggctacccagtttagggtggcagagctgggactaccccacctctgttgatgccaatataaaatgatgccgtgtcatttatagtttttatcctttgttttacttcagctgtcataaggagcaatctcataattatttcactttggtgtgcatccttgtcgaaggcatgttaaaaataaaagtaaatttttgagccgggcgtggtggcaggcatctgtaattccagctacttgggaggctgaagcaggagaatcgcttgaacttgggaggccgaggttgcagtgagctgagatcgcgccattgcgctccagcctgggcaacaagagcgaaactccatctcaaaaaaaaaaaaaaaaaaagaaaggccaggaactggctcacacttctgatcccagcactttgggaggccgaggcgggtggattgcctgaggtcaagagttggagaccagcttggctaacatggtgaaagaaaccctgtctctactaaaaatacaaaaattagctgggtgtggtggcacacgcctgtagtcccagatactctgaaggctgaggcaggcgaatcgcttgaacccaggaagtagaggagttgcagtgagcccaagatcacaccactgcactccagcctgggcaacagagcagagcaagactccatctcaaaaaaaaaaaaaaaagtaaattcttggtgcaggttcttctttgttcacatgtgtatttaccctttctaagaaattattcgggccaggccaggcatggaggctcacacctgtaatcccagtactttgggaggccaaggcggatggatcacctgaggtcaggagttcaagatcagcctggccaacatggtgaaaccccatctcaactaaaaatacaaaaattagccaggcctagtggctggtgcctcaactacccaggaggctgaggcaggagaatcgcttgaacctgggaggtgaggttgcagtgagcccagatcacactactgcactccagcctgggctacagagtgagactccatctcaaaaattaaaaagaaagaaattattcaggctccgttttgtcttttgcaaagcatgttttcttaacctttacattacatttgctcacatatttagagaccttaacctgtgtatagtttctacttgcttgcctgtggccatctcctaagagcagtttgtgcccattaataggagagttggcagtggtgcctcatgagctatcacagaagaatcagtaaggaatccggaagtccttgattgcatcttctctcccttttctttgtacctactggttttttggtacccagtgggccttcagacatgtagtatcctgtgtgactgtgctgatcctcagggcctaacagatatcctgacctgagagcctggagtattccacatctcaagagggagcagagctgtcaagcacagatgtggtgcatatagagtttttttttttttttttttaaatgagacagactcttgctctgtcacccaggctggagtgcagcggcgccatctcagctcactgcaacctccgcctcccgggttcaagcaattctcctgtctcagcctcacgagtagttggaattacaggtgctccaccatgcccagctaatttttgtacttttcgtagagatgaggtttcaccttgttgaccaggctgatctcaaactcctgacctcaggtgatccacccaccttggcttcctaaagtgctgagattacaggcatgagccaccgctcctggccacatgtagatacttccagagggagaacagaccctgccaggtctctgccggtgatgggagttgggcagccagcaggccctggagcagccttaccatttctcagcccctgcctgagtgccacattttgacattatgctaagcacaccccatgcctgcttttttcctcctaaacagcatctttatttggtaggtactgtttcagccccacttcaaaaggtcccagctcagggaagctaggtagtttgctcagctaatctgagtggacattgactccaaagtccatactcttactgcaacaccttagtgagctccgagtttatttcccatcaaagctgcctgaggcttatcactttcctattctagttgagttttatcataagcccagccaaagctgtgctttttgtcataacttcatcgcctcagtgttgaggctttagttggtgatcccagggcaaagccactctcccattgtcattcacaaagcttcagaggctttagccaatgaaagctggctccaaagaacccatcctgggctgggtgtggtggttcactcctgtaatctcagcactttgggaggctgaagcaggaggccagcaggatcacttgagtccaggagttcaaggctgcagtgaactatcgtcgtgcctctgcactccagcctgggtgacagagtgagacccttcctttaaaaaaaaaaaaaaaagacctcatcctgggttttctccactgcccctgcaagcggtgcctgcttctcacacagctctcaacctggccctgggtggagatagactcacacctctagaccccagaaagaggggccgcagatagtcatttcttctgagcctttctgcctctcaagtgtggccaccaaagggcactggcaacagccccaggaagcatctttggagaatgaggaagttggggagtagaagtcaggtgaatcacaattgacagcagccactggaagatcaagggccttccagggagagcctgtgtgcctgataggtggtgactggggcagctgacactgccaggccctgcggggcctgttggtgtctgtgggataacctggctgggcactagagggctctgttaagaggcctgtgtcgcaggcctgtctggaagctaaaaaggtcacagtgaggagacgctgagcaggttgcacagatgcataaagagggattggggcattggggaagtgtctctaattcagagggactccagcaagaagggaggcggggtgggacagaagtccttttaagcctttctgcctgcagactgtttgggtcaggagtggttagagcaatgggcagatagacaggaagaggcaggaccttcaaaacaaatctagcctggtgactcaccagtgaccttgagcaaagtcagttccatgggatcctattacagctgcctacttccctgatgactagagggcaccgccaagcagtgtttaccaaaatcaacaggccagagcacagctggaaggtaggaggtgttctgtgtctagccagggcatcgtggactgcaccactggcttgaatttcaagttagggtcctgcgttgcatgccatttctctctcgaataaaatcctacatacataaccttcaggggttttctttagcaatcccctcatgggagcaggtgcttgttgccttccctgctgtaccgacgtctaggaagggaggagagaaagacattgagatactgactccagaagagtctctgagctgggctccaagcctgtctaggataactgcctgttcttccggtgtgctctgagaccctctgaggaaaacccacttgttacatgggccaggcccctggggtatctgttaacgttacccaaagggaatttcatatttggttttctcactaaccctgagggtttactcacagctttggagtggggaaaggcagttatattgaaacaaaacctattggagttttaggtcaaaagtctcttctctctatcatattgtcatacttgtagggtaggcccttagtctggctttagtaggccttggtccacacgggctgacgtgtggtcaaggaagtcttggtagaagaaggaaaggcatgctgaggtgacacactggcccagctgaaacagcctctggttaataacagcacaggtggctgctctttcatgggcacggtgtcagctgacccagcatgccctggtggtgggtggggcagatgttattgttttcatttgatagatgagagaacagaggtccagcgcactcaagggacttgctcaaagtaacacagtctctgctagagctaggattcggcgccaggtcccaagcctttccggtgtcctgaccacttcctagagcaggctctgatggttgcaatgctgcaggagcttagacaccatgcctggcaggttttgcccaataattccccatgtgaggacttaatgacccaaaccttttttgcttcttagagagatttcattgcttcaagctgttcctctagtgagcttagcagctggctctgaggatggctccaacagtattcctgttagcttctgacccctcattcacgcacaactctttaggaattgattgattatctccagggaaaaatacagtggccgagtctggtacttagtgattccgagcagcacagtgtaggggagcctgatcatggtttggaatctagctctgcagcgtgtggcctggaggaagccacttcaccttctggagcccccgactcctcatctgagctgtgtggtaaatccccaggggggcacttcacccatctgtgtgcacaggctgttccaggaggggtatacaaggcccctccaacaatatttgcctttggagaggagcaggtggacatccgcaaggggagggatgtcctcttggaagctttttatcatgtgcatgtctccttactagtaaaattcatgtataatgaaacataagacaataggagtatatgtcatggatgtacatttttaaggataatcaaatgaacatccttgtgctcaccatccagccaaagaaacaatacaggctccttgaagcctgcacatattacttttcttactccaactgcctggcctcatcagtaatgtgagtggaatctgacacggcctactgcagagcggcatgtgacctctggtaggttattcttggaagcactataagaacactgccccatccctgccacatgccacgtggaccccaagaagaactctcttagcttttaataagatttaaaatacagccaggagatagcccctgtctcctagagcttttctttcagtgaggccccatgcactatggctctgcagggctgggttcaatgaaggctggtcccagttgctggcagggttcacacacaggcaggctttctggcagtagacagttacccaggctggatgcttgggcccaaaacagatggtcagcagacaagagatcatgacagatagttctgagggctgcttcgtgggtgacccaaagccagacagaggtgtatgagccttgtctgggcccagccagcctctgctgggcgaactctgagcctgaggcagggtatgcgtgctcaatcctagaggctcagggcttctctctacccagaacctgtgatgctggcatctgttgggctgagtcagctttgctgggtttaggtcccctccccaggttcctggactttcccccatcagtccaccttcctctgaggtctggaaccagtgtttcttgaagtgtggggcttggatcacctgcatggggattacctgggctgcttgttaaaatccagattcctaggccctgctccagacctagaactcggactctctggggacctgggaacacgctttcagccagtgccacagtgatttgggtatgccctagagattgatgatcacaccccacaccctctcagcctgagatcaagttcaggaaaggacgctatatagcctgagtcttgccagccctttccaaattttcctaaatcacttggtgacccatggcctaaataaaagaagaacttgccagtggctgtaacagaagaaggagaggaagttaaggcccatttcctacttttttttttgaggcggagtcactctgtcaccaaggctggagtgcagtgatgtgatcttggctcactgtaacctccacctcccaggttcaagcagttctcctgtctcagcctcctgagtagctgggactacaggtgcacgccaccatacctggctgattttttaaatttttagtagagacagggtttcaccatattggtcaggctggtctcaaactgctgacctcaggcgatccacccacctcggcctcccaaagtgctgggattacaggcgtgagccaccatgcccgaccccatttctactttttatgaaagcttaaaatacttaatcatggcctggtttctttttggttcagcctttattctaccctatgcttctgggagcttttgcagtttgcatagttatcaaaggagacagacagtatcatctagttttttgtttttttgttttgttttttgtttttgagatggagtctcgctctgtcgccaggctggagtgcagtgacacgatgtcggctcactgcaacctccgtctccagggttcaagcgattctcctgcctcagccccccgagtagctgggactacaggcgcgcgccaccacggccggctaatttttgtatttttagtagagacggggtttcaccatgttggccacgctgatgtcgaactcctgacctcaggtgatccacccgcctcggcctcccaaagtgccaggattataggcgtgagccactgtgcctggtagtgtcgtctagttgaaatgtttttttaaagaatggctaaagtactggagggaaatacaagttgctgtgtgtctgctgcgtggttgttgtcatgggctctccctgcaccatgacccccaggaaccccttgagtgctgtgtcttttctttcagcctcttccttttccttcatttatgcccttgacgtgtgcacgttggcactgtccaaggcttctggggcttttgtggtataaatgtggtggcttcctagcttttcctgttgatggcttgtccccagctctgccgagtctgctgagtcccttttaggtaggtctatttccctttactttccagtttttggaaccttgttttatacctccctttctttttgtgtgggttgccttttaaaagaattcttttgttctcgtagagttcagggagggagctaaactaaatgtgatatagtctaccaactttcctaatctatgtaatactttcttgtagctgcacatttctctaaactgccgcaacttccttcttcctcttttctttattttacttttttttaaaattgtggtaaaatatacataacataaaacttagcattttaactttttttttttttttttttgagacagagtttctctcttgttgcccatgctggagtgtgaaggcgcaatctcggctcaccgcaacctccatctcccaggttcaagcaattctcctgcctcagcctcccaagtagctgggatcacaggcatgcaccaccacgcccggctaattttgtatttttagtagagacagggtttccccatgttggtcaggcttgtctcaaactcctgacctcaggtgttttgcccgccttggcctcccaaagtgtgggattacaggtgtgagccaccgtgccctgccaacatttttttttttttttttgagacagagtctcactctgtcaccaggctggagtgcaggggtgcaatctcggctcactgcaacctccaccttccgggttcaagcaattcttctgcctcagcctccagagtagctgggactacaggcgcatgcgatcacacccagctaatttttgtatttttggtagagacggggtttcaccatgttggccaagatggtctcgatcttctgacctcgtgatctgcccgcctcggcctcccaaagagctgggattacaggcgtgagctaccatgcctggccaatattttgtttttttaagagacagggtctctctcggtcatccaggctggagtgcagtggtgtgattatagcttacagtaactcctgggcgcaagcagtcctcttgcctcagcctcctaaggagctaagactataggcatgcgccaccatgcccagctaattttttttttttcctcaaagagacggggtctcactatgttgcccaggctgatctcagactcttggcctcgagcaatcctcctgcctcagccacccaaagtattaataaccattttaagtgttgagttcattgatattaagcacatgcatcatgactatctgtttccaaaactatcatcatttcaaactgaacctttgtgcacattaaatgataacttcctgttctcccctctccctacctgctggcaaccaccattatattttctgtctctataaactgattattctaggtatctcatatgagtggaattataaaatatttgtcctacatttggttgatttcacttagcatagtatcttcaagttcaacttctttttggaacaaaaagggaatgaatgagtgagtaaatggagaatcagcattaattgacctgtatggtcttagcctctctggctgtctcagctccaaagtcaggcttttcctgccagctcaaaatatcctttagcagaatgcattaacatgtcaggttaactgtcagtgtctttaaaaatggttagaagggcatggcatacacagtgaagtagaatcctgcacttaggctagtcctgttggaaagagaaggacttgaggtacaggagagcagtggcctctgctaatgtggaatttgctccagctaccctgcagaccacccaggagcaggggctaagacagcgtcctccagaactgccctggctcccaggactgtggtggaggggaatcaaactccttctaggtggggacttcctgcaccaagtgttacttggggccgtgaaaatttggttctccctctacagatttctgcatgaatccccagacagtgctgctcctgcgggtcatcgccgccttctgtttcctgggcatcctgtgtagtctctccgctttccttctggatgtctttgggccgaagcatcctgctctgaagatcactcgtcgctatgccttcgcccatatcctaacgggtaagccgtgagcctgctcacagtgggagaggaactgctacagggtgggggcatcctgtctgagttgccggtgggggctctggtttctctgagcaggcacccttccaggagctcatgtgccaagctccagtctttcccagagtgtcagggtgtcagcagcctgctccagtctagctgctaacttgccaggatcacaaacccactcagcccagctgtagaggggaaatgttgctagaaattccacaaggaagctcacagctctctaaaatggcatttgaagctcagacctgacatgagtgaagaaggaaccaggcagtctcccgtgtctcccctggagctcctggtcagattctctcctctgcaccttcctgcttccctacagaaccggcttttcttgtatgtagctgctgtcctccctcgtgcctgcactgctgtgctggtttgaattgtggtgtgcctactccagctcccaagctgcatgaccctatttgctccttaagacagatggaatctgactggcctagatcaggtcagactgctgtccccaacctcaggccaggaatcccatggtcaagagagctcctccttgcagagtctggggccaggcaggttctctgagaatggggtttgggtagagaggctgtgattgggtcctcaagcatcctagctgtggagtgctcactaattccccttctgtgctgtccctctgtctcctagttctgcagtgtgccaccgtcattggcttttcttattgggcttctgaactcatcttggcccagcagcagcagcataagaagtaccatggatcccaggtctatgtcaccttcgccgttagcttctacctggtggcaggagctggtggagcctcaatcctggccacggcagccaacctcctgcgccactaccccacagaggaagaggagcaggcgctggagctgctctcagagatggaagagaacgagccctacccggcggaatatgaggtcatcaaccagttccagccaccccctgcttacacaccctaatgccagccctgggctctcttcctcggcagcccctccctcaactctgcagctcctctcgcacccagaggagctcctttccccagcaggcctcactggtaggatcctgaccatcttctccaaaccttccccaggagagactctgcctttagggtcatccaagtatccctgctctcagaaccggaggtccactggttttctataatgtactctttccctcctgccacatcctgcccccttcacattcacgagtcattaccagccagggaaggtcatccaagtttcctccagcatgggcgatatctttgggaccgagactttccttggagagctgctgagagcggacagtcccaaaaacaagtgtcaaagggcccaagggaaaggggactgtgccctggaggctcacttcacagggatcagtgtttgctccacagctgtagctctgggctgacgccccccagaccccttccttctcggagtgacccgcccccaggccacctgctccggggagttctgtgcactttactctttggacttctcctcacgtgtgccctggttttatggggagagggaatcgctgttgggaaggcagagcagttgcaaccctctctgcccttgcttcatgtggctggagcccaggcaaggagagcaggagccagcgtgagactgaggccccctggtgcctatcaaggaccagagtgaaggggactacatctcccagcccttcaccttttaaatatgagtggttttaaaaggaaaaaaatgaaaccaggcaacagcaacaatattctgtttttaaaatagggacaagactgttgtcactttttagacatgtatcccattccttttggctctgcaatatttggggctgtagctccttccaagcccatggtagtccctccccgagtctctcccagtagaatgcagcctcccttccctggccccttccctctcagtgacggtgactccctggggccttctcgtggaacccagaggggctgaggactgtggcctggctggcgggccagcgtggtgctcctcaggactgcagcactgagatggaacctggcctcagtttaggaacaggggccacaacagggcaggaacccaccaccctccacataggaatacaaccagtggggccacatcatgtgaggcatcagacccacactgtcagcccagcaggccgggctgtgtccttcagacccagtgctgccctagactctgactcgggactccagcttgccacgtgccctctcccctcttgaatgtactctggtcttgcagtgtgctgctgggactttcttgctcagccatcactctggtcaccttgtttgctctgggtctggctgaattttctgccctgagatctgggcataaagtggatgaaacttgaaagaccttcagtgtagatccagatggccaacctgtccttgttaagttacttgcttcttgggaatcagtgtcccctgctgagctgaaaaggaaatggattccaatctcttccaacctttaaggtgatagatagtttgagcaagactggagaatggacaacactatgaagctgtggctagaaagggactgtcatgtcccatcctttggccagattgactggggatgtccggacagatgcctgcatgggtggtgagggccacatctgcacacgagccagtggctgcttgcagttcactgctgtgatgccagagtgtgttcaaaggtgactctcctgctcttctggactcttctctcagcaaagaaagctgcaggctgcctgctatgtgatgcctgagcacaaagccaaggaactgaactaagtctttctgttaagtcctgagtttgtcattggcaggtttacttgtggccagctctctctgcccttgggtgtctgagcaggcagaccagaagaccaggcactggacctgcatgccaaagggactggtcatctcctgaggacctgtaaatgaccctgtggactgttccgcacgatccggaacccactttttattcactccccatgtctttggccttcctcttctttctctttccctctgccatcctgacactgatagtttgtcatataaattccccgggttgtgtttttttttctagaaaaaaattaaaagggaaaacaaaaccaaaaaaaccagaaaccacgaataagaatggaaatgacaatggctgcctgtcatttttctgtcacgattttcctgatttggtttgttccctttgtctcagagaagcaggagatgttgatgaggctgtatttttttttctttttcttgtttttgagacaagagtctcgctctgtcacccgggctggagtgtaacgtggcatgatctcagctcactgcaacctctgcctcctgggttcaagcgattatcctgcctcagcctcctgagtagctgggattacaggcatgcgccactatgcccagataatttttttgtatttttagtagagacagggtttcaccatgttggccaggctggtctggaactcctaacctcaggttatccacccaccttggcctcccaaagtgctgggattataggcatgaaccaccgtgcctggccaaagatgtaatttaaaatagttagaagggacttggcatgggccagctccgtgcatggcattttcacccccagagcttcctaatcctgttttcacacaggaagtttctaggtctttctagaacagctagaaatagtagctgactcccgcccaaggcccaaccttcaaaccctgagctcttcaggctgcatcctctggtgagctatagaggagaacgtggctcctaaactctagccatcctgtgggaggaaatagacttctttgggctgtggcttgcagaacaaactacactttttttccctctattgtttaaattttatttaataatttgtgtgtttttctgtctttattttctgtatttcacgtgttccttcactccctagaaactgcactttctttgaaaccataggtaatgaatcttactaggagaggcatggggatagagacagttctgggagtgtgacctgtaagcctcctgtagggcagtgccaggccttgattgcccacgttctctccgttccttcttccttcatacatttgatcacacagcctacacccagccccgagtgtgcatcacggtaaaagagctgagggctctcttcagggagcagcccatttaggtctcttttgttgttgttagggagaatacacatctttcttggaagctgggagtgtgttctcatttcatgtccattcagacaaagcaccattaggcaccatgaaatatacagtgacggacaggaccctgtctgcaaggattttatgtccttagttcaggagatggacttgtccacagaaaggcagagtgaagtgggcggccggctcggaaaagtcctgtgcccagaagggagccagttctgacctgagtgataatgaaaggcttcctggaggacgcagcttgagccacacttgatgtgggagtgaactgggatagggacactcctgctgagagaatggcaagagcaaaagcacactggtggccaggaggtggtaagagccgaggttagaaaggtgaggggtgctcatttaaggcactaacagcagaaggagcccaggaaggattttcagaagggaagggagggatgcaaccttattttaatgactggtgacagtaggaagggttctgcctggccttaagtgagggtgttgaaagtgggagacaggacctgccaaaggggaagagggcggtcacagtcaatcccagggcccagtgtctcagccaggtgctggagttgggaatgcgggagccccagtctctgcccacctgtcacgtggcagctggaaggtggcatcaactgcacaggcgaagaggggcccgcacacgagaagccatgggatgtgaagggccgcaaggagaggaccctgggacacaggaagaggtggtgcatctggggcagggcggctttcccaagatgactagagaatcttcagctggcatcttgcctgaaatatccacgctctcagccactacactaatggaacacagatgctatggggagacagaagggaactgacaaacttcatgcccctgttttcaaatagcctgcaatcttacctcttcctctgcattttttggggggagtgacattttaatgggaggcaggaggtttgtggagaagagaaaatgttttttttgtgggggtgggtagagacagtctcaccatgttgcccaggctggtctcaaactactggcttcaggcaatccttctgcctcccttcccaaagggttgggattacaggcttgagccactgcaccaagcctgaaaatgtcgttttgaatgagcccacctgaaacgaagacgcttcattagggttactggtttgagaattaagatcagttctggccgggtgcggtggctcacgcctattatcccagcactttgggaggccgaggtgggtggatcacaaggtcaggagatcgagaccattctggccaacatggtgaaaccccgtctctactaaaaatacaaaaattaaccaggcatggtggcaggtgcctgtagtcccagctactcgggaggctgaggcaggagaatcacttgaacccgggaggcagaggttgcagtgagccgagatcatgccactggactccagcctgacagagtgagactccatctcaaacacacacacacacacacacacacaccacacacacacacacaggttcctcaccataagctttggggaaaattcttggcttttttgctgggggagagagcagtgcccagggaagattggctgatctcagagctggagggtttatgcgggactggccagccccttcagctgagtgggacagcaacacagtgggtggtaaggggcttcataagatgtacaagatgagggagaggcccctccagccaaccctgtgtctaaagagtcaggtaacgaagaactttccagagacagctgtgagtccgtctggcttaaggggttgtacaggtgtctgagaatggggcctgaaggtgcagggcctgcaggctgccctgtttggaaggttcctgtccttctgtcttggtagaaaatggcagctagccttgtaaagggcctccttgtgtagcgagatagaccatgtagccccagatgcccccatggcttcacttccctcttgggggtctctcagtatatgtctagtgccaccactattggtggagagtttccttctggaataaccttggggtggtggatgggttttattttaataaaagaagaatgtctcattcattttttcttatttattttttgagacggagtctcactttgttgctcaggctggagtgcagtggcaagatctcggctcactgcaacctccacctccccgattcaaacaattctccaacctcagcctcccaagtagttaggattacaggcatgcaccaccatgcctagctaatttttatatttttagtagagatggggttttgccatgttggccaggctggtctcaaactcctgacctcaggtgatccgcccgtcttggcctcccaaagtgctggggttacaggggtgagccactgcgccctgcccccgttattgattctttccatctgtttgcttcctcatattctaacggggtatgggaaatttgcttgcatgtacacacatgcaatttctttcctttttttctctttttctttctctttctctttctttcctttctttccctcccttccttccttttcttttcttttttctttcttttctttgacaggatcttgctctgtctggaggctggagtgtagtgctgcaatcatggctcactgcagcctcaacctcccaggctcaagtgatcctcccaccttagccacctgagtggctgggactgcaggtgtgagccactacctctggctaatttattttttgcagagacagagccttgccatgttgcccaggctggtacacacccaatttctattatgtgtacaggcctgtgtctttcttcttgtttaccttatcagtccattaggccaggagtcgtgttgttgtttttatttttttttaaggtggagtctcactctgttgcgagtggacaagagtgcgctctggagtgctggagtgcagtggtgcgatcttggctcactgcaatctccacctctgggttcaagcaattcccctgcctcagcctcctgagtagctggaattacaggcgcacaccaccatgcctggctaatttttgtattttttagtagagaatggggtttcaccatgtttgccaagctggtcttgaactcctgacctcaggtgatccgcctgccttggcctcccaaaaagctgggattacaggcatgagccaccacacccggctgggtcacgctttttaatgtgacattcattcagcaaatacactgaacacaagtgccttgtggaggatgcagaaattctaacacatatgatccttgccctctaaggccttccaatccagccaccaggaaagaggaaacctgatgacaccgaaacgtgatagccaaggaacacttcctaaagaagagacttgatctgggccttggagaaggggcaggccttcatgagagcatggtgtaggcagtggtgtgaaagcaggaaaggaagggcgtggctttggggaacactgagttgatgtgagcagctccttcccactggaggtgcagggcaagcaattagctcatggacctagcccaggagggcctggaacatcaaggttgtcagaatgctcacagctgcaagacccagaactgaaaatttcttaactaaatggaatttattgttttccacaattgaaaagttcagcgtagtcggggggactgggctgggtccagggactcaaacaatgacacaaagacacagtttctctccacctctttgctttgtgtgtctgctcaggccatctctccccaaaggtggtgaagatggccaccagcagactggggctcaccctagactcctttttaaggtaacaggatgactctcttttgcccaacttagatcatgccccttaccctgaaccctggcaaagaacgtggagcttcctcctgtggtccaggtagaggatggttacatgtggggtctgggattcagaggtggcaccgctggcagtggttgggacatgtgagcacaagggtgaggcctacaccactctgaggccttggctgccccttctctctcccccagccctcgcctttccatgatggtaagacatgaggccactcaccagctctgccttcttgaagaaaatcagtgtcctatctttgaacagagctgggccttgaagtcaggctcacccactctcaaaccgtgggggaaacagagccttggttacaccagctctgtctcagggattgttttttctgcttctctcctacccttgcccgtttcttcctgctcctttccagcaccctcccagctcctcactttcctgacttttgttttcttttccaagcagcttgagcagtgcttgatgctcctgggtcacagcgtgcacacatcctggctgttctgggtaaccgcacacccaaccccagtcccatccccatatctctatcctgaaatcaacccaaagggtggggagggagcaggcaacagcagacaacagaaggcgggggtactgagagcatgtgctgctattcaggtaccctttgcagtaattccccagaagcactaacatttctgctgatcttggaatgatgctgtattactcagggttctccagagaagcagaacaataagatgtggagatatatgtatatatacagaaagacattataaggaattggctcatacaaatgtagaggctgacaagtcccaagttctgcagggtgagtcagcaagccgagacccaggagagccgaggttgtagttctagtctgaaggccagcaggctgaagatccaggaagagctgatgtttcagttcaagtccaaaaacaggaagaaagctgatgtcaccacttgaaagttggtcatgcaggaggggcgccctccaactcagccttttgttctatttgggccctcagctgatggatgaggatcccctgcgttagggaggcagcctgctttacttgctccaccaacataaatgccagtcctaccccacgccctcacagatggacccagagtaatgttcaagctgatatctgggcaccccatggtccagtccaactgacacataaaattaatcatcacagatgccttcttcagcacatgctcgatatctaacaaatatctctacggtgagattttccccccaaccttgggcccacttaagaaagatgttgaactgggcgcgagggctcacgcctgtaattccagcactttgggaagctgaggtgggtggatcacttgaggtcaggagtttgagaccagcctggccaacaaggtgaaaccccgtctccattaaaaatacaaaaattagccgggcgtggtggtgggcgcctgtaatcccagctacttgagaggctgaggcaggagaattacttgaacctgggaggcagaggttgcagtgagccaagatcatgccactgcactccagtctaggtgacggagcaagcctccgtctccaaaaaaaaaaaaaaaaaaaaaaaaaaaagaaa

SEQ ID NO: 11956 - DNA, 5947 bp, Homo sapiens
ggccacaaacaactgcttgtgatttttttttatccttactgaagaaccaatttgcatccctgttgagaatacagggcttgtggccagtaataactctcccttttaggattcctgtctttccccattttttttctatccccagttgccatcacagcgtaacggtgcagggaggtatatgagggttgctaagggaaagcagaggtgcccctcactcaaacctacattcagaaaaaaatttccttcattattgattggatgtcttaaatgcaaagacttacacagaaactgggaagggaggacctatttcagacaaggattcaccatggaatttttatgaatatccttataaaataggacttgggatgcagatggattatttctttaagtcttgcaacttcagaaaagcctgagacacataccccctcctactatatatagtgattataaatagtatatttacctccaaaaaatttaacactgtgccctaatgcaagaaaaatctgtggtataacaatgtactcatgttctgtagctctttactgaaggcctcatgtcaaaggcggggaaggaaagcaattctgtggctctgcacttctacccaagtctgaagagaagtgagccaagttaaatgaaggtcaaggatgctcctcctggtcctctcaggggctggtaaagtcttatatgacgttttctggggagtcattactctgtccaaagtcgaggtagctcagaggccttcaggccgctgatacttccagaaggccacctccccatcatcactgcaggaggccagtagccctggctccttggggttccaggccacacagttgacatcctgggaatgggcctgatgcaagtgggctgtcagggagaaggtgggctgctgtggatccgagttgggatcctcctgaaacacgcggatcgcgtcatccccacaagctgtggccagagcccctgtcagctgacacctggaaggaaagtgacatcagtgggtatacctgactaattaggccagagagacctgttccatagttcctggcctgttctcttccctaacttcaggcctcagctaaaaacctcttattaaaatgtttccttaactaataaggagtcacaaatatcacccacttatatcttcagatgctgcaatctagttctttcccctactatgattatcctaaaaaacgacatgcaattatgaactgcactttcctcacttggcataagcagtttcccatgtcataaagttgtttttttttttttttttttgagatggagtcttgctgtgtcgcccaggctggagtgcagtggcacaatcttggctgactgcaacctccccctcccaggttcaagcgattctcctgcctcagcctcctgagtagctgggactacaggcatgtgccaccatgcccggctaatttttgtattttcagtagagacagggttttatcacattggacaggctggtctcaaactccagacctcaagtgatccacctgcctcagcctcccaaagtgctgggattacaggccatgagccactgggcccagccatcataaagttttttttttttttctttagatggagtcttgctccatcaccaggctggagtgcagtggcgcaatctcggctcactgcaacctccgcctcccgggttcaagcgattctcctgcctcagcctctgagtagctgggattgggtgcgtgccaacacgcccagctaatttttgtatttttagtagagacggggtttcaccatgttggtcaggctggtcttgaactcctgacctcatgattcactcaccttggcctcccaaagtgttgggattacaggcgtgagccacagcgcctggccccatcataaagtattcttaacccctttctttaaacagtgatacaacaagctgagttctaccataatttacttaagttcacttttgttgaataggtgattcccaaatgtttgctaatataaagcaagcttaagtgctcagtttttttcactgttttggatttcctagggatcaattctcagggccagaactaccctctaacctactctcctatatgaatggtgcagcttttccagcttccacaaggccagagtcagtgttacctataaaaaccccagccactgccaggtgcggtggctcatgcctgtaatcccagcactttgggaggccaaggtgggcggatcatgaggtcaggagatcgagaccatcctggctaacgcggtgaaaccccgtctctactaaaaataaaaaattagccaggcatggtggcgggcgcctgtaatcccagctacttgggaggctgaggcaggagaatggtgtgaacccgggagacggagcttgcagtgagatgagatcacgccaccgcactccagcctgggctgcagagtgagactctgtctcaaaaaacaaaaaaacaaaaaaaaaccctcagccacgaatgcagattcaataataacttctggacagcacgagctgtgcgaacctctagcgctggtgctaccctcacagcctgggactgttctctgctcctgtgaatgccagcccagccagctgtaaaccagcatggtagagtcaggcctgataaggaatgggggtggctgccctcaattcccaagcactcccccagggttgcagaggactgcatagggtatgccttctctaaaatccctgatttatggggatgggatggggtggggggatggagtcttaccaagcaatgtcataaatggtccttgagtggaagccggacaaagtacagatacatttccaactggggtcagagccgctgcatgccacccctgcaagacagacttctcttgcccttaaacgttcctatgtcctgggcacctcaaaggagaacctaacttaccttccctcaccctcatcttcaactgattatgagtctgtgtctccgttcgtgtccccatccctgcttatctgccttacacactatagccagactggcgtttctcaagcagaattccgaggaaacatccctgttctgttgcagactgtatgtaactactttgcgtgcctgtgaaggccacccaccagccgacccaacccactttattcctctccaaaccccagacgtcctatgccccatttaaatgcattaccacccctcagtctaagcattcccgccattgttatctttactcacactgttgagttttcacttgaattctcacgtgaaattctcatgttaaaatcctacatacccttttaaattcagatgaaacaacccattctacaaaactttcctgattcttccagcactctatccagagccctcttgtagcacatcttaccttttacccccatttgctctgactcatgtacgtgtcttagcagactgtgaaccccttgagagatgggtcttctttagctctactaatggacctcaccttgttcattgcctggtagatactgacgccagatacgcacagtacggtcatcactacaagacgccaggcgctggccactcgggtcaaaggccaagctccacacagtggattcatggccctcaagggtggcacagcatacccagtcatcctcttcctcccggtacagcttcactgtgtcatcatagctggcagaagctaagagctgggggaagagtgaaaggaaacccaacatgtgtctgtgtggcccaggaagcaaaggacaggtcagttccaggtatctgcttttattttattttattatttatttgagatgaagtttgctgttgttgcccaggctggagtgcaatagcacgatctcggctcaccgtaacccccgtctcctgggttcaagtgattctcctgcctcagcctcccgaatagctgggattacaggcatgtgccaccatgcccgctaattttgtatttttagtagagacggagtttcaccatgttggccaggctggtctcgaactcctgacctcagatgatccacccaccatggcctcccaaagtgctgagattataggtgtgagccaccacacccagccggatctgtttttataaagggactaatgttttttgttcacagatggaactctccgtaaaagctagattaaggctgaaaagcagaggaaggctgggcacaagcctgcacaccagagcccttcccacaagagtccctgcttgactcttacctcctgacttgggtgccaaaccacatgcttgacatcctgtgtgtgggagttgagaacactgacacattcatactcatcctcttcatcaactgtgggagagaaaaaggggacccaagagccgaccctgtcagggacacagagggggctgtcaggtggttcccaatccacctggagggacctggcctcaccttcccagacccaaacgctcttatctcggctgcaagtggccaggaggttgccagatggggcccaagccactgacttgacctcattttcatggccctcgagagtggttacacactgtgaaaggggaaagaaaatgagaattaacagcagctaacacccctaagccccttcccatgggtacagcccaactggcgcaggttggctcaggttcctgaaccagccctggggaggaaacaggcaataattctggtcccaaccagcctgggtacctcaaagtcatcctggttcttcttccaaatgcaagtggtagcatcaaagctggcagaggccaggtaattaccgcagggggaccaggctaccttccgcacggtgcgctggtggccttcagaaaggacagacttgcagatccagctgtcacctaaaggcggagcgcaggccaggctctggagctgggtgcagcaccatgaagccattcaatatcaggggctagcactggaatcaagctagtgggggaaagctcagggagtgtatttcacagcttttacaaagatgcaaatgaatctacttcgtctggaagcttttttttttttttttttttttttttgagacggagtttttgctctgatgcccaggctggggtgcaatggcacaatctcggctcactgcaatcttcgcctcctgggttcaagggattctcctgcctcagcctcccgagtagctgggattacaggtgcccgccacaacgcccagctaattttgtagttttagtagagacggggtttcaccatgttggccaggctggtcttgacctcttgacctcaggtgatctacccgcctctgcttcccaaactgctaggattacaggcgtgagccaccgcgcccaacctctggaggcatctttctaaaacaaatctgatctaaaattgctattggttccccaatgccctcgggataaaatgtgaccatccagtcgcaagttactctgaaggccactttcctaacacctctcttttcccattttcctgcctctgcagctaacacaattcccttgacatttcagcttgtctgctgacgtttttcctcccaacagtcgcagacttctttgcctgtaaagcccttctcggcgtggctaacatcccactctccctccgccaggaacaggttcagcctcccctgcaggctgagcgcctgcactacgcgcaggctgagccctcagcgctgagggccgcgcaaccaggctgggccttaccctccgtgccccagatgcggattctccggtcgccgccgcacgaggccagcagggtccccgcggggttccaggccaggaaccagcagcgggagtccgggtgcgccgggacacggcccagcagcaccagcgagtccttcatgtcggcccgacgcagggggaggtgggggcgggcagagtccgctgagcagacagcgggtctcaccgcgcgcgtctgcgtaccgcccactccaggcttccgcggccgacagaggctcccgcttccgccggaggacctgggtcgccccggaaactcaactgcccactgctgcggccgccataccctctgggagttgtagtcgctcccctcacctcggcaggg

SEQ ID NO: 11957 - DNA, 2000 bp, Homo sapiens
tgcagagggggtgtgcagagctccagcaccgtgcaggtggagagagtccgtgctctaactcccaacactggttatccgcaccaggatactctgttgagttccatgacagaatctgtttcagggcgggctccctggaggctgactttgagatggagattcccatgcagggagtgtactggggctgctctcaggttcagcacctacagaagggaaggaagcagacttgctcacagggagaagctgggctgcaaggcagtctcgacacacccctcagctgaacccatggaaggtgttgaagcattagaaaagtctcatggccgtcccagcttcagatgcccccagcccccactgagctgaggggccagacctttgtaccccagcttcagccagtcactgggtacacactgtccccagaggggtggtgggacattgggtggggaagctgtcttcacttgggggcaattcctgaggagggctgtgagccagcaatcctcccagcagctggggcagagcctgtcttgagggggatttggattgtttatcagggcgtccacagcctcttgtgccactcagatccactcctctgggtaagttctgggagcagctcgtctttctctggaacaaactaatggttcatcagatgaccacagcccccaccactgcagctgttcttgaggtctcaccgatactccccatctccctcttctatccattttatctttatttatttatttagagacttgttctgttgcccaggctggagtgcagtggtgtgatcacagctcactgcagcctccacttcccaagctcaagtgatcctcctgcttcagccacctgagtagctggaactacaggtgtgtgccactacacccaactaattaattttttttaagagatgaggtctcactatgttgcccaggctgatgttgaatttctgagcttgagtgatcctcctgcctcaggctcccaaagtgctaggattacaggtatgaagcactgcacctggacttctatccattttattttattttactttttttttgcgactgagtctcactgtgtcgcccaggctggaatgcaatggcacgatctcggctcactgcaacctccgcctcccaggttcaagcagttctcctgcctcagcctcctgagtagctgggattacagccacatgccaccacacctggctaatttttgtaatttttttttagtagagacagggtgtcactatgttagccaggctggtctcaaactgtgacctcaggtgatcctcccaccttggcctcccaaagtgctgagattataggcgtgagccactgagcccgcctcggcttctatccattttagattctcctccctgcaggaagcacctcagctgagcccctggccaccacacccttttcaggctatggctgctgcacctgtgcatttatcatcagcaaggggcaagagtacaaagacatattccttctggctcccactgtgcaactgcagccccatctcttcctggtgggcagggtccactactcctgccaggatggtggctcctgcttcttgcctactggttccttggtgtacttttgctgtatcccttcatggaaacatttccttattgggaaccagaacctaaaaccctcaaagcttagagttgtggtaacagaaataccccaatgggattaatgtaaagtgaagccgctcctatctctaccccttggttcctggacctatatattcctcccagtgggacatagcgccttattggttgttgattagagtgtacactgtgccctggaaggtagtaacccctccttacttggtatcatcgtctctgagctggcatctcagctacgccttcaacagcccatttcttctcttcgttcaagccagtatcttctgggtggtgcagaatgtgacaggaccagtgatcccatggtcacgtgccattgtcatgcctccttcgccttgcaatgaacgggcccttgggtctgatgtgatgttac

SEQ ID NO: 11958 - DNA, 8047 bp, Homo sapiens
tttttgtttttttttttttctttttaaataacaaatttatttttcacagttctggaggttgccccaaaaagcttttattatctagattaaggttaatgcacttttaaatcataatgttaacattttttttcttaatagagacagagtttagccatgttgcccaggctgaccttgaattcctgagctcaagtgatccgcccacctcagcctcccagagtgctgggattacaggcatgagccaccatgcccagcccacgttaacattttttatgaagaataacttccaaaacaatccaaggagaagggtggcattttacagtctctttagtatcttgttataataaacagttgaattcttacagctgcttctacatccaaacttttttgttgaagtaagttgacttcacacagatacgcagttggaaaagtttttaaaatagccttttcagctaattgtggctattctttgataccacaccaagactacaagtgattttttttttttttttttttttttgaaatggagtctcgctctgtcacccaggctggagtccagtggcacgatctcgactcactgcaacctccacctcccgggttcaagctattctcctgcctcagcctcccgagtagctgggactacaagggatctgccaccacgcccggctaatttttgtaattttagtagagacggactttcaccatattggccaggctggtcttgaactcctgaccttgtgatccacccaccttggcctcccaaagtgttgggattacaggcgtgagccaccgcgcccggcttactacaagtcatagtttcttaaaggcaatgtagactccgaaaacttaatgcactcttatattgttaatacattaaaatccactggcctgtcttacacttttgaatcaatctttgagccatgcatgattttgtaacatcacgtactggtcacttggaaaaatggttcattgaattcttccaaatgaaatgcatttcattatacaaatcacatttgttaatatccccaacaataaagctcatggtggagtacagattttcggaaattccaatttttgcttgaaagctttatcactggcaacactatcagttgtttcccttgaggtgagaggctcattccattaatttccagaaaatatcagccaaatattcaagtctaaataccgtaatctgctagttctttcaattctaaagggcatgccttgaacacagccaattcagcttgcaactcaactgtgtaactgcttttcctcaaggcacccatacttcagtgcacagcagaggggctttatgcatgcttccagttttctcagaatattataaattctcaaggtcaactttttttttctttttgagacagggtttcactcttgttgcctgggctggagtgcaatggtatgatctcggctcactgcaacctccacctaccggattcaagcgattctcttgcctcagcctcccgagtagctggaattacaggcatgcaccaccatgcccagctaattttgtatttttagaagagacggggtttctccatgttggtcaggctggcctcgaactcccgacctcaggtgatccgcccgcctcagcctcccaaagtgctgggattacaggcatgagccactgcgctggctaggtcaacatttaatagttaaccattgctatttgttctatcaaggacatatcacaactactagaagtgtgctgccacaccttgattcatgccacagtgccaacagttgacctcacagatcctccctgaaagggtcttgggactcccaggatctgcaggccgcattcttcgagaaccactattctaggtacagccccactgtccttctaaaatctaaggtcacagcttaaacttcagggaaggctgtagttttggaggccattgtcacattagaacccatttagaagtgactgtcaagagacaacttgagtgagtctgaaactgcctgctgatggcagtgtttctcaactggtttaaatcgccagtcccctaggaagccttcttcctgatcactccctgccatgaaaatggaatatcacagacacactatatgtgctgtgggccttaggagggccacaaacaactgcttgtgatttttttttatccttactgaagaaccaatttgcatccctgttgagaatacagggcttgtggccagtaataactctcccttttaggattcctgtctttccccattttttttctatccccagttgccatcacagcgtaacggtgcagggaggtatatgagggttgctaagggaaagcagaggtgcccctcactcaaacctacattcagaaaaaaatttccttcattattgattggatgtcttaaatgcaaagacttacacagaaactgggaagggaggacctatttcagacaaggattcaccatggaatttttatgaatatccttataaaataggacttgggatgcagatggattatttctttaagtcttgcaacttcagaaaagcctgagacacataccccctcctactatatatagtgattataaatagtatatttacctccaaaaaatttaacactgtgccctaatgcaagaaaaatctgtggtataacaatgtactcatgttctgtagctctttactgaaggcctcatgtcaaaggcggggaaggaaagcaattctgtggctctgcacttctacccaagtctgaagagaagtgagccaagttaaatgaaggtcaaggatgctcctcctggtcctctcaggggctggtaaagtcttatatgacgttttctggggagtcattactctgtccaaagtcgaggtagctcagaggccttcaggccgctgatacttccagaaggccacctccccatcatcactgcaggaggccagtagccctggctccttggggttccaggccacacagttgacatcctgggaatgggcctgatgcaagtgggctgtcagggagaaggtgggctgctgtggatccgagttgggatcctcctgaaacacgcggatcgcgtcatccccacaagctgtggccagagcccctgtcagctgacacctggaaggaaagtgacatcagtgggtatacctgactaattaggccagagagacctgttccatagttcctggcctgttctcttccctaacttcaggcctcagctaaaaacctcttattaaaatgtttccttaactaataaggagtcacaaatatcacccacttatatcttcagatgctgcaatctagttctttcccctactatgattatcctaaaaaacgacatgcaattatgaactgcactttcctcacttggcataagcagtttcccatgtcataaagttgtttttttttttttttttttgagatggagtcttgctgtgtcgcccaggctggagtgcagtggcacaatcttggctgactgcaacctccccctcccaggttcaagcgattctcctgcctcagcctcctgagtagctgggactacaggcatgtgccaccatgcccggctaatttttgtattttcagtagagacagggttttatcacattggacaggctggtctcaaactccagacctcaagtgatccacctgcctcagcctcccaaagtgctgggattacaggccatgagccactgggcccagccatcataaagttttttttttttttctttagatggagtcttgctccatcaccaggctggagtgcagtggcgcaatctcggctcactgcaacctccgcctcccgggttcaagcgattctcctgcctcagcctctgagtagctgggattgggtgcgtgccaacacgcccagctaatttttgtatttttagtagagacggggtttcaccatgttggtcaggctggtcttgaactcctgacctcatgattcactcaccttggcctcccaaagtgttgggattacaggcgtgagccacagcgcctggccccatcataaagtattcttaacccctttctttaaacagtgatacaacaagctgagttctaccataatttacttaagttcacttttgttgaataggtgattcccaaatgtttgctaatataaagcaagcttaagtgctcagtttttttcactgttttggatttcctagggatcaattctcagggccagaactaccctctaacctactctcctatatgaatggtgcagcttttccagcttccacaaggccagagtcagtgttacctataaaaaccccagccactgccaggtgcggtggctcatgcctgtaatcccagcactttgggaggccaaggtgggcggatcatgaggtcaggagatcgagaccatcctggctaacgcggtgaaaccccgtctctactaaaaataaaaaattagccaggcatggtggcgggcgcctgtaatcccagctacttgggaggctgaggcaggagaatggtgtgaacccgggagacggagcttgcagtgagatgagatcacgccaccgcactccagcctgggctgcagagtgagactctgtctcaaaaaacaaaaaaacaaaaaaaaaccctcagccacgaatgcagattcaataataacttctggacagcacgagctgtgcgaacctctagcgctggtgctaccctcacagcctgggactgttctctgctcctgtgaatgccagcccagccagctgtaaaccagcatggtagagtcaggcctgataaggaatgggggtggctgccctcaattcccaagcactcccccagggttgcagaggactgcatagggtatgccttctctaaaatccctgatttatggggatgggatggggtggggggatggagtcttaccaagcaatgtcataaatggtccttgagtggaagccggacaaagtacagatacatttccaactggggtcagagccgctgcatgccacccctgcaagacagacttctcttgcccttaaacgttcctatgtcctgggcacctcaaaggagaacctaacttaccttccctcaccctcatcttcaactgattatgagtctgtgtctccgttcgtgtccccatccctgcttatctgccttacacactatagccagactggcgtttctcaagcagaattccgaggaaacatccctgttctgttgcagactgtatgtaactactttgcgtgcctgtgaaggccacccaccagccgacccaacccactttattcctctccaaaccccagacgtcctatgccccatttaaatgcattaccacccctcagtctaagcattcccgccattgttatctttactcacactgttgagttttcacttgaattctcacgtgaaattctcatgttaaaatcctacatacccttttaaattcagatgaaacaacccattctacaaaactttcctgattcttccagcactctatccagagccctcttgtagcacatcttaccttttacccccatttgctctgactcatgtacgtgtcttagcagactgtgaaccccttgagagatgggtcttctttagctctactaatggacctcaccttgttcattgcctggtagatactgacgccagatacgcacagtacggtcatcactacaagacgccaggcgctggccactcgggtcaaaggccaagctccacacagtggattcatggccctcaagggtggcacagcatacccagtcatcctcttcctcccggtacagcttcactgtgtcatcatagctggcagaagctaagagctgggggaagagtgaaaggaaacccaacatgtgtctgtgtggcccaggaagcaaaggacaggtcagttccaggtatctgcttttattttattttattatttatttgagatgaagtttgctgttgttgcccaggctggagtgcaatagcacgatctcggctcaccgtaacccccgtctcctgggttcaagtgattctcctgcctcagcctcccgaatagctgggattacaggcatgtgccaccatgcccgctaattttgtatttttagtagagacggagtttcaccatgttggccaggctggtctcgaactcctgacctcagatgatccacccaccatggcctcccaaagtgctgagattataggtgtgagccaccacacccagccggatctgtttttataaagggactaatgttttttgttcacagatggaactctccgtaaaagctagattaaggctgaaaagcagaggaaggctgggcacaagcctgcacaccagagcccttcccacaagagtccctgcttgactcttacctcctgacttgggtgccaaaccacatgcttgacatcctgtgtgtgggagttgagaacactgacacattcatactcatcctcttcatcaactgtgggagagaaaaaggggacccaagagccgaccctgtcagggacacagagggggctgtcaggtggttcccaatccacctggagggacctggcctcaccttcccagacccaaacgctcttatctcggctgcaagtggccaggaggttgccagatggggcccaagccactgacttgacctcattttcatggccctcgagagtggttacacactgtgaaaggggaaagaaaatgagaattaacagcagctaacacccctaagccccttcccatgggtacagcccaactggcgcaggttggctcaggttcctgaaccagccctggggaggaaacaggcaataattctggtcccaaccagcctgggtacctcaaagtcatcctggttcttcttccaaatgcaagtggtagcatcaaagctggcagaggccaggtaattaccgcagggggaccaggctaccttccgcacggtgcgctggtggccttcagaaaggacagacttgcagatccagctgtcacctaaaggcggagcgcaggccaggctctggagctgggtgcagcaccatgaagccattcaatatcaggggctagcactggaatcaagctagtgggggaaagctcagggagtgtatttcacagcttttacaaagatgcaaatgaatctacttcgtctggaagcttttttttttttttttttttttttttgagacggagtttttgctctgatgcccaggctggggtgcaatggcacaatctcggctcactgcaatcttcgcctcctgggttcaagggattctcctgcctcagcctcccgagtagctgggattacaggtgcccgccacaacgcccagctaattttgtagttttagtagagacggggtttcaccatgttggccaggctggtcttgacctcttgacctcaggtgatctacccgcctctgcttcccaaactgctaggattacaggcgtgagccaccgcgcccaacctctggaggcatctttctaaaacaaatctgatctaaaattgctattggttccccaatgccctcgggataaaatgtgaccatccagtcgcaagttactctgaaggccactttcctaacacctctcttttcccattttcctgcctctgcagctaacacaattcccttgacatttcagcttgtctgctgacgtttttcctcccaacagtcgcagacttctttgcctgtaaagcccttctcggcgtggctaacatcccactctccctccgccaggaacaggttcagcctcccctgcaggctgagcgcctgcactacgcgcaggctgagccctcagcgctgagggccgcgcaaccaggctgggccttaccctccgtgccccagatgcggattctccggtcgccgccgcacgaggccagcagggtccccgcggggttccaggccaggaaccagcagcgggagtccgggtgcgccgggacacggcccagcagcaccagcgagtccttcatgtcggcccgacgcagggggaggtgggggcgggcagagtccgctgagcagacagcgggtctcaccgcgcgcgtctgcgtaccgcccactccaggcttccgcggccgacagaggctcccgcttccgccggaggacctgggtcgccccggaaactcaactgcccactgctgcggccgccataccctctgggagttgtagtcgctcccctcacctcggcaggg

SEQ ID NO: 11959 - DNA, 8098 bp, Homo sapiens; identical to SEQ ID NO: 7968

SEQ ID NO: 11960 - DNA, 6462 bp, Homo sapiens; identical to SEQ ID NO: 7969
  SITE (328): n equals a,t,g, or c

SEQ ID NO: 11961 - DNA, 327 bp, Homo sapiens; identical to SEQ ID NO: 7970

SEQ ID NO: 11962 - DNA, 3387 bp, Homo sapiens; identical to SEQ ID NO: 7971

SEQ ID NO: 11963 - DNA, 2907 bp, Homo sapiens; identical to SEQ ID NO: 7972

SEQ ID NO: 11964 - DNA, 1678 bp, Homo sapiens
gtagttctctggacttttccccagaatagaagaaaagagataaatgggatctgtgcacagatatttactgcctcaggcctgtgagggaatgccaagttgtttgttgacacaattttggtagtctcgatcagaatcagcaaactgtgactcatagaccaagccctgcctgtcctgtttttttgcatggccctgaacagaagaatgagttttacattttttgatggtttaatggtgatgtgtgaaaataatgtgaaatccaaatttcagggcccatcaatggtcacacgattatgtgaatttactaaaaaccattgcatcatatattttaaagggtggactgtatggtttgtgaattatatctcaataaagtagttcttaaaaaaaaacaaaacaaaatttcagggcccatcaagttatatatatatgaaatatatattttggtagatatggggtcttgctatgttgcccaggctgatcttgagctccagggctcaagtaagtgatcctcccacctcagcctcccaaaatgctgggatttcaggtttgaaccaccactgtcatccccataaataaagttattggaatacagccatactcattcattcatgtattgtctatggctgcttttgctctacaatagctgggttgagtacttggaacagagaccaaatgtctggcaaaagtctaacatatttactatcttgtacagaaaaaaaatgtcaacctacatctatacttattacaatttcagtaaaaatacagagtttaagtaatttgggaaaatggctttaagaatgaaaaggtgcaaggttatacctgctgaacaaatgaactgtgggcgtgaggtgccattagtctaggcctgcatgttcagggaaggcccaggggagagcctgatgtggcctggctatttgtcatatttgcaaaggggaagtgatgtaattggtctgcaatgaacttgattttcaattgactcaaagatctaaggaggaataaaaattatttaaaaaggaaattagggaagaatggggagaatattggaatcatttaatagaagtacaaacacatagacttttaacttttgcccattaaattttttttaacattttattttcttaaattttttttaaaaaaatagtgatggggtttcactgtgttgcccaggctggtctcgaactcctgggctcaagtgatcctcccaccttggcctcccaaagtgttggggttacaggcatgagccagcctcacccaacccattaaatgtctttaatgtaacttcgggtgtatgagaatttgtaagttgactgtgcagatctcttaaaaggttgatatggtgtatttttagaatgttttagactgcacgtgtgtgtgtgtttgtttgtgtgtgtgtgtgtgtgcgtgctatagaaaacacagcatggaaaccttgttaaaatcagaggctttgattttttattctaaagctttgagttatatgtttaatcagatactatgtgaaaaattttcattaggtacatattgaagtgttccattcaagtctacaagtatatcctcctaaggatttagtttaacatcctttccctgctccaacaagggaatgctttattagagtttcctagaaataatgggactaattaggacctttcatattacctagtccagcagtccaacccatgtg

SEQ ID NO: 11965 - DNA, 304 bp, Homo sapiens
ttttttgttttgttttgttttttgagatagagtctcgctctgttgccctggctgaaatgcagtggtgcgatctcggctcactgcaagctccgcctcctgggttcacgccattcttctgcctcagcctcccaagtagctaggaccacaggcgcccaccactacgcccagctaattttttgtatttttagtagagacggggtttcaccgtgttagccaggatggtctcgatctcctgacctcgtgatccgcccgccttggcctcccaaagtgctgggattacaggcgtgagccaccacgcctggcc

SEQ ID NO: 11966 - DNA, 10944 bp, Homo sapiens
actttggaaccttttcctacccttagaggctgatcccgagaaaaaatacggagcaggactgaccaatgtggaatatgcacatctgtgtgagctcatgggcacgtccctgtatgcccccgaggtaccttctttaaagttttcctcagtgtgtgggaacatcctgatcttcataagaactcaatcctaaacagataaaccagattcagaagcactggcatgaacttgaacttttttttttttttgagatggagtctcgctctgtcacccaggctggagtgtagtggcgaaatcttggcgcactgcaacccctgcctcctgggttcaagtggttctcctgcctcagcttcccaagtagctgggactacaggcatgtgccaccacacctggctaatttttgtatttttagtagatacagggttttaccatgttggccagactggtctcaaactcctgacctcaggtgatccacctaccctggccccacaaagtgctgggattacaggcgtgagccaccatgcccatccaatttgaagcttgaaatattaatgtgagaaggccaggcatggtggctcacacctgtaatcccggtacttttggaggccgaagtgtgggggatcacttgaggccaggagttcgacaccagcgtgtgcaacatagaactctgtatgtacaaaaaaataaaaaattaatcgggtgtgatggtgcatacctgtagtctcagctgcttgggaagctgaggcatgggaggatggcttgagctgaggaagtcgaggctgcagtgagccatgatcgtgccacgatactccagcctgggtgacagagcttgactctgttttttttagaagaggacatgacagtcatggtcacgctccttttccttctcaggtatgtaactgctctgcgcctgacacgggcaacatggagctgctggtgaggtatggcaccgaagcgcagaaggctcgctggctgattcctctgctggaggggaaagcccgctcctgttttgctatgaccgagccccaggtacgtcgcctgggctgccacccacttgcctggccctgttgttgtcggccccacagggaacacgggctgtctgctggcgtctctgactggaatatgctccccactcaggttgcctcttcagatgccaccaacattgaggcttccatcagagaggaggacagcttctatgtcataaacggtcacaaatggtggatcacaggtatttggcctaaaatgcactttccaaatgcacatcagggagtctgtgctgttaggcgcgtctctcaatgcctgggaggagcctctgctttttcaagttgacacaaaggagattctgtcacttagcgcccccagcagaggcagctgggagaataggagggtaatccgtggagcacactgttctcagaggtggcacttcacagggcagggacgtcccccggtgcccacacatggacggatgcctccctgcacatgtgaccccaggaatctctccacttcctgctgttcattctgctttgggcagctccccttccttggtggcttcctggctcctcgatcaggtgtgttacatcctaagggctaatgacaatcctgacttttagggattgtccagtgttacttttgcagggcccctacaagtagccgtggagcttacctcccggagcccatacctccctggacattaagaatgagcatccccattttgcaaaggaggaaaccgcactcagacttaggtcccttgcctggggtatgagcccccagccagcaagtagagaacccagagtcaaaggttcacctgattccaaggcccgggcccagagccgttatgtgtgcaccacctgtgggagccgagccagctggcagggatcaagtagcggttttcatcctcttgtctctaaattatattttctactctatgtgatgcttttaaaaacttgctcttatgatgttggattcattcctcactgggacaaaacccaatttgctcttatttctggtcagcagtctgcagatgctcatctgattacatggagccttaaagagctctgtctgcttccttactgtgcctttcttgggccaggaccacgtgtgtagagatttgatggccctggtgtcagatgatggggtctgtctctctcctttcctggcaggcatcctggatcctcgttgccaactctgtgtgtttatgggaaaaacagacccacatgcaccaagacaccggcagcagtctgtgctcttggttcccatggataccccagggataaaaatcatccggcctctgacggtgtatggactggaagatgcaccaggtgagacctccaggggcgggtcacccctgggtgtgggtctggtccccaggaaacaccactgaggggcccctgctcttgttcaggacttgccacatcccacgtctgagggtatgatgacatttggagtcacatgctcctgcatttcatttccatacatgaatatcaaccatgcaggcggatttcagacaggcatttatggatttttttccctcttctaaacttagaaagtaatcaggagtctgtgacacaggaagccatacagggcagacgcaggaagtggaccccaaacctactcttccaggccccagtgtgaacagctgacctctaggccacagccctggtttggtccgctcccagtttggttctctgctaatagtgttcacatttttactttcagtgttttcataggatcactacattgtcacaaaccactaggagcttcagcttaaggtggcattattatgtttttataaaaggaatcacagaatagtcatttgccattataaatcagtgattcattttctgtgtttaacaggctgtttcctgccgtccttttccctttaaccatgtcccagtaagaaggctaaataaagggcagggacattgccagcagataacccagactgaggtgaggaataaacacatccaaggaaaatgactatggctattgctcacagtgatcgtttgggtctttcaggtggccatggtgaagtccgatttgagcacgtgcgtgtgcccaaagagaacatggtcctgggccctggccgaggctttgagatcgcccagggcagactgggccccggcaggatccatcactgcatgaggctgatcgggttctcagagagggccctggcactcatgaaggcccgcgtgagtgctttcccccgcacccagcactgactcagaaccaccaccttctgctttgctgtcggacttcaattcctacctgttttctgagtgcagtcctagcaggtgaagcaaggtgatgtccttgccaagaagttgcattcctgtctgctttgcatctgctactttgctgcagtttggattcagagcagaatggaccccactctgtcgaggtgacctgaagggaaacgccaggctctgtagcagcagaggcaaggttccaaggtgtaaaggtcatgctgctagcacattattaaaaatcagtctgggtgcaatggctcacagctataatcccagtactttgggaggtctaggtaggagggttgcttgaagccaagcatttgagaccagcctaggcgaaaaagagagactcagtctctacaaaaaaaaaaaaaattttttttttttttttgagatggagtcttgctctgtcaccaggctggagttcagtggtgtgatctcggctcactgcaacctccacctcccgggttcaagcaattctcctgccttagcctcccaagtagttgggactacaggcacgtgccaccacgcccagctaatttttgtatttttagtagagacagggtttcaccatgttggccaggaaggtctcgatcccttgacctcgtgatctgcccgcctcgggctcccaaaatgctgggattacaggtgtgagccaccgtgcccggcaaaaaaaagaaaaagttttttttgttttttttttttttgagacggaatctcactctgttgcctaggctggagtgcagtggcgcgatcttggctcactgcaacctctgcctactgggttcacaccattctcttgcctcagcctcccgagtagctgggactacaggcacccgccaccatgcctggctaattttttgtatttttagtagagatggggtttcaccatgttagccaggatggtttcgatctcaccgtgttagccaggatggtctcgatctcctgacctcatgatccgcccacctcagcctcccaatgtgctgggattaccggcgtgagccaccgtgcctggccaaaaagaaaaagttttaagtgccaggcatggtagcatgtgtctctagtcccagctactcaggaggctgaggcagaaggatcgcttgagcccaggagtttagggctgcagtgagcagtgatcacaccactgcactccagcctgggtgacagagtgagaccctgtctctttaaaaataaataaataaataaaaatcagacaccagggagatcccatgttgcttgtttttgtccctaggcttccatcatctggcctgtaccaccctcctccacagcacatccagaaaactttattcggccataatcctaccacccccaaagtttggaaacctaggttaaaagacagctgcttccaggacaggaattcaaattggtgattatcaatttcagaaaggtgacgcaaaccctgagaccaaaaccagtgtctcacaagaactgctattgaaagaacagaggcagtctgaattttttattaccgagcaaacctgtgatttacacccttttgagttaagactgaccagttattttttctttctaagtaaaacgctcctgtctatggactcaggtatggtgcttcagccccacatggaattaaattcagccttctggcagaataattggactgaatgagtcagacagaagtctccagaaagtgcatagcatgaacatggcacctccactgaagacttggttggagtaattaggaatctacaaaagatttgctacaaggaggttcaccacagtgcttattgaaatagcaaaattctgaacaacctataaggctaacaatgactgttggccaaataaaacacaagatggcatacagtgagactttaaatgatgctgtggaaatctattccttaacatggagaaattgctcactatatacacttaaatttaaaaaaaaagactgtggccaggtgtggtgacactcccagcactctgagaggccgaggcaggcagattgcttgagcccaggaatttgaaactagcctgggcaatacggcaaaacctcatctctataaaaaataaggctgggcgcggtggctaacgcctgtaatctcagcactttgggaggctgaggtgggcggatcacttcaggttaggagtttaagaccagcctcgccaacatggtgataccccgtctctactaaaaatacagaagttagctgggcatggtggcacatgcctgtaatcccagctacttgggaggctgaggcaggaggatcacttgaatccaggaggcggaggttgcactgagctgagattgcaccactgcactctagccggagtgacaaagcaagactccatctcaaaaaaaaaaattaaaattaaaaaattaaaaatagtagccaggtggggctgggtgtggtggctcatacctgtaattccagcactttgggaggccgaggtgggcagatcacctgaggtcgggagttcgagtccagcctgaccaacatagagaaaccctgtctctactaaaaatataaaattagttggacgtggtggcgcatgcctgtaatcccagctacttgggaggctgaggcaggagaatcgcctgaacccgggaggtggaggttgcggtgagccgagatcgcaccattgcactccagcctgggcaacaagagcgatactctgtctcaaaaaaaaaaaaaaaaagtagccaggtgtggtggcacacatttatagtcctagctactcaggaggctgaggtgggaggatctcctgagcctgggaggtcgaggctgcagcgacctgtgagtgtgccattgcactgcagcctgggtaacagagcaacaccctgtctgggaaaaaaaaaaacaaacaaaaacaggctgttagctttgatgcaaaataatgttttgttgttgttgttgttgttgttgttattgttttaagcaggctggccgggtgctgtggttcatgcctgtaatcccagcactttgagaggccaaggcaggcagatcacctgaggtcaggagttcaagaccagtcaggccaaaattatgaaacaccccatctctattaaaaaaatacaaaaattagccaggtgtggtggcaggcacctgtaatctcagctacttgggaggctgaagcaggagaatcacttgaaccccgggaggcagaggttgcagtgagccgagatcgcgccactgcactccagcctgggcaacaaaagcgaaactctgtctcaaacaaacaaaaaggctacaaaaccatatatagagtgtggctcccgtttttggaaaaaataagtatatataaaaaaactatagaaggatagaggagaatatccaccaaatattaactagtggtgactagatggtgggattctaggtgctcttactgtcttctctttttttgttctgaaaacaggtagtttttctgccatgagataaattatttgtgtagattgtttttagtgaaaaaaaaaaaaaaaaactaggctgggtgtggtggttcatgcctgtaatcccaacacttggggagaccaaggcaggaggattgcctgagtctaagagtttgagaccagtctgggcaatgtagtgagaccctgtctctacaaaaaattggaaagttagctagatgtggtggttcttgcctgtggtcccagctactcaggtggctgaggtaggaagattgcttgagcccgggaggcggaggttgcagtgagccaagatcacgccactgcactccagcctgcgcaacaaagtgagaccccgtctccaaaaaaataataaaaaaaagaaggaaaaagaataaataaaacaagaaaaaaaaaggaatacttagaaccttttctgatgccttgtgactttcagaatttaaaatcccccttgcagataaggccacccacggcggaaggccgggagcgagacggggctgaggggaccttgctcccattggagctgcagggcaggaaggggtgctgcggtcagcagagggcacccttcgcctgcgccgtgtgcagtgcctgcagtcactccctcattcccaggagtagccttgggtcagatgctggctcagatctataactgctcctgtctggtagccaggcctgcccagatgtgcaatggctggaataaagggttcttggaagcaatttgttacaggcaccctgtgggctgtggctggctgtggcacacgtgaaggttgtgtgtcagacctactccctggacatggcgcatggctgcacacaggcaccttggctgagaagatgcacagtcctggtttcactctcctcccctgccctgtcctgtctgcttccacccagctctgcaggccaccagcccccgcctctcgtggccacccccagcccagcatgtcctcagccgcacatctcctgtgtcgacaggtgaagtcccgcttggcttttgggaagcccctggtggagcagggcacagtgctggcggacatcgcgcagtcgcgcgtggagattgagcaggcacggctgctggtgctgagagctgcccacctcatggacctggcaggaaacaaggtaggggcaggggcacgagggggcctcccagaggcagagattcttcctcctcactcagcaaagcatgagagcctggcttcttgacattagaaactttatttcacctctacttggagctgtttgggcagtttttcaaaaattggaaaggcacaagaagagaggactggcctttgtgttttactgacctggtgagctgcttagtccaaggcagtgggtctgatggggccacagggcccctgggtggccctggactcccagggccattggtggaggtgttgggcaacctaagagtaaggcagggaaaagggaccctctgctggccttcatctgaatattgaattaacaaaaatagaagcttattttcaagtgtgacattagtcattcactaaggctctttttaaccttttatttatttattttttgagacagggccttgctctgtagccaggctagaatgcagtggtacatcatggctcactgaagcctcagcctcccaagtagctgggactccaggcgcaaacctccatgcccagctaattctttattttttgtagagaccggctctcaccatgttgcccaggctaactaaggctctttctaagtgcctgtgatgaccaagcacaatgccatgttgaccttgctttgtccagctttctgtggggcagcctccaaccccacccaagaccctcaaccatcagggaccaacccatgctcatgctcacagttcctggttctttgacgctggcgtgctagatatggtggaggctgctgggtgtctcccttgaacaccctgccccagggcagatcactgtagctcggtttcccagagccctgagtggccttggtccactgctgcttggaggcagagctggccgtgaccctgagcaaagcacaggaccctccccttatcccttcagtgtgtgctggctgtgttccccgtcatctgggaagacagccacattctgccagcacttgcttcgcatcttgtgacataagataatagttgccaacatggcgcccttcatccctgggtgctgtcaagccgtacaccaggcaggggcagcctcacccagctcacatcagcgagaccttggggcctctgttttggacggtggtgtttgacttcttgctgggaatctgatcattcttccaggctttctgccttcgggtcttttttgtggtttagtttttcgttttgtttttgagagacagagtctcactcggtggcccaggctggagtagagtggcacaatcttggctcactgcaacctccgcctcccgggttcaagcagctctcttgcctcagtttcccaagtagctgggactacaggtgtgcaccatcacgcccagctaatttttgtattttttagtagagactgggtttcactatatgttggccaggttggtctcaaactcctgacctcaggtgatctgcccgcctcggcctcccaaagtgctggaatcacaggcctgaaccaccgcgcctggcctgttgtttgtttttgagagggggtctcactctgttgtccaggcttgagtgcagtgttgcaatctcagcttaccacagcccccaacttcccagactcaaacaatcctctcacctcagcctcctgagtagctgggactacaagcacatgctaccacaccctgctagtttttgtatttttagtagagatgggggacgggggggcctcactctgccacccaggctgccctcgggtcttttatgatcgcatctcctcctccttacaggctgcagccttggatatagccatgattaaaatggtcgccccgtccatggcctcccgagtgattgatcgtgcgattcaggtgagcacagaccagacagttggcttatttgaaccatcaatactagatgccaaactctcctatcttcagccgcccagcctcccatagaccctggcagatgccctgtgtcacccactcaccatgcatgcaactttccttttcctcttcagaatgacccagcaaggtgggaggtgccatcgtacccccattttgaatgtgaggaaacaggcacagaaaagtgaagtgacttgtccaggtcactgagcttgcaagtagctgacctcaaattcacatgaacttgggttttcataagcccagagcccaggctctttcccatgcaggggggccgcctccttagatcctaacccccggccccagcacagggcagaaggcacctgcagagtgggcctggggagtctggaggccgtgggatggcaggtgtggccccatggaagccctctggaatattagtgattgtatcacataggtgccacagggaagtccgggaagatggttgttatgggccatcaagagcaggctatcattcctggggctctcggagacaagggctgacccagggccgcctccctccactctgtgtctgccaggcctttggagcagcaggcctgagcagcgactacccactggctcagttcttcacctgggcccgagccctgcgctttgccgacggccctgacgaggtgcaccgggccacggtggccaagctagagctgaagcaccgcatttagagccttggggctgcagtggctcaatgtcctggctggtccagctgtgcccagatctgtcactgatgtgcctcgaaagatccggtgtttgtggctcctgcaccctgctcagcagctctgtcccgggacagtcagggtggactcaatctttctggttctccacagaagacgtctctgcaagaagcctggagtctgtttcaggccaggaggaggggatttgctgagggccaagggggttctgggacagagtctggaaagctggtcttcaggctctcagtcccaggctgggcaggcacggtcacttcacttcagcctttcagtccctctctctctgcctgtgggaatctggacacattttgggaggcctcccaaggctgtgggacgtgcttgctctggcagctgcagggttcctgtctggcctccctggtgagcagaggggcggccacggcgggcggtggcctagagacccaggacctgggcgcctgggaaaatggaatgcaacccacattgtaaagccactggcatctgattatctccatttgaacacacagcacagaacaatcatttaaatgttattttggaaaggggttttggggacacagaagaataagtaaacacatctcggaggctttgtgga

SEQ ID NO: 11967 - DNA, 43391 bp, Homo sapiens
gcaaatttccaacagcatccaccctggcagtacagcgagtccgtaggaactggtatggtaattttcctgagctccctaaaccccagcatgtatcaatgtattccacttttgcatattttgcttcctatagaatgggaggtacagaatcgtatcccttctggaactatattaaaggccttgatggaaggtggtgaaaatgggccctggatgagatttatgagagcagaaataacagcagagggttttttacgagaatttgggagactttgctctgaaatggtgagtggtaaacatacctacatttccatatttttctttttgccttgagtagtggttgcaacattcatgtataagttagttaaactgaaaataaagtgaaacctaataacccattacatgttttaaagttatttcttaggccaggcgcagtggctcatgcctataatcccagcactttgggaggcccagggggtggatcacctgaggtcaggagttcgagaccagcctggctaacatggtgaaaccccgtttctactaaaaatacaaaaaattagctggctgtggtggcgcacatctgtaatcccagctatttgggaggctgaggcaggagaattgcttgaacctcaggggtggaggttgcagtgagctgagatcatgccattgcactccaacttgagcaacaagagcgaaactgtctcaaaaaaaataataataaagttatttctttcacccctaggtgttcaatgttcaattcatatatgaataactaaaaatattcttagccaggcgtggtggctaacacctgtaacttcagcactttgggaggctgagacaggagaagtgtttgaactctggagtttgagaccagcttaggcaacatagccagaccttgtctctactaaaaatcaaaaaaattagccaggcatggtggtgcacacctgtggtcccagctattcaggaggctgaggcttgagccctagggattgaaacttcagtgaaccatgaccgtgccactgcactccagcttgggcaacgtaacaagactctgtctcaaaaaaaaaaaaaaaaaaattctttactaagttcctccagcatatatttttttaatgttttctggtgtattataaaggatgttatgaaggatacgaatgaacagccagatgacaagatacctgggggcaaaggttttagagccactgtgccctttccaggcctgccaccctcctcccagcacctccatgcattcagcaacctgaaagctcccctctaatagatactaaaacaggagctgtctacataatggctttgataaaaaagcttttttaaagcaataataatattgaacattttttctgtactgtgcactgttctaagctctttatataactcatgtaaccacaatagctctactaaaatataatttaaaatatagtaagaaaagttctgtaggtagatggtgatgatggtgatggttgcacgacaacacgactgtacttaatgccactgcactgtgtacttaaaaatggtcgagtgcagtggctcacacctgtaatcccagcattttgggaggccaaggagggcggatcacctgaggtcaggagttcaagacaagcccggccaacatggtgaaaccccatctctactaaaaatacaaaatttagccaggcgtggtggtgggcatctgtaatcccagctacttgggaggctgaggcaggagaattgcttgaatctggggggcagaggttacagtgagccaggatcaagatcacaccactgcactccagcctgggtgacagagtgagactccatctcaaaaacaaaaacaaaaaaaggttaaaatggtaaattttgtgttacatatattttccacaatttatatatatatatatatataaacatatatgtgtatatgtaatagtaaactttgaaaacattatgcaaagtgaaagaagccagtcaaaaaagactgcatggtgtatgattccatctgtgtgaaatgtccagaataggcaaacccatagagatagaaagtagattggtggttttctagtacaaggagactttgggggaaatgaggagtgactgttaatgggtacggtttactttttttttttttaattttttttttgagacacagtctcactctgttgcccaggctggagtgcagtggagcaatctcggctcactgcaacctctgcctcccgggttcaagcgattctcctgcctcagcctcccgagtagctgggactacaggcgtgtgccaccagctccagccaatttttgtatttttagtagagacggggtttcaccatgttggccaggatggtctcgatctcttgaccttgtgatccgcccaccttggcctcccaaagtgctgggattacaggcgtgagccaccacgcctggctggtttgctctttagagtaatgaaaatgtcctaaaattgatggcagtgatggttgcacaactttgtaaatatattaaaaaccattgaattgtactctttaaataggtgacttgcatggcatgtgaattagagttcagtaaagctgttctaaaatctgtgtgtgtatatgtatatataaaacagcagacttgcctttgcagattttgaaatgtgataatataagagttttctttctttctttctttctttctttttttttttttttttgagacggagtcttgctctgttgcccaggctggagtgcagtggcatgatcttggctcactgcaacctccgtctcctgggttcaagcaattctcctgcctcagcctccccagtagctgggactacaggtgcgtgccaccacgcctggctaattttttgcatttttagtagataaggggtttcaccatgttagccaggatggtctcgatctcctgacctcgtgatctgcctgcctcagcctcccaaagtgctgggattacaggtgtgagccactgcgcccagccttataagagttttcaaaacccacacagattgaatttaaaaacaagaaaaaaattgatcagaaactaaagttcataatggtgatactgaggcaatataaaaagcattaaatgacttctcaatcattaaaaattaaattacatatacttcatatacttttagatttcactgtatcctcttatgatatgctgttttttttttcaactagcaatccatgagcagaataaagaactcatttaattgtaatattgatataaatagctccattccctactgtgttgctcaggctagagtgcaatggcttgatcatagctcactgcagctccaatctcccaggctcaagccatcctcccacctcagcctcctgagtagctgggaccacaggtatgtgccaccaagcctagctaagttaaaaaaaaattttttttagatctcactttgttgcccaggctggtgtcaaaatcctgagctcaagcagtcttcccacctcagcctcccacagtgctgggattacaggtgtgagccactgtgcccagcctataactctagtcctggataacttttaaaaaccttatatgagagttcagcacaggggctgaggaacacagttcctgcaggcagcaagctatgagcctgggctcttgtagcagagagcagaaggacgccaggaataagcattttttttttctgttggccatgagtgtttgtcactcttaatgattgctgttctcctgtgccctctcctgttcttagttaaagacctccgtgcctgtggactcatttttctctctgttgaccagtgagcgagtggcaaagcagttcccagtgatgactgaggccataactcaaattcgggcaaaaggtcttcagactgcagtcttgagcaataatttttatcttcccaaccagaaaagctttttgcccctggaccggaaacagtttgatgtggtaagcttgagctaattgaaaaccattggaacagaatctgtgccctcgcttcagggtgcaatgttaaatgctatcttccagcaggtcttgagtgagggagtttttccttcagccacttgactaagttaggtttaaatgcaatatgttgaaaacagaccctttaagatatcactgtgttcttagcaaggtcagacatttatggcatttgattactggttgacacttcagctttacattctaaattcgaaccttagtcttcatataacacaagcatctctgtcagccctcatatcgtaatggatcctttggccttttctaagaccaactatgttgccttctatttctgtgacgttagttcctagaccagtgctgtccaataaaattttactgccttcctcggcctgatttacttccatactaaatccatctgctccatgtgtgtatcccaacctgtcatgtgataaacctatcgttttgacatgcttggctatatttgggtactttacctatttatttatttttatttttttattttgagatggagtctcgctctgtaacccaggctggagtgcagtggcacaatctcagctcactgcaacctctgcttcccaggttcaagtgattctcatgcctcagcctcctgagtagctggaattacagatgtgtgccaccatgcctggctaatttttatatttttagtagagacgggggtttcaccatgttggccaggctggtctcgaactcccaacctcaagtgatccacccacctcagcctctcaaagtgctgggattacaagtatgagccaccgtgcctggcctatttatttttttatatatatatatatatatatttttttttttgagaccatctcactctgttgcccaggctaaagtacagtggcaccatctcggctcactgcagcctccaccttccaggctcaagcagttctcctgcctcagcctcctgagtagctgtgattacaggcatgcaccaccacccctggcaccaccacccctgaatttttagtagagacagggtttcaccatgttggccaggctagtctcgaactcctgacctcaagtgatctgcccacctcagcctcccaaagtgctgggattacaggcatgagccatcgtgcctggcccctatttgggtactctctttttttttccttgagagaaggtctctctctgtcgcccaggttggagttcagtggcgcaatctcagctcattgcatcctccacctcctgggctcaagcaattctcgtgcctcagcctcctagtagctgagactacaggtgcatgccaccacgcctggctagtttttgtgttttttatgaatattagagactgggtttcaccctgttggccagggtggtctcaaacttcagacctcaagtgaccaacccacctcagcctcccaaagtgctgagattacaggcatgagccactgtgcctggccctatttggatactttaaaaatgtttgtttttgtcttataaccaacagcagtgataattccctttagaaactccaaagcccagattggcagttgatcttccagcaccttttagagttgtgatggatcagaaggacccttcccctggcccattcctccaaggatattctgagtcagtgcaaaagggaacagctcatgaaatatagtgagagtcatggtagcctctagaacacatcagattaaatttctctgataactcaagtattggacattttgctaccagagcccctttctgattctttccatctttggaagagctacttttgctggactccaggaagtggcatattaccttagccctacatctgcctatgcctgggtgtatttgtacccttcgttgggccagtgagattaaagattttcaactctgcctacacatcacatgacctgggagtttgtaaagatgctgggtctgtttccctggaggctttcattgagtatgtctagttgggatccaggcatgtgtatttcgaaaaagctccacaggtgattctgccttgcagctggggtgagataccccaagacgcagtgagggacttcagattctgtccatgcttttctcttatcagacagcctctgtcatgcttaccttgagaaggaggcttcccctccatcttcctgggatagagccttgataaataaaatcatttttatctgatctacatttggaaaaacactgaccttgttcccacagttcctgctttgccaagaaagtaatagaagccctgaataagttcatgccatcatgtgcaaaataagaaagagaaggctagagatcttatcaaataaatcttaagaatttattttacttcccccagatgtaattcacctagtgagaggagccgaatgcttcctggaactttgccccatcccccccaattccctccactctcctagctcttgtctcagccagtacagctctgccacttccatctggtacgttacatcgactggtgtctgaaacaccctgcttctgtacttctcactattgacgttttctttagggtagcctcttagactttttttttttagctcattcaggtccttaggagacaagagaaagtagaaaggtccagtttattccagacatttatttacctgaaagggcagttctcacccaacccagaatgcaagtgtagggtagagagaggggccactgggtttgtccttggccttggagagcttgggtcattccaagtggcaagtcagagatttagttctgttcttagggcagatcagagggtattggttataggctatgtggctataggagattgggcccactctataggagattacgccctggggacactgtaaaaggactttcggggaatcagtggatcagagacagcctgacactgagaaggctttcccgtgttctcctgaactctcaccagcaccctccacccattacggatcagatatgtggctgaagcaaggtcgtcagagtacaggagcctcttagcatgtcaggaacagtgtcagccctcccatggaatttctgtctaaatggagtatggatgggtttttaacctctgaaataaacactaagttcgtatttattttatacctgtaatagtgtcttctttctgcaaaaaaaaaaaaaaatggcgaaatgctttccgtcaaactgacatgtacagcttttcttctgctctgtttagccccaagatgtgacattagccaaatgctttgtcattttggaacccacttaagtttcatttaagtttcacaacttactgagctaagataggtacgatgactattaatattattcccattttattgatgatggcactgaggcccattatggctttgctcgtttgcacagggtcacagtgtctgaaacagacactttggtttctcgagtttgcccccacgttgtaacccagtattgtcaaattactcaatgtaagaaggcaacatcattttatatcataacactcttaaattacttgttataataaatctcaactgtccttcttatgcttttcctctcaaaaagtttaccagcatgcatgtgggagctccacctttcgggacattcatctctcattcctgtccctccatcagattgtggagtcctgcatggaagggatctgtaagccagaccctaggatctacaagctgtgcttggagcagctcggcctgcagccctctgagtccatctttcttgatgaccttggaacaaatctaaaagaagctgccagacttggtattcacaccattaaggtaatagtcactaatttttgaactccctcccatgcaccagccactaatgcaatgtttctctgtaatctttttacatttgtagctctagctttccttagggtttccccctgtgtttccatagtcatcttattttgtgttaattatgaaatctatgtgactagctgcttgtattttcaatgggaagcaagacaaacaggtactgcgaaggcaggttgagaaaagagatgggaaaggaggtgaatggcaggcttaagacctttgtgggggtgttcacactgtcctcatgatccagtgatgctgccttaagtggggagccagtggccaccagccatgcaggccatgcagctcactgctgtaaagcacgagaagccatgtgagggggtctcatgccaacttttttctattctttttttttttttttctcatacagggtcttgttatgtcacccaggctggagtgcagtggtgcaatcatagctcactgtagcctcaacctcctgggcttaagtgatcctcctacctcagtctcctgagtagctgaccagaggcatacaccaccacacccgactaatttttgtattttttgtagagacagggttttgccgtgttgcccaagctggtgtcgaactcctgggctcaagcgatctacccaccttaccctcccaaagtggtgagattacaggtgtgagccaccatgcctggcttctattcttctatgtttgggttttcatcgtcgagctgatgggcctgtagggtaagagcaaacgttgtaacataatcttctttcttcttggcacaagagggtattgtgaaatttttttttttttttgaaacagagtttcactttgtcacccaggctggaatacagtggcatgatcttggctcactgtaacctctgcctccctggttcaagcaattctcgtgtgtcagccccctgagtagctgggactataggcgcacgccaccatgcccggttaattttttgtattttagtaaagacagggtttcaccatgttgcccaagctggtctcaaactcctaagctcaggaaatctgcccgcctcgcctcccaaagattcacggcctcaccacgcccggccgtgaatcttttttgagatgaggtcttgctaggttgccgagggctttgaactcctggactccagcagtcctcccacctcaggcttcccaagtggctggaactgtgggtgcacaccatcatgcctagctgttttgtgaaccgttgaccagtgcttctctctgcaggatagaaagttcagtgtggttaggagttaaatgggaagaggaaatgcattctactgctccctcattagctaaatatcctgggttcgaaggccttcctcagagtactgacttctttgataatttccctctaaaggactaccctttgtaaaaagtaaagtagaggttcttctttaaagactttccttattatttaattaggaataaatagtaacttcttttagaagcaaaatttatttaaagacctgtgctaaattttttgttgttgttgttgttgagacggagtctcattctgtcgcccaggctggagtgcagtggtgcagtcttggctcactgcaagctccacctcctgggttcacgccattctcctgcctcagcctcccaagtagctgggactacaggcatccactaccacgcccagctaatttttttgtatttttagtagagacagggtttcactgtgttagctaggatggtctcgatctctcgatctcctgacctcgtgatacgcctgcctcggcctcccaaagtactgggattacaggcgtgagccaccacacccagctgacctgtgctaaaattttttttttttttttttttgagatggagtcttgctctttcgtccagtccagactgcagtggtcctatcttggctcactgcaagctccatctcctgggttcgcaccattctcctgcctcagcctcccaagtagctgggactacaggcgcctggctaattttttgtatttttagtagagacggggtttcactgtgttagccaggatgatctcgatctcctggcctcgtgatccacccgccttggcttcccaaagtgctgggattacaggcgtgagccaccgcgcccagctatgctaacatttttaaatatttgctagctgcaataaagaaattaatgtattttatgtttttagttcctgcaatttagtctaaatatttgccttggcctgctaatactggtccaagcaagtattgggtcatagcttgttcctcttctttatttgaaggtgtttttatttttctcagcattttacaagttacttccttcttcctttgttttcctctacctttgcctcttttaaaaagttttaagttgctagccaattaggacaaatacagaatgtaaagtctcgttccagccaatggaaactggacacagcagtaggatggatgcgtcagcttataaatgaccctgtctcctttgtttggtgtactgttgtggcaaaactgctggtgagtgtaccctttctgcaggaagtaaaaatggccttgctgagtaaattaaatttatgttcaagtgctatgtctttgtggcaccggggaacaaacatttcagacacctcctaggaaacagataggagcccctgaggccaggattgactgctggcacctgttcaatatatattctctgcacctgtactaccatgaattgtaaaattaaaaatatatacgtgtatatattctcaacatcctgtgaaaggaagggaaaaataacaacaacaaaaaatatacatctacatattctctctgaaaccaggttaatgacccagagactgcagtaaaggaattagaagctctcttgggttttacattgagagtaggtgttccaaacactcggcctgtgaaaaagacgatggaaattccgaaagattccttgcagaagtacctcaaagacttactgggtatccagaccacaggtatgtgggcttctttcatgttttggtagctctctccaaggcgaaggttttggtctgtttctcacttttcaaccctaatggaatgggctggagacaaagaagctttacagtgaggaaaatagccattgggcctggtgcatcggagcactgctttcagttttgcttgggaaaaagcattaacttccctatttatgcatctccaaaagtgtacctatcccactcttacacctgagagtgtggtatggcagtggttgcctgctttcaacagggagaggaacttggggactgcagtgtgtgctcagaggattttacagtttctaatgctttgagacgacagcccattttgtgaagacgacttagaagttacatcggcaggcgggtgcggtggctcacgcttgtaatcccagcactttaggaggccaaggcaggtggatcgcgaggtcaggagtttgagaccagcctggctaacttggtgaaaccctgtctctactaaaaatacaaaaattagctgggtgtggtggtgggtgcctgtaatcccagatactcgggaggctgaggcaggagaattgcttgaacccaggaggtggaggttgcagtcagccgagatcgtgctactgcactccagcctgggtgacagagcaagactccatctcggggggaaaaaaaaaaagaatttgcattgctgaccggggcgtagtggctcacttctgtaattccagcattttgggaggccaaggcaggtggataacttgaggccaggagttcgagaccaggctgaccaacatggtgaaaccttgactctactaaaaatacaaaaattagctgggtgtggtggtgcacaactatagtcccagctgctctggagactgaggcacaacaattgcttgaacctgggaggcagaggttgcagtgagccaagattgtgccactgcactccagcctgggtaacagagtgagactccatctcaaaaaaaaaaaggaaaagaaaaaaaaaaagggctgggcgcagtggctcatgcctgtaatcccagcactttgggaggctgaggcaggcggatcacctgaagtcaggagttcgaggtcagcctggccaacatggcaaaaccccatctctactaaaaatataaaaattagctaggtgttttggcgggcgcctgtaatcccagctacttgggaggctgaagcaggagaattgcttgaacctgggagactgaggttacggtgagctaagatagtgccactgcaggcctgggtgacagagcaagactccgtcccccccccaaaaaaaaaaggaaaaataatgttgctgggtgtggtagctcacccctgtaatccccagtactttgggaggccgagatgggcggatcatctgaggtcaggagtttgagagcagcctggccaatatggcgaaaccccatctctactaaaaatacaaaaattagccgggcatggtggcacatgcctgtagccccagctacttgggaggctaagacaggagaatcacttgaacctggaaggtggaggttgcagtgagctgagatcatgccactgcactgcagcctgggcagcagagcaaggctctgtctccaaaaaaaaaaaaaaaagttgcatgattttaaaacgcaacaaattgtctccatttcttggagacaagttttctctttcctccttcacattcccccctcagaaaaccaggtgccttgtgtgctttagaggacacttttgggccaggggtggtggctcatgcctgtaatcctaccactttgtgaggctgaggtgggcagatcacttgaggccaggagtttgagaccagcctggtcaacatggcgaaactccatctctactaaaaatacaaaaattagccgagtgtggtggcgcatgcctgtagtcccagctactggggaggctaaggcagaatcgcttgatcccaggaagcagaggttgcagtgagctgagatcacgccactgcactccagcctggacgacagagggagagtccatctcaaaaacaaaagaaaacaaaaaagaagacttacaaaattttttaaattaaattaaattaaattttttttgagatggagttttgcccttgttgcccaggctggagtgcaatggcatgatctcagctcactgcaacctccgcctcttgggttctagtgattctcctgcctcagcctcccgagtagctgggattacaggcacccactaccatgcctggctaatttttgtatttttagtagtagagacggggtttcaccacgttggtcaggctggtctcaaactcctaatctcaggtgatctacccgccttggcctcccaaagtgctgggattacatgagcctccgcacctggccaaagaagacatttttcccaggtaataaaggcttcacccacttgctccgtgaaaaaggcttttattgatggagtttcatgttaggatgttttccagcaattggattattggtagtggcctctgcacagctgaggcgcccactctggccagccagaagaactcaggccgagttctgttgcttgcctactcttctaaccaagtgaaatcagtctatacccagggttcagtcttcttatggagctgagaatgaattagtttcacctcagccaggatcctgcaagggagccacagaattcagcctagtgcagtgggaaattacatctcatgaaagcagctttgggtcaggccgaaggcctctgtgtcactcctttcagctgtcccagcagtgtcaggcagagggacgtgcaagggcacctttcatcctcaggcttaaagcattccatttggcaagatgggttgccatggctgcgtttgtgcttgataaacagaatgaacatgtttttattcatggagcaggagctggcaggaaggacaaaattggacacctgcacaaactgagaaaattactgtggtataaaatgaatggcctttgacaaactgtagtggcatgtgatcctggacctgagttggcggagtgtagacctgggactcagtcactcctagtaggcagagaagaggtacttttcttgcactgcatggcagatgaggatattttgaagcccaaatgcagaactcattagaaagaaagaatgtctgctcagatctgtcctccagggctggtttgagttttctttgttttcaaacttgcaggcccattggaactacttcagtttgatcacgggcagtcaaatccaacttactacatcaggctggctaatcgtgatctagttctgaggaagaagcccccagggacactccttccatctgcccatgccatagagagggagttcaggtaagttttcagggccaggggagcacttgcccactagcctccactgtgcacaagctcagccctaaactgaaaagtcagcactccataaaaataccccaagacatttaaaactacaattatgggccaggcttggtgggtcacacctataatcccagtgccttgggagaccgaggcaagaggatcattgagcccaagaggtcaagaccagcctaggcaatgcagcaagaccctgtttctaccccccatccccccccaaaaaaaagcctgggtgtgctggcatgaacctgtagtcacacctactcaggaggctgaggtgggaggattgcttgagctgggaggttaaggctacagtgagttactgtggcatcattgcactcccacctgggagacattgtgaaaccctgctccaatcccccaaaaagccaaatgtaaattagaactattctggaaaacaatatgatacaatttattaaaagcctcagcgttttcatactttcagacctaataattccaattctggggctctgtcttaaagaaataattctaagtagggggaaacagctgtatgtattaatatgctcaccataaagttgtttaataataagaatttggaaggccaggagcagtagctaccatagtcccagcactttgggaggctgaggcaggtggatgacttgaactcaggaattgaagaccagcctggacaacatagtgaaaacctgtctctaccaaaaatacgaaaaattagttgggtgtggtggcacatacctgtagttccatctactcaggaggctgaggtgggaggatctcttgaacctgggaggtggaagctgcactgagccgaggtgggcaccactgcactccagcctgggtgacagagcgagactgtgtctcaagaaacaaacaaaagagtttggaaactacttaaatatactataatctgtaccataatcaggaaataattaagtaaaccttggtatatatactgtcgcaatgacagtaatagtaatagctaacatttatcgaatggttaatatgtgccaggcactaaaataaatgcttcgaatgtctgttactgcagagcatcctcacaactctatgatatgttacaattatagtcctcatttacaactgggaaaagtaagccttaaagaaaccaaggcaggcagatttgctttgagctcaggcgttcgagcccagcctgggcaacatggtgaaaccctgactctacaaaaaatacaaaaattagccgggtgttggtgacttggacctgtagtcccagttacatgggaggctgaggctggagaatcacttgaacccaggaagcagaggttgtagtgagctgagatcgtaccgctgcactcacaaagtgagaccctgtctcaaaaaaaaaaaaaaaaaaaaattaaccagcatacccagggtcataaaactagtaagcaagtgctagagtctggctttatagccagtctgtgagatttcatagctcacctttaatgattatgctgttattgcagctaataaaagtatgcctataataacaaatgtgtatgataaaattttaagatagtaaaggcagatacaaactgcatatatagtattagctgattttttttttttttttaggcagagtgtcactattgtccaggctggagtacagtggtgtgatgatacctcactataatctcgaactcctgggctcaagtgattctccgcctcagcctcccaaatactacaggcacatgccatcatgcctggctagttttaaaaatttttttgtagagatggggcctcactatattgcctgaactcttggcctcaagcaatcctcccaccttggcctcccaaagtattggggattacaggcatgagccagcgtgcctggccaaggtttttgattattaattcaatttaacaaaaatgttgttactcagatattttatttcatcttgttttagatttggtaagttgtaatttctaaggagtctgttcatatcacctaagctgttgaatttatgatttataatattcccttactatccttttaatatacgtaggatctatagtgatatcctttttttttttttttttttttttttttttttgaaatggagtcttgctttgtcatccaggctggagtgcagtggcatgatcttggcttattgccacctccatctcccaggtccaagtgattctcctgccttagcctcccaagtaacagggattatagtcacacgccaccatgtccagctaatttactatttttagtagagatggggtttccccatgttgaccaggctggtctacaacccctgatctcaagtgattcacctgcctcggcctcccaaagtgctgggattacaggcgtgagccactatgcccaccctagtgatatcctttctttatcactgctggtattaactgataatttgtattctctctctcttgttagtctagctagggatttatcaattacattgatctgggaaccacagtttggttttgttacttttttctattgtttgttttgttttgaggcggagtttttgctctgtcacccaggctggagtgcagtggcgcaatctcggctcactgcaacctctgcctcccaggttcaagtgattctcctgtctcagcctcctgagtagctgggattacaggcatgcgccaccatacccaggtaatttttgtatttttagtagagatagggtttcaccatgttggtcaggctggtccgaactcttgacctcgggtgatccgcctgccttggcttcccaaagtgctgggactacaggtatgagcctctgcgcctggcctgtttttcttttctaatacaagcatttaaatatataacttttaaggctgggcgcagtggctcccacttgtaatcccagcactttgggaggccgagccaggtggatcacctgaggtcaggagttcaagaccagtcttgccaacatggtgaaaccctgtctctaataaaaatacaaaagtaagccaagtgtggtggtgcacacctatagtcccagccaatctcgaggctgaggcaggagaatctcttgaacccaggaggcagagattgcagtgagcggagattgcagtgagccaagattgtgccatggcactccagcctgggcaacataatgagactctgtctcaaaaaaaaaagaaaagaaaaaaagaagtgcattgtttaattttcaaatatttgggggtttttttcttgatattatatgtgaatgaattctagtttaattccattgaagtctgacaaataccctgcaagatttcaattttttggttttttttgagatggagtcttggtctgtcacccaggccgtagtgcagtggtgcgatcttggctcactgcagtctccacctcctgggttcaagcaattctcctgcctcagcctcctcagtagctcggactacaggcacataccaccatgcctggctaatttttgtatttttagtaggtatggggtttcaccacttcggccaggatggtctcaatctcctgacctcatgatccacctgcctcggcctcccggagtgctgggattacaggcatgagtcactgcgcccggccttttgtttgttattttttgagatgcaggtttgctcttgtcgcccaggctgcactgcagtggcatgatcttggttcattgcaacctccgcctcctgggttcaagtgattctcctgcctcagcctcctaagtaggtacaattaaaggcatgaggcaccatgcccggctaatttttgtattatttttattattttttgagacagagtctcgctctgttgcccaggctggagcgcagtggcacgatctcggcccactgcaagctccgcctcccaggttcacgccattctcctgcctcagcctcccgagtagatgggactacaggtgcccaccaccactcctggctaattttttgtatttttagtagagacggagtttcaccatgttagctaggatggtctcgatctcctgacctcgtgatccacccgcctcagcctcccaaagtgctgagattgcaggcatgagccaccaagcctggccctaatttttgtatttttaatagaaatggggtttcgccgtattggccaggctggtgttgaactcctgacctcaggtgatccgcccgcctcggcctcccaaaatgctgggattataggcatgagctagtgtgctgggctagattttaatttttattgaaattttttgagatttattttatggaccagcacatgacttatcttggcgaacatattgtgtttacttgaaataatgtgtattttgcaatatctgagtgagtggtatacaaatgtccatcagatcaagttggtagtgggttcagatgtatgtctttagataaatctatttttgtctaattctatcattactgagaaaggagtgttaaaagctcaactaagacttgtggatttctccatttttttctctttaattttgatcatttttacttgatatatttcgaagctctgttgtttagcacatacatacttatgattgtaatatctttctgatgaacttgcagttgtatcattttcaaatgtccctctttatctctggtggtacactgtcgtaaaggctgctttatttgatattaaagtagcctcaccagctttcttatgcttagtgattgcataatgcttccatttccatccttgtttttgcagcctatctatgtttatatattcagcgcatatctcttgtagacatcatataattaggtcatgtttttctgtccaggctgaaaacatctgtcttttatttttattttatttcttttatttattttattttatttttttttgagatggagtctcgctctgtcacccaggccggagcacagtggagcgatcttggctcattgcaacctccgcctcctgggttcaagtgattctcatgcttcagccacccaagtagctgggattacaggcacgcgccaccatgcctggctaatttttgtatttttagttgagaaagggttttaccatgttggccagggtggtcttgaactcttaggctcaagcagtcctccccctcagcctcccaaagtgctgggattacaggcaggagccaccatgcatggccaacttctgtcttttaattggaatctattcatcttttgagtttaatgtaattattgatatgtttgatttaggtctacaatttcaccattggttttttgtttgtcccatcatttttttgttcttacctacttttgggtcaattgaatattttttagaatttcattttaatttatgtaccatttttaattcagaaaagtaatttcaggccaggcacaatggcttatgcctgtaatcccaggactttgggaggccggggcaggtggatcacctgaggtcaggaatttgagaacagcctggccaacatggtgaaaccgcgtctctactacaaatataaaaattagctggttgtggtggtgcacatctgtaatcccagctactcaggaggctgaggcctgagaatggcttgaacctaggaagtagaggttgcagtgagccaagatcgtgccactgcactccagcctgggtaacagagcgagactgtgtctcaaaaaacaaaacaaacaaacaaacaaaaaacaaagaaaagtaacttcaagaaaatctcatcaattcagccagcaattttgtttattttcatttgtccttgcaggattatgaaagcccttgcaaatgctggagtacctgtccctaacgttcttgatctctgtgaagattcaaggtaaagttcagatgtttttgctattgcactttcaagctacaggagagaaaagcccatatgctaacacaaattccaatttgttaaagacaaataaaatttgggtaggagggaaaagaaactttatcacaacctctcccagaagttctcagatatttaagttatcctgcaagataagtatatgcctgctttagggataattggtagaaaacatcttttttaacattcaaaaaatacatattaatctagtttcatgttgcttgtctttatttatttttttaatcagagtctttctaaactgttttgttttgtttttttgagacggagtctcattctgtcacccagactggagtctcattctgtcacccagactggagtccagtggcctaatctcggttcactgcaacctctgcctcctgggttcaagtgattctgctgcctcagtctcctgagtagctgggattacaggtgccccctactatgcccagctagtttttgtaatttttgagtagagacagggtttcgccatgttggccatgctggtctccaactcctgacctcacgtgatccacccactttggcctcccatgatgctgggattacaagtgtaagccaccgtgcccggccctaaactatttatttatttatttatttatttatttattttttattgataattcttgggtgtttctcacagagggggatttggctgggtcataggacaatagtggagggaaggtcagcagataaacaagtgaacaaaggtctctggttttcctagcagaggaccctgcggccttccgcagtgtttgtgtccctgggtacttgagattagggagtggtgatgactcttaacgagcatgctgccttcaagcttctgtttaacaaagcacatcttgcaccgcccttaatccatttaaccctgagtggacacagcacatgtttcagagagcacagggttgggggcaaggtcacagatcaacaggatcccaaggcagaagaagttttcttagtacagaacaaaatgaaaagtctcccatgtctacttctttctacacagacacggcaaccatccgatttctcaatcttttccccacctttcctgcctttctattccacaaagccgccattgtcatcctggcccgttctcaatgagctgttgggcacacctcccagacggggtggtggccgggcagaggggctcctcacttcccagtaggggtggccgggcagaggcgcccctcacctcccggacggggcgggtggccgggcggggggctgacccccccccacctccctcccggacggggcggctggccgggcagaggggctcctcacttcccagtaggggcggccgggcagaggcgcccctcacctcccagacggggcggctagccgggcggggggctgacccccccacctccctcccggacggggcggctggccgggtggggggctgaccccccctcctccctcccggacggggcggctggccgggcagaggggctcctcacttcccagtaggggcggccgggcagaggcgcccctcacctcccagacggggcggctggccgggcgggggggctgacccccccacctccctcccagacggggcggctgtccaggcggggggctgacccccccacctccctcccggacggggcggctggccgggcggggggctgacccccccgcctccctcctggacggggcagctggccgggcggggggctgacccccccgcctccctcccggacggggcggctggccgggcagaggggctcctcacttcccagtaggggcggccaggcagaggcgcccctcacctcccggacggggtggctggccgggtggggggctgacccccccacctccctcccggacggggcggctggccgggcggggggctgaccccccgacctccctcccggacggggcggggggctgacccccccccccacctccctcccggacggggtggctgcccggcggagacgctcctcacttcccagatggggtggctgccgggcagagaggctcctcacttctcagatggggcggctgccgggcggagggcctcctcacttctcagacggggcggttgccaggcagagggtctcctcacttctcagacagggcggccgggcagggacgctcctcacctcccagacggggtctcggccgggcagaggcgctcctcacatcccagacggggcggcggggcagaggcgctccccacatctcagatgatgggcggccaggcagagacgctcctcacttcctagatgtgatggcggccgggaagaggtgctcctcacttcctagatgtgatggcggccgggaagaggtgctcctcacttcctagatgggatggcgtctgggcggatacgctcctcactttccagactgggcagccaggcagaggggctcctcacatctcagacgatgggtggccgggcagagacgctcctcacttcctagatgtgatggcgtcacttcctagatgtgatggcggccgggaagaggtgctcctcacttcctagatgggatggcggcggggcggagacgctcctcactttccagactgggcagccaggcagaggggctcctcacatcccagacgatgggcagccaggcagagacactcctcacttcccagacggggtggcggccgggcagaggctgcaatctcagcactttgggaggccaaggcaggcggctgggaggtggaggttgtagcgagccaagatcacgccactgcactccagcctgggcaccattgagcactgagtgaacgagactccatctgcaatcccggcacctcgggaggctgaggctggcggatcactcgcggttaggggctggagaccggcctggccaacacagcgaaaccccgtctccaccaaaaccagtcaggcgtggcggcgcgtgcctgcaattgcaggcactcggcaggctgaggcaggagaatcaggcagggaggttgcagtgagctgagatggcagcagtacagtccagcttcggctcggcatgagagggagaccgtggaaagagagggaggggagaccgtggaaagagagggagagggagaccgtggaaagagagggagagggagaccgtggaaagagagggagagggagaccgtggaaagagagggagagggagaccgtggggagagggagagggagaagactattttaaacagctttgtaacatgctttttgagtgtctcttctttcctaatgttttaattatgtaacatttgaaaccttcagaaaaggtgaaagaagaaaaactaatacaatgaatacctgtttacacttcatctagatcaaaaattaaaacattgttaacattttgccacatttattttctgtatatgtgtgtgtgtatacatgtatacttttaacatgtagataatgattttttttggctgaaccttttgaaataagtttcagacagcatgcatctctcaagaataaagacattgaccgggcatagtggctcactcctgtaatcccagcacttaaggaggctgaggcaggtagatcacttgagcccaggagtttgagaccagccagggcaacatggcaaaaccccatctctacaaaaacaaacaaaaaattagccaggcgtggaggtgcacacctgtagtcctacctacttacccggaagattgtggtgggaggatcacctgagcctgggaggtggaggctgcagtgagctgtgatcacatcactgcactccaggctggatgatagagtgagaccctgtctttttttttttcctttcttttcttcttcttcttttttttttgagatggagtctcactctgttgcccaggctggagcgaaatggcgcggtctgggcacactgcaacctctgcctcctggattcaagcagttctcctgccttagcctcccaagtagctgggattataggcatgtgccaccacacccggctaatttttgtatttttaatggagacggggtttcgccttgttggccaggctggtctcaaactcttgacctcaagtgatccatccgcctcggcctcccaaagtgctggattacaggtatgagccactgcacccggccgacattgtttttcataaccacaacaccagtatacctaactaacaattatttaataataatactgaatatctaacccatgttcaaatttccccaatccaaaacatcttttgtaataatttttcaacttgaaacatttgtaatggtaggattttcaaaacaattttttagagtagtaaactggaggctgaggcagatggatcacttgaagccaggagtttgagaccagcctggccaacgtggtgaaaccccgtctctactgaaaatacagaaattagctgggcatggtggcgctcacctggagtcccagctactttggaggctgaagcaggagaatcatttgaacctgagaggcagagtttgcagtaggccaagatcgcaccactgcactccagcctaggtgatagagtgagactccatctcaaaaataaataaataaataaatagagtagtaaactgtttgctagtaatgaccaaaagatggattagtgacatgtcattgggtcaccttagtactgctgggtggtatatacaccactcataccaccaaaaaatgataaaaataacctcaataacaagaagggatacttattgaacccttattggaaccagagaccatgtcaggcactctgtatgtttgttccctaattcatttctttttttaagtaacaaataccctggaagctcccttaattcttgcaattaccctttgaagtatgtatgttttacagattaaaaaacaacaacatggctgggtgcagtggctcacgcctgtaatcccagcactttgggaggctgaggcggatggattacgaggtcaggagattgagaccatcctggctaacagagtgaaacaccgtctctactaaaaatacaaaaaattagctggttgtggtggcacatacctgtagtttcagctattcgggatgctgaggcaggagaatcacttgaacccgggaggcggaggttgcagtgagccaagatcgtaccactgcacttcagcctaggcaacagagcgagactccatctcaacaacaaagctcagagaggtttaataagtctctcagggtcactcttcaactaagagcagagttgggatttaaacctggttccaaccaggtgcagtggctcacacacgtaatcccaacactttgggaggctgaggcagtcagattacctgaggtcaggagtttgagaccagcctggccaatatggtgaaaccccatctctactaaaaatacaaaaattagtcaggcgtggtggcatgcacctggagtcccaactatttgggaggctgaggcaggataatcgcttgaacccaggagaaggaggttgcagtaagccaagatcgcgccactgcactccagcctgggcgacagagcaagactccatctcaaaaaaataaataaataggccgggagcagtggctcacgcctataatcccaccactttgggaggccaaggcgggtggatcacgaggtcaggagatcaagaccatcctggctaacacggtgaaatcctgtctctactcaaaatacaaaaaattagccgggcgtggtggcgggtgcctgtagtcccagctactcaggaggctgaggcaggagaatggtatgaacctgggaggcggagcttgcagtgagccgagatcgcgccactgcactccagcctgggtgacagagcgagactccgtctcaaaaaattaaaaaataaataaataaataaacaaaaaataaaaacctggttcggtgtgactccagaggtccttctctgagccttgctgcttgctacattattacactttgaatccattcctgtggcttacacaaatgaaccagggagaagagaaaagcatgctgtccaagaagcatagatgggtgtgcatgtgtgtgtgtgcacgtgtgtatgtatatgtgtgtgtgcatgtatgtggatcgatccattgcaagagaggatacttctaatgcactgtgcttatgtgaaaggaaaaaggaagtatccagtgctctgggtctgaactcttcaccagctctcaacctgtatacccagggaaagtgacaaagaatagggtcatgactaacagcctgccacattatgactctgatccctgaaaccccttctgtgttcctcccagtgtcattggcacccccttctatgtgatggagtactgcccaggtctcatctacaaagacccttccctgccaggcttggagcccagccacagacgagccatatacactgccatgaacacagtcctgtgcaaaattcacagtgtggatctgcaggctgtgggacttgaagactatgggaagcaaggtgagcaggaggccacgtctcccatgctggttgtttcatcactagtgcttctgcttttaggatctgaatcgttttgggtcgttttgagtattagcacaccaagcgtaaggcagacttagcttcttccttggaaatccagtttagttttaatggaggtgttgctgacttaggcatttgggccttcaataaatccctttatgaactacacagtctttcttccctgcaacttttttttttcattttttctttttttcccttaaatattctgctatccaattccctgcaacttttatctcactagaccatttaaattttttttctgatactgaccataggtatttaaaatgtatttttctccgttttttaccctttcccctaaatattcttttcaacaggaatatatgtattttttgagatgggggtctcactgtgttgcccaggctggtctcaaacttctgggctcaagccatcctcctgtctcagcctcccaagtagttgggactctgggcatgtgccaccgtgtccagtttcaacagggatagtttttttgtttgtttgttttttgagacagggtctctctctgtcgcccacactggagtgtagtggtgtgatctcggctcactgcagcctcaacctcttgggctcaagcaatcctcctgcctctccctcttgagtagctgggactacaggtacgcaccaccatgcccagctaatttttgtatttttagcagagacaggtttttgccacattgcccaggctctacccaaactcctgcgctcaagtgatttggcctcccaaagtgttgggattacaggcatgagcctctgcagccagccctcatgtagttcttaccacatgccaagaatagttctaagggctttacatattttattctcccaacagctctatgaggaccatctcaagatgaggaaactaaagcatagagatgttaagtaacctgcctgagatcacagagctagagaacaacagagctgggtttcatagcctggcagtctggctccagggttcatgtgctcagctaaccactgttgtttagccaaaaagtgatttatgaaaggctattaggaagcacagaagatctttttttttgagatggagttttgctcttgtcacccaggctggagtgcaatggcgcaatctcggctcacttcaacctccgcctcctgggttcaagcgattttcctgcctcagcctcccaagtagctgggatgacaggcacccaccaccacacctggctaatttttgtatttttcagtagagatgcgctttcgccatgttggacaggccagtctcgaactcctgacctcctgcctgcgttggcctcccaaagtgctgggattacaggtgtgagccaccatggccggccacaaggtctttaagaggaccagagatcatacttggagaccatatagctaggaacagcacccagaccacactaatccagccaaagagctggtgacttccaccttggggcagcaggagcatcatgtgggaaattctccagtcataggaacgtgttcaaagacactgcaccacccagtgcagagcatgacaaagggtttcactgcactggtttttttttccgctactttcagaggttgctgaaattgcacaccaagttctaatcctatttcccgcaggggactatattccacgccaggtacgaacctgggttaagcagtatcgagcttccgaaactagcaccatcccagccatggagaggctgatcgaatggctgcccctccatcttccccgtcagcagaggaccacagtggtgcacggggacttcaggtagatgtggtggcagggagagctgaaaaatgacagcaaggatgctccaagggggaattgagcaattggtcttggtgcaatttacagctgggaattattcctattacaaagcacctgtctgtgtgtggccttttcaggcagggtttctcagctctggcactgtgacatgttgaattggataagtttttgtggtgggagctactgtgcattgcaggatgtcaggcatcatccctggcctcaacccactcgatgacagtagcacccctccccacagagtgtgacaaccaaaaatcttcgcagacctggtccagtgttcccagggagggcagcattcctctgttgagacccactgtttgaaagtaaggcagagtctatggccataccaccctgaacaggcccgatctcatctgaaagtaaggcagagtgagggtgccactcacctcccaagaggcctggggatggacattctcactgggtgtaatgaaaggattgaaagagagtgacagggtctctgggggtatgtgatgagtctgtagcacggctaaaatgggaacttcagtatgcctggcgtctggcggcagtgtctagctttatcttatcatctcttgctgtgaaaactgcccgttaggtacttttatagggtagtgtttatagtgttttctgcttcgcagcacctggagacctgcttttgatgcaagcatgccttatttggcttgtcttcttgcccatctggggactcaggccttttattaaacaagactagacagtgaaggctaattttaaagacatttccgtttcttttttttttttttttagacatcgtctcactcagtcgcccaggctggagtgcagtggcgtgatctcagctcactgcctaccccacctcctgggttcaagcaattctcccgccccagcctcccgagcagctgggattacaggtgtgcaccaccatgtgtggctaacttttgtatttttggtaatccaaaaatacaatacatttttagtaatacaaaaatgtgagatggggtttcatcatattgatcaggctggtctcaaactcctgccctcaagtgatctgcccactttggcctcccagagtgctgggattataggcatgagccaccatgcccagccttaaagacatttctttgccttccaaatttgattggcctctcttcattggcttgaccggtgtccctcgctcccggcttcttccgttagccagccacctttggggatccccctgggtctgagagtggacagctgagctttctttgtcatgtggtcatcacgggagcttgaggaacctgcttctgcatcagagactgatggggccaagtgcttcccccacactgccttgaacgtggcatgcagttgggctgcatttgaccccctcctccatcttctttctccacttgggattctagagcacttgcctgacaacactttccttgccagccattgccatgtatttcctttggcggggaagacctcaggtggcctttgtgtcaccagcccacaacagctgctccgtggaccttgtctttgcttctcttggcacctcaacaatccacgaatgtgatcaagtatacagcaggcaggagatatccagtgcagtctgagcaccccctcccctagctatagtgaagtatgatgatcatttaggatgttgcctccaggaaaggcatcctctgattttagagagcgtgctgctgcttattgatcaacacagtcagagatagttctgtcttttgatggatagaagaacatttcttgctagtggagtgaatcagcggtggtgggagcataaactgctgcagctactttgaaaagtagtaggcagtggccaggcacggtgactcaagcgtgtaatcccagcactttgggaggcgaaagcgggcagatcacttgaggtcaggagttcgagaccagcctggccaacatgccaaaatcccatgtctattaaaaatataaaaattacctgagtgtggtggtgcccctgtaatcccagctactcgggagggtgaggcaggagaatcacttgaacccgggaggcagaggttgcagtgagccaagaccgcaccactgcactccagcctgggtgacagagtgagactccatctcaaaaaacaacaaaaaaagaaaagtaatgggcagtaacatggaagatgggaatatgctacaacccatcgtttcttgtaaagaagcatctgctgcagctttgcaccaagagactcaggtgaagatgtttgttttggtcatgcttgtaattataatacatgataaataaagtgtagtttggccatatgttggaattctatttagtgagtaaaataaaccaatttgctgtacataagtcataagtctcaaaaaagataatcgaagtagaaaaaagtttcaaaagggtaatatatcatttatgaaaatttaaaaataattgaaagaacactatatgtggtatataggtacaggtatagataagagaaatatagaaatgtctgagactgatatataccaacttcagggtagcagtaaatctcatttttaaaaaatctgaagcaaatgtaacaaaaaagcacgtacaatatctgttaaatctggaaggtggacacatgagttctgtcattatgtcattctctgtatttttctgcatgcttgatgtttactttttcttttaaataaagcatgcattacagacagccctggcaggaaacagaaagcatgaaagaggctatctggggagagttcaatatagggttatttagttcaatatagcgtggtttagaggaaccgctgaagaacagcgtggagtcccggggccagtaacagtgaggggtcagtctgacagggcaagcatgtgctgtggttattgctactctacaacaaactttgtcagaactgagtggctgtcaacaacgacagcagtcattttgcttatgaatctttgcagtctggggacaggacagcttatttcaaagtagggcggctgtcgggtggggctggatcttctgaagacttgctagcatgctggccctgggcagagaagatattaacagccgggctccttgggcctctctttctgtctctttgtggttcccacatggtctctccagcatggcaacttctgggtaactggactttttttttttgagacaggatcttgcactgtcacccaggctggagtgtagtggcaattcataggctggaacataactcactgcagccaccaactcctgggctcagtgatgctcccaccttagcctcctgagtagctgggactacaggcgtgcactaccacgctcagctaatttttaaatttttttttgtagagataggatcttgttatgttgcccgggctggtcttgaactcctgagcttaagcagtcctccgaaaatgtggggattacaggcatgaaccattgctctcagccctggacttcttacctgggggctcagggctccaaaatagtgtgtttcaagagacagagggctgggcagaagctgtatcacgttttctgacctagtctagtttcaggaatccctcagcatcacttccacgtgtcttatatctgttagaagcaagatgcttcactgggccaagcattagactctaccttttgtgggaggagtgtcaaaggatttacagatctgttttaaaaccatcacagggagggagtaattcccggaacccagagaggctagctctctggggaaggctgcagagaaggagctggggaaataaataaccaggccctttcccatctcctgcttttgattggctgagtccagctggaagccagagggcaagggagcctttggagcacacagcccagggagctcaggcacccgggcacagaggggatgggagggtggggagccaagcctaaagggcaaacagaccacgcagaatccaccctagccggcagttttcttagtgctgtctctattcctcctgcgacttttcaggctcgacaacctggtgtttcatccagaagagccagaggtgcttgctgtccttgactgggaactttctaccttgggcgacccccttgctgatgtggcctacagctgcctggctcattacctgccatccagttttcccgtgctgagaggtaggaactgctgctggaggatagtgggggagcaagccagttctccaagcatttgggagcaaactcagctgaagtagtccgtgattgggcgggggaagtgaaagtgaggtcctggtggttctggtgggaaacataactagaatgcagtcctgtcacatttacgggaaagtggatataggatgtgttttaagtgaaaagtatgcctgtataggtaccgcttatgcttttacacagctaacttctatttagggttttaaattaaaaacacattcattgtggctgggtgtggtgtctcatgcctgtaatcccagcacgttgggaggccaaggcgggtggatcacaaggtcaggagttccagaccagcctggccaacatggtgaaccctgtctctactaaaaatacaaaattagctggacgtggtggcgtgtgcctgtaaccccagctactcgggaggctgaggcaggagaattgtttgaacctgggaggcagaggttgcagtcagctgagatcatgccattgcactccagcctgggcaacagggcgagactccatctcaaaaaaaacaaaaacaaaccacatttattgtgaaaatactagagccaacagatagcaacaacaacaaaacagttaaaatcattagtagtcccagagataaccatttgctgacatttcagtatctatccatgtcatcttttcttctgtgtgtatatgtacatttcctaaaacaaaacaaaaatgtaacatgatctaatggcatgctttttttcacttcattgtatactgtagacatgttttcatgacattaagtatttcttctatagcataatttttaatgagagcatataattttattgtatagaattaagggaagacggccgggcgcggtggcccacgcctgtaatcccagcactttgggaggccgagacgggtggatcacgaggtcaggagatcgagaccatcctggctaacatggtgaaaccccgtctctactaaaaatacaaaaaaattagctgggcgtggtggtgggcacctgtagtcccagctactcaggaggctgaggcaggagaatggtgtgaacccgggaggcggagcttgcaatgagctgagatggcgccactgcactcgagcctaggcaacagagcaagactccatctcaaaaaaaaaaaaagaattaagggaagacatttgggttaattcctatttagatatttaatttgtttccaattttttagtattacttcccctacttccatgaaaaaaaggcagtgaacatccttgtagtaatatatttgcctatatataaggtatactcctaagattaatacctaggaatggaatatattacatgcttctaaatcatgaaaatgtcacaactggaggaaataagtgaattttttttttttttgagacggagtctcgctctgttgcccaggctagagtgcagtggcgcgatctcagctcactgcaagctccacctcccaggttcacaccattctcctgcctcagcctcctaagtagctgggactacaggcacccaccaccacgcccggctaaatttttgtttttgtagtagacatggggtttcaccgtgttagccaggatggtctcgatctcctgacctcatgatccgcccgccttggcctcccaaagtgctaggattacaggcgtgagccactgcgcctggcccgtgaaattattttatttgctataattatcattttcataatttggtgagatctttttatttttatatttatttatttatttgtttatttgtttatttatttttgagatggagtctccctctgtcactcgttttatttatttttgagatggagtctcactctgtcgcccaggctggaccacagtggcgcaatctcggctcactgcaacctctgcctcccgggttcaagcgattctccggcctcggcctcctgagtagctgggattacaggcgtgtgccacaatgtctggctaatttttgtattttcagtagagacagggtcttcaccatgttggccaggctggtgtcgacctcctgacctcaaatgatctgccctcctcggcctcctaaagtgctgggattagaggcatgagccactgcacccagccaattgtttttttttttttttttttgagatggagtcttgctctgtcacccaggctggagtgcagtggcgtgatctcagctcactgcaacctctgcctcctggattcatgcaattctcctgtctcagcctccctcccaggtagctgggattacaggtgcacgccaccatgcctggctaatttttgtatttttagtagagacagggtttcaccatattggtcaggccggtcttgaactcctgacctcaggtgatccacctaactcggcctcccaaagtgctgggattacaggcatgagccactgtgctcgacctgagatcgctctttccatatcatttttgatcaaatgactggttgaagataatatgcatccacccttaactgtggccagatggaattggaagctcccattccttcctttactgccagttgagtctgaaacctgtaagagccaatttgtgaataatgacttcatgcctggatccccagccatctaagggagcaagagccaatgcaggaataagctaacccatggaactggtcgtgaaactaatttgcaagggacatggcgattttcagaatttaaatatttgccagccacaggggcgtgtcacgtcagtgactacccatgaatggctctgtctttctcgcaggtattaatgactgtgacttgacacagctgggaatccctgctgcagaggagtatttcaggatgtactgtctccaaatggggctccctcccactgagaactggaacttctatatggctttttcctttttccgtgtggctgcaatcctacagggagtctacaagcgatcactcacaggtaatgggatggctgccctgaagagccactgcggggtgagtcacagcaaggaccgtgcctccacctggaaaccctctcagggccacagaggctttggagagaccgatttggccaggattctctgaggttcagttaatctaaccatttgtccataaatattttctttacaatatttatttatttattatttgtttttgagacagggtcttgctttgtcaccctggctggagtccagtggtttgatcctggctcactgtaatctctaccttctgggttcaagcgattctcctgcctcagcctccagggtagctgggactacaggcctgcgccaccacgcctggctaatttttttttgtatttttagtagagatgaagtttcaccatgttggccaagctggtctcgaactccgggcctcaagtgatccgtctgccttggcctcccaaagtgctgggattacaggtgtgagccaccatgcccagcctctttacaatatttaaacttgttttttaattattaaagtaatgcacaaagaaatttttccagttaaagcattcatgcacatgatcaaaatttggtcatatagaattatgtaaaattgtatctcacccttttcaacaccattcctcaaagataaatgttactgttaagagtttcctgggccctccagtttttctgtttatctgtcttctctctctcctcctacttttacacaaatgtgatcatcctatgtgtatttttcggtactttgattttaaaattttgtaagcttaagaatttctgtgaaatatgtgtgtgaccatttgcatatttaacaactatatgaggcaaatttcttggtgtgtgtgtgtgtgtgtgtgtgtgtgttgagacagtttctcactctgtcgcccaggctggagtgcagtggtgcgatcttggttcactgcaacctccacctcaccagctcaagcaattctcatgcctcagcctcccaagaagctgggattataggcacataccaccatacccgcgtcatttttttgtttgtttttagtagagatggggttttgccatgttggccaggctggtttcgaactcctgacctcagatgatccatccacctcggcctcccaaagtgctgggattacaggcatgagccactgagcccggccagtccccaagtctttaggtaaaacccctgtggtctttgacaacttccttgctcgctagtatgacaaaatgttccaggttcatcttgtctatccagcctacccaacatggtgaaactgtgtctctactaaaaatacaaaaattagccaggcatggtggcgggtgcctgtaatcccagctacttgggagactgaggcaggagactcacttgaacctgggacggggaggttgcagtgagccgagatcgtgccactacactccagcctgggcgacaagaatgagactctgtctcaaaaaaaaaaaaaaaaaaagacttgggagccaacctgaacaggctcccacttgctaacaataggaaactttgggcatcaccaaggatgatagctgaaatggatgaaacacatcaggtatgtttaaatccatgagtagtagccgggcatggtggctcaggcctgtaatcccagcactttgggaggccaaggtgagcagatcacttgaggttagggattcaagaccagcctggccaacatggtgaaaccacatctctactaaaaatacaaaaattagccaggtgtgatggcgggcgcctaaaatcccagctactcaggggactgaggcaggagagagaatcacttgaacccagggggcagaggttgcagtgagctgagatcgcgcctgtgcactgcagcctgggtgactgagcaagacactgtccccccaaaaataaaaattaaataaataagtccatgagtagtgatacaaaaacaaagagacaaagtctcattgatgacctcagaggttgccaggaaagcaacttattattctgaaaattggaaaatggggtgggggggtggggaatcaagcatttgtcctgtctttcctgtacaaatgatactgcaggctatccaaataatcaatgagggaatgtttctctctagagaagtatcctggacagaataatatagaatttgcatatcaccaatttgcaactcctaatgcattaatggatgtgggcaataagcttcaatgaaagccaacaccactgagagacagacagccagacattatatacctcctgatgcttccctcaaaagttacactgactctgcccaggtctccagtgctagctgccaactcatgggaaacacagggttcagagggacatgttcagcagcaccctgggcacagcactcacaaaatccagattctggaaaacatcacagggcaaacaactcagtttcttcaaacacttacatttcaaggggaggaaaagggtgaaaaaggaacctgtagattgagagagacttaaaagaaacatcaggctgggcgtggtggctcacgcctgtaatcccagcactgtgggaaaccgaggtgggtggatcacctgaggtcaggagtttgagaccagcctggccaacatggggaaaccctgtctctactaaaaaatataaaaattagccaggcctggtggcgggcacctgtaatcccagctactcgggaggctgagataggagaattgcttgaacccaggaggcggaggttgcggcgagccatgattgcatcaccgcagtctagcctgggcaacaaagtgagactgtctcagaaaaaaaaaaggtggggggagcggggagagacttaaaagatacgttagccagttacagtgttgggaccttatttggatcctttcttgaacaaattatttggaaaaaattttgatgatagtcactgaaacttgaattctgagtggatagtcgatgatatgaagaagttaacagttaacgattttttaagggtaataatagtattgtgggttttttaaaaaacatttgtttttagagttttgaaagaatcctagatgagatatttgggatttactccaaaaaatccaggacagtgggagtggggatggcagggaatgaaaccagactgggctggcatcgatcattgcggaaggcgagcagtagaacccgtaggcttgttattctctcctctctactcctgtgtgtctttgaaattttccaaaaggaggccagtcatgatggctcacgccggtaatcctagcacactgggaggccgaagtaggtggatcacctgaggtcgggagtttgagacccctggccaacatggtgaaaccccgtctccactaaaaatacaaaaattgcctgggtgtggtgatgccgcctataatcccagctacatgggaggctgaggcaggagaatcacttgaacccgggaggcagaggttgcagtgagcagagatcgtgccactacactccagcctgggtgacagagcaagactccatctcaaaaaaaaaaaaaaaaaggccaggtgcggtggctcatgcctgtaatcccagcactttgagaggccgaggcggggggatcacgaggtcaggagatcaagaccatcctggccaacatgatgaaaccccgtctctactaaaaatacaaaaattagctgggcttggtggtgtgtgcctgtaatcccagctactaggtgtctgtaatcccagctaactagggaggctgaggcagatgaatagcttgaaccagggagtcagaggttgcagtgagccgagattgcttcactgttcactccagcctggtgacagagcgagactccatctcaaaaaaaaaaaaaaaaaaaagaaaagaaaaagaaattttccaaaagcaaaacttaaaaacaaaaggcaaggagaaagaaggagaaaggaattcatcatgggatttgctagtgctgatggagtgtttagctttgcagtcagtgacaccccaagcttgctggcagcctgtgttctcagccaggttgccagagtcttctgagagaagcagttgcagtaggggaattgatcattcattcccaagtatatgagcctctactaaaagccagcactgtgctaggtggtcctggagatacacagtcatgagaaaaactgtccggagaaaaaccagtacccagagaatttctagtttaactgtacctggtctgataagcaggggatgctggaagcaggaatttctggaaacaatattttccctcttttaggaaaatacagtatcagctgtaagccactatttcccattttttttatagttttccaataaacactaaccagaaatatttacttaaacagaatggctgctaagtccttatggtgatgaatagtcctggtcacctctgatatttcctagccggctgccaagttttctccctgctctgctccagtgacctgggaaaagcttaatagactgcccattttagagtctccacactgagtgtcctcagcctgtctctcaggaagccctttgacatgtttttaagatcctgtgagccatcgttgtggcttctggtttctctcggcccagagctaaaacaccccacctgtttgccaccagacagaaaaatgtctgtttgttcaggcctttattcctcttatcttactgtgcactcctttccctccctctgggaagccagccagacacactgaggaaatggcttagttttctcatgtaaaaacaacaaaatccattttttgaaagaataatataaaaacgtatgatgaatggggaaaaaaccaactatacaaacataaatattacttctgtacatttgtcttctacaattagctttaaaatcatttttgtttgaacagctgagatatttggtactggccaggaaaactggagcttagagaaggggtatctgtttccaagacattctctctatggtgtcatttacaaaagacttcaaatcagcattagattgggaaggggatgagagagaccagagcccagtgagcagaagattaacagtatgtacctgcccagcccatgtgtccttctccttccttaataagtgggtgcagaaattagatttctggtagatggccactgaaattctataaagtgcttatgactgcaagttaagtggacaccagtgatgtggtctcttctgctggaactacattttggaaaatataccagaagcaatagatctaaatcaatccaagcttatacaagtgacttttttcagggacaaagtagcagtctcagagtgggagccaaccaaatagaagaaaattaagaatacacctcttactctgttagaagaagaaaatccttatgaataataaggaacataagggagtatctttcccttcaatgtgctgtgtgcagtccgaggaataaggaataagcccccactgtgtgtctgcaaggaagaggctatctggtttctgactgacttccctgggttaggttcatacctagcacccagaaggtcctcagtagagacctattgaggtccagtaggctaactctctgcagggtagcaaagaatttgctctgagtttgttcctaactctgtaaggaatagtttaaactatctttaacaccaaagctgcatgaaaatggctgtctcagctgggcatggtggctcatgcctgtaatcccagcagtttggtagactgagacaggaggattgtttgaggccagaagttcgagaccagtttgggcaacgtagtaaggccccatctcttatttaaaaataaataaaatatttatttttttgagacggaattttgctcttgtcacccaggctggagtgcaatggcatgatctcggcccacggcaacctccacctcctgggttcaagcgattctcctgcctcagcctccccggtagctaagattacaggcgtgcatcaccacacctggctaaattttgtacttttagtagagacagggtttcaccatgttgcccaggctggtctcgaactgacctccagtaatccacccacctcagcctcccaaagtgctggggttacaggcgtgagccaaagcacccagcctaaaatgaaatcatttaaaaaaagaaaatggctgtctctttagaactatcaatttatccatttattgggtacagtctcttggggacatggaagtgctagaagtaatccaggagagctggctgtgaaaaagttcactgtgaggagacattgtacacatagcaatctggatgtgtctcagatgcagggctcagagtgatggaggccatactgaaaaggccacatgctgagtgacatatgtatttatgggacatcctggaagagacagactacagaaacagagatcagtgggtgctggggatcaggggggcaggggttgagtacaaaagtacactggggaaatttccagatgatggaaatattctgtttttttttttttttttgaaatggagtctcgctctgttgcccaggcaacctccgcctctcgggttcaagtgattctcctacctcaggctcccaagtagctgggactacaggcatgtgccaccatgcctggctaatttttgtatttttagtagagacaggtttcaccatgttgaccaggctggtctcaaactcctgacctccggtgatccacccgcctcagcctccaaagtgctgagattacaggtgtgagccattgcgcctggccgaagtattctgtatcttgatggcaatggtagttacccaactatggatttgttaagacttgcagagttctacattaaggaggtgtatgtacaccactcctcaatttttttatttttatttatttatttttttgagatgggtgcctcactctctcccaggctggagtgcaatggcacgatctcggctcactgcaacctctgcctcccaggttcaagcgattctcatgccttagcctcctgagtagctgagattacaggcacacaccaccatgcctggctaatttttgtatttttagtagagatgggggtttctccatgttggccagcctggtcttgaactcccgacctcaagtgatccgcccacctcagcctcccaaagtgctgagattacaggtgtgagccaccgcacctggccaccttaattttttttaatggggaaaaatatgtttgtaaaaaaagtcttgatgcacattttacaagaagaaagagacgctgtgagagccaaatagtgagctgagtgatgctggtgttgattccctccagagacagtggtgtctagaagttggctcttcctttagtcagttgtggcattgctgttatcaattttgtagcaagggtggtctaggatgcaggacttcttatagcccactggcaacggcagaggtgatctggggtgttactgattaaatgtagtcttttaggaaagcagagatcaagagcagggagcaggcagacctaagttggactctggcccccagccccctaacttccagctcgtccaagtcacctccttctctaagactcagttttcttgcgtgcaaagtgcaggtgaaagcagttgtattgctttggggattcagtgagctatagtggctcttagcacagtgtttggtacttagcaagtgctcagcaaatggcaatagctgctgaagtgacagtgtcatcacatgttaacatccctatgatgggtcgtgtgggagtaatcactgtttttctttgattctgcttagggcaagcaagctccacatatgcggaacaaactggaaagctgaccgaatttgtgtctaacctggcgtgggatttcgcagtcaaagaagggttccgggttttcaaagagatgcccttcacaaatccgttaacaaggtcctaccacacgtgggccaggccccagtcccagtggtgccccacaggcagcaggagttatagctccgttccagaagcttccccagctcatacctcaaggggaggtctggttatctctccagagagcctctctccacctgtcagagagctgtatcaccggctgaagcacttcatggagcaacgtgtgtaccctgcagagccagagctgcagagtcaccaggcctcagcagccaggtggagcccctccccactgatcgaagacctcaaggtaaagcagccatggtgaggtggtaagaccccaataccatggcataccctccccgaccccaccgggctcacctgaaccatcccaggcagtgaagatacaggagctccgagttgaatgatctttgcttccatcgtctcagaaagagccagctcttcatgactcagtttccatctcttgctcttgctgtgcctgtgtcacaggcagatggctcaggtgtgactgcacagcccaggcagtggaatgcttggccttagaaagccagggcaggttaggcctatctgatgggtatttgaattatgtaaatttgaaacagtgctgtatcagctaataaatctctctctagagaacccgtaatatcacagctagagggccagatcca

SEQ ID NO: 11968 - DNA, 1298 bp, Homo sapiens
cagcctgtcccagtcatagctatatcccagcacccagaaccatgcctggcgcatagtagttgcctaataaatgtttgctggatgagtgagtgaacctctctgggccttattttcttcatcggaaaaatagtgataacaatggtaatagtaacaactactgcagtcaggatgatcatgtcaagctccaactcctcgatctggcctgcgatgccctgcatgctgctctcagtgtattcatacctcttcagctgcatttcacacggaggcccacggctctctgcactccagccacctaagccctgctccagtttctcaaactcatcagccccttatctcagggcctttgcaagtgctagatgcacttccttcccttacttcacctagttcatcaaatagctttttaaattttttttggagacagagtctctctgttgcctgggctagagtgcagtggcgcggtcttggctcactgctacctctgcctccctggttcaagtgattcttgtgcctcagcctcctgagtagctgcaattacaggtgcatgccaccatacccagctatttttgtatttttagtagagacggacttcaccacgttggccaggctggtctcgaactcctgacctcaagtgatctgcccgcctcggcctcccaaagtactgggattacaggcgtgagccatcgtaccccagttcctcaaatatcttacccgcattagcacttctttggagaagcttcctcagatctctagaccagactaaatcctcctgtcttaagcttttagagtgctgtgcgccttttctttccagctcttctcagaagtggtagctacagatttgttgatttacttttagtctaatgccagtgttctccagccttttgtcagctctgcaagatacagatgtggtttatttgctccaacatgtaaatgcagaacttagcccagtacctggcatggggtaggtgcatgatgcacgctgggactacacagacaaatggatggttgcctggcatggctcactgaggacactcaacaggtaccagcaccatttatttaagcggatcaactaacgaatgagttagagagtggctggaatggatgtatagcactaatttgtgagagaagacagaatgagaatgtaattccaaaacaatgagcaaacatcagaagaattgaagcaaataactgcaacatttccccagttgtccctctcattgttcttaaaataaaagcatttctgctacggagtcaggcaaataagtgaaaaagccacataaaggaagagcagtgactctcga

SEQ ID NO: 11969 - DNA, 1298 bp, Homo sapiens; identical to SEQ ID NO: 11968

SEQ ID NO: 11970 - DNA, 554 bp, Homo sapiens
cctcttgagataagccaataggtgtttgatgttcagtgttcagaaagccagcctgactgctctcagatgattaagcaagaggctatagtcggtggggtggcagggggttgggggggaacaggcctccccccttctgtttccagaaatctgacctctgcctcggccacattccccgactcctgggtgtgagataaggccgctgtctcctgttcccttctcttctgtctggcctggctgagctggcgtgtatggtcttagttttctatatttatagagacaaggatgggggaaccatggtagggggcagggggttgggggcggctggcccagagcttcagggcctgtggaagctgcctggccgcagggggtatttaactttctgcccgatggttgtaattctgggggcagccgaactggtgggatcaggtccctctggctgcgatgacaggccttcagcaggcactgtaattgcagcgttaaaacccctcattttcttcccggcaagctgtagttaagaggtgctatcgggcagccgggttgtctgcagggaggct

SEQ ID NO: 11971 - DNA, 26427 bp, Homo sapiens
tgtgtgtgtgtgttatcgggaaagatagctcatgagccttttaccctgcgtatgtacatggaagctgaggctgggagcagcctgtatttactagtaacattgtttcctaaagccccagcagagtaacatatcctccccctgccaagactcagtagctcacctctatctcttacagcatccagtcagaagtgtcctttgagggagcctatgggaacctcaagcggctgtatgacaaggcagccaaaatgtaccaccaactgaagaagtgtgagactcggaaactgtctcctggcaaaaagcggtgagtggggcctgtgaggaggacgggttttttctgcagttggtgcagtaggaccatagggactgcgggaccattcagcatttactttgggctcttctcatttcagatgtaaagacattaaaaggttgctagtgaactttatgtatctgcaaagcctcctacagcccaaaagcaggtgagtggaagagagcatgaacctgaactatcctgtgagccccagccatgatgctttacagaaggaaccttgacaagggtggactgtcgagttctgccctcagtttgaacatccgtaaccaattcatcctttcttggcattcctcactgtttctcccaagggtcctatgcccatcctcctcccagcagctctccctatggcacagaatgggtgcttaggagatgttgaagagggaatggctgaatgggaagcctactcacatcccttcccctgttttagttgctatggagatcaatccagcactacccttccctggtgtgctctcaggtctcccctgcagcatcccatagtcctttctctgaatcttgtattccctgctcttctccttccccagcccccaccactgacctcccctgttactcctgcccctctgtagctccgtggactcagagctgacctcactttgccagtcagtcctggaggacttcaacctctgcctcttctacctgccctcctcacccaacctcagcctggccagtgaggatgaggaggagtatgagagtggatatgctttcctcccggaccttctcatctttcaaatggtcatcatctgccttatgtgtgtgcacagcttggagagagcaggtaaccttccctatgttcctcttttctcttccactggctttggggatcctcactccccttttctgcagctccttattcataaacttccttccacaagcagcctcttcactcctgtgtcactgcttggctgtgggcaagtaagggccaagggatcctaccctaaaggaggtcctggtaattgagtacaagcaacagcacatttccttcccccttctccttactgcctcccataaatatgcacacccttggccagggcctgtgcagacacaagggtcagggtacttagtgatcatccagacagaatttcagaccttctgttggaggcatttaggcaattctggaagcctttctggcagaagtgtatgtagagcaagattgggaggtaaggagggataggactggatgtgaaggctcttgaggcatggggaggaacctcagagccagggaggatgagatgggacaaaaggatatgcttatctgaaggagtacaaggtgagatggtaaattctagattatggaagggataataggacacgtacagtgcctcacgcctgtaatcccagcactttgggaggccgaggcgggcagattgagcccaggagttcaagacccagcctgggcaacatagtgagactcttgtctctaaaaagttaaaaaaaaaaaaaaaagaatctttgataagtagttggatccttggaagagttgagaacagatgagatgtggttggaattgatggtgcctactcctcatcagggccctaggcccctaatgcctggctttcctgacttcaggatccaagcagtacagtgcagccattgccttcaccctggccctcttttcccacctcgtcaatcatgtcaacatacggctgcaggctgagctggaagagggcgagaatcccgtcccggcattccagagtgatggcacaggtgggagaatcggggaggtcatcactatggaaaggttggtgtggggcatggggatgaaggaaaggaacacagactcgggggaagtggtgttggagagcacattccagcttccaggctccacctgttcctcgggctccacctgaccttcctctttccgcagatgaaccagagtccaaggaacctgtggagaaagaggaggagccagatcctgagcctcctcctgtaacaccccaagtgggtgagggcagaaagagccgtaagttctctcgcctctcctgtctccgccgtcgccgccacccacccaaagttggtgatgacagtgacctgagtgaaggctttgaatcggactcaagccatgactcagcccgggccagtgagggctcagacagtggctctgacaagagtcttgaaggtgggggaacggcctttgatgctgaaacagactcggaaatgaatagccaggagtcccgatcagacttggaagatatggaggaagaggaggggacacggtcaccaaccctggagccccctcggggcagatcagaggctcccgattccctcaatggcccactgggccccagtgaggctagcattgccagcaatctacaagccatgtccacccagatgttccagactaagcgctgcttccgactggcccccacctttagcaacctgctcctccagcccaccaccaaccctcatacctcggccagccacaggccttgcgtcaatggggatgtagacaagccttcagagccaggtatttggaccacttcatcatcctgttctggtccgcacctccatgccatagacactcaccagagaggccgctttcctatctgtgtgaatgacctctcgtctctacccttacctttggccctctgcctgtggtgtagcccatgagttttttcctgagggtccaccctcctgctcacttccttattcccatctcccaacccatttgttggttttatttcttttgcacttcaccctgtcctgtgggtttggggctttcctccctacacaacaattgcagctgcagcttccttccctgtgccatcccaagtccctccagggcttctggaagctagaaaaactggtacccaccagcgcaggtgcattagagtgagacttctctcctgaggatattccctgcaaacagagtacccatttagtagcagcaaccgtttgttaaggctactctatgcatcattctagggtgttgtcttatttaaccttcatagcagtcttgtggtagaagagttgtcatccctactctaggctgtcttttacttccaaagttttttttttttttttaaagacagggtcttacctatcccccagactggagtgcagtggcgccatcttggctcactgcaaccaactgcttcccaggctcaaacgattctcttacctcagccttctgagtagctgggatgacaggcatgcactaccatgcccggcttttgtgtgtgtgtgtgtgtgtgtgtgtgtgtgtgtgtgtattttttttttgagacagagtctcactctgttgcccaggctggagggcagtggcacgatctcggctcactgcagcttctgcctcccaggttgaagtgattcttctgcctcagcctcccaagtagctgggactagaggcacgcaccaccatgcccggctaatttttgtatttttagtagagacggggtttcgccatgttggccaggctggtctcaaactcctgaccttaggtgatcttcctaccttggcctcccaaagtgctgggattacaggtgtgagccgccacacctagcccctccaaacttttatacatagtgttttgtctgtctggcaagtgcttttcctcccttgctcccagcctgtcacttagctaattcttacttgcccccactagattttagcttaaaagtcacttggtctgggactccttcaagggtatgttagatttgcttcttgtggcctcctgcacctctgcagcctccagtccttttccactctattgaggttgactgttgatttgtctgtctccccagttagagtctgaactgcttgagggcaggacagaatatttcttacttattgctgtatccctagtacctaacacagtgtctggcacatggatgggacttaagaactatcgaatgactgagtgaatggcagaaatgagggatgctcagagatgtgaagggacctgtccagtgttctcacttgcaaagtagaagaggtaggaattaaaagtaactcttttttttttttttttttttttttttgagacggagtctcgctctgttgcccaggctggagtgcagtggtgcaatctcggctcactgcaacctccacctcccgggttcaagcaattctcctgcctcagcctcccgagtagctgagattacaggcatgcaccaccacacccagctaatttttgtatttttagtagagacagggtttcaccatgttggccaggctggtcttgaactcctaaccttgtgatccgcccacctcagcctcccaaagtgcagggattacaggcgtgagccaccacgcccggcctgaaagtaactcttttaaaaccataccccttgcttttctccctcccttatagctcccctctaactgtctgccctgccttccagcacagagtaggcatttcataaatcctagttgaatgaatagctgtagatcaacgtcacaaattacttgagtctataagaatcatatttaaaaggcaccatattttaaaaacaaccttggtaaaatgaatttgatgagattaaaaaacaacaacagttagtgggcctggaaaaattgaataagggcctgtaagtggttccccagatttttcatatccaaattccttggaagggcccaggccaggtggaagcatgctccctgcacagagctgaggcctgttcccaagtgtcagttgtttatcccagtttttttctcttccattcacccaccccccagcctctgaggagggctctgagtcggaggggagtgagtccagtggacgctcctgtcggaatgagcgcagcatccaggagaagcttcaggtcctgatggccgaaggtctgcttcctgctgtgaaagtcttcctggactggcttcggaccaaccccgacctcatcatcgtgtgtgcgcaggtgtgtcagtccactccattgcccctgtcaggtcccagggtcttggaggaggggatgagccaggatggggcctgaggatcccccctgatggccaaggcaagaattattgccaagcaattaatcacctatctgtgctgggcccttatgctctgacagggaaggattaggcatgatcttggccctcacaaagcctgtggccagggaacaattagcgagctgcttattttgctttgtatccccaatgctgggcataatgcctgccattatgagtaatgccggtagaagtatgtgttcaaggaccaaagttgataaataccaaagaatccagagaagggagagaacattgagtagaggatagtgacagaagagatgggaacttctgacaagagttgtgaagatgtactaggcagggggaacagcttaaggagagtcacacaggaccgagctcttgtcaagccggctgccatggaggctgggtggggccatggtagctttcccttccttctcaggttcagagtgtcagccttgaacttctaattcccagaggcatttattcaatgttttcttctaggggcatacctgccctgctgtggaagactttcttccctgtgggtcgccccagtccccagatgagacggtttgggtcagggccaggtgcaccgttgggtgtgtgcttatgtctgatgacagttagttactcagtcattagtcattgagggaggtgtggtaaagatggagatgctgggtcacatccctagagaggtgttccagtatgggcacatgggagggctggaaggataggttactgctagacgtagagaagccacatcctttaacaccctggcttttcccactgccaagatccagaaagtccttgtggtttcgctgctttctcctttttttttttttttttttttctgagatggagtctggctctgtcgcccaggctggagtgcagtggcacgatttcggctcactgcaagttccgcctcctaggttcataccattctcccacctcagcctcccgagtagctgggactacaggcgccaccacacccagctaattttttgtatttttagtagagacggcgtttcaccatgttagccaggatggtcttgatccgcctgcctcagcctcccaaagtgctgggattacaggcgtgagccaccgcgcccggcctgctttcttctttcatgaagcattcagctggtgaaaaagctcagccaggctggtctggaactcttgacctcaagtgatctgcctgcctcagcctcccaaagtgctgagattacaggcatgagccagtccgaatgtggctttttttgttttgttttgaaacaaggtctcactgttgcccaggctgcagtgcagtggcatacctcagctccactgcagcctcgacctcctgggctcaagcaatcctcccaactgagcctccccagtagctggggctacaagcgcatgccaccacgcctggctatttttttttttttttttttttttgagaaggagtttcattcttgttgcccaggctggagtgcaatggcacagtctcagctcactgcagcctccgcctcctgggttcaagcgattctcctgcctcagcctcccgagtagctgggattataggcacctgccaccatgcctggctaatttttttgtatttttagtagggatggggtttcaccatgttggccaagctggtctccaactcctgacctcaggtgatccgcctaccttggccttccaaagtgctgggattataggcatgaaccaccgtgcccagccagcccagctaatttttgtgttttttgtagagacaaggttttgccttgttgtccaggcttcttttgttaattttaaaatcaaacccccacaggcctctgaacataggccagatccctcagggtggtgctttccttgctcactgctgttctccaccactgtctctagctgaaggcctcctctcccttctctctccccagagctctcaaagtctgtggaaccgcctgtctgtgttgctgaatctgttgcctgctgctggtgaactccaggagtctggtgagtgggtccctggcactaccctcctttctttgctctctcattgtccccactaagcccatctcccctccccataacccagcccttggggtaaggaggttaatgggattcactgccagcctccctagcacacagcagtcattgtgtggtctaggcctctccggtttcccaccacaacactgctgtattgtgggcaggtggcctggtcagcaagggagtgtgctccctagggaatgcaagggcagagtgagagggccctgggagccagacctagctgctgctgttgcactgatgcctgtggtcattgagaattgactttgacctaccaagtttgtttgtctggctcatctcctaccaccttccagctggaaaactccacctgctcctacctgctaagacttgccaagggctattcattcatcctgagcgcctcctctcatttccatcccaatgtaattgtccctgctgtcaggaagccttcctgacctgagccatccttgttcttcctgagcccctctgctctgcctgactggctcttatgtgtccatctctctttacttcactccctccatctctccgcactgtcctagggtatgtcctgcctcatcatctcatcagcctgataattcccaaagggaagggttatgtctctctgactgggagttcccacaggacagatggtcttatgtgtccttcttctgcccaggcctggccttgtgtcctgaggtccaagatcttcttgaaggttgtgaactgcctgacctcccctctagccttctgctcccagaggacatggctcttcgtaacctgcccccgctccgagctgcccacagacgctttaactttgacacggatcggcccctgctcagcaccttagaggaggtaaggatagcatttcttatgccacagctctgtttgtcagtcacaaacagcagcaaatgggttcagatctggggagggagggggcaggatgccctcttccactcagacagggacagtgtccttggggctacaggctgtgcttccttcttcattcagtgagccattttagcttttttcctgccttggcagtccttctaaaggtctgccattggtagtttctactattgtagaacaaccacccccttcctttctctgccttctgtaaagggcagaacaaatagttattagggcttcgaaatctttatcagtctcttttctaactctgggcccagcctgctccgagctgaacatcaaacaatcatagaaagttagagctggaagggaatgtgctgcccgcttagtccagcagctttcacccttaaatctccatcaccacatgggccatctgggggcagcagagggaagtcaagcagacaggccacccagtcctgacatacataaaccacctggctgctccctccaaccagagctgcttggctctgttttatattttagagttctagataagatttttatttgagagggaagaagggttttactgaccacaaaaataagttggggccaggtgcaatggctcacctttgtaatcccagcacttggttgggggccaaggcaggtggatcgcttgagctcaggagtttaagaacagcctgggcaatatggcaggaccccatttctatcaaaaaatacaaaaattagctgggcatggtggtgcgcacctgtagtcccagctacttgggggccgaggcaggaggatgacttcagcccaggaggtagaggctgcagtgagctgtaatcacaccactgcactccagactgggtaacaaagcgagattctgtctcaaaaaaataatacattggaaaatgtgatctagtttggtcccctagagcatatgagaagcattaggagagagatggtattagaacccaggtctcctcacttccagcccagtgtcctttgctcttgtttcttagcccaagtcctggttttctggtcctcctaggagttttcttgctgtacctactcgttttctggcagttagaggctctgggccttagtgtttctccttcccaccccatagaccacaaatcttcccctggagcccttgttggctgaggtggctgggccagcagggaggtgggagggtgggagtggagggtcctggagggcagggtgggtctagagggccctgctcagcagcgctgggctcctgtatctccccacagtcagtggtgcgcatctgctgcatccgcagctttggtcatttcatcgcccgcctgcaaggcagcatcctgcagttcaacccagaggttggcatcttcgtcagcattgcccagtctgagcaggagagcctgctgcagcaggcccaggcacagttccgaatggtgagtcaggccttcccctccccgtcagctctgctcccattgggctcactgagaaaccagggcaagaggctcagaccctctggtggtctccacctgaaggacatagtaagatgcctagggagaggggaggggaggctgggagggaggcctgggaaggactaagggatgtgactgatagacagggactgagaggggttttttttttttttatgagatggagtcccactctgttgccaggctggagcaagtgacgtgatctcagctcactgcaacctccggctcccaggttcaagtgattctcctgcctcagcctcctgagtagctgggactacaggcgcacgccaccacgcccagctaatttttgtatttttagtagagacagggtttcaccatgtaggccaggatggtctcgatctcttgcccttgtgatccacctgccttggcctcccaaagtactgggattacaggcatgagccaccacgcctggcctgaaaggggctttgagcagaggctgcctagctcaagacctgtacccagactgacctggggttgaggccatctctgtcaccttttaatctatgaattgagcaagtcacttaacctcaccacgccagtttccttgtcagttatgtgggaacaaacagaatccactttatggagttttttgaagatggaatgatagtgggtgtgaggtgccttgcacattgtcttatggcacatgtgtgtgcctagcaaatgctccctctgttccctttcattcaagagggataaagactgaggaatagaagggagcggagggctcctgatataaggggccatgaaggaaccttcccatcccagacatggtcccatcccacaggggccccaaaggatggaaagtggcctgtggtacctcttttccatccagtaattcattccacgaatatttatcgagagtccattttgtgccagacatgacagtattctaggcactggggttatagcagtgaacaagacagtcctttctcttgtgggcaacaatctggttttcacagtggggcctgcacagccttgggcatgtttcccaacacaccaccctgagctaagtggcaccagaacattggggtgttagtgtctggcacaggaagtatgatgtgtctcagcaacccctcagggtttcttcttcatctcaagccaatcccctcctccacattcttcctttgcacctgtcccagggccagtagcttccacaccctgtctgagtgccatttcttgtgggcattctgcttggctggaaaggggcaaaagctccccagaaactcccttccttactgtctgaaaaacaagcacattttgttaaaaacaaacctttgttaaggcttttattgctagtccataggggaagacatggggagggggttacaaaaataattatggggaagttagcttcaaaaaatgttaggagtttttgcaggcatttcctctagcctaaagctcttgaagacactcttcctgtcggggggtagggagtacctgcaagcccttctcatgtggtgctagactccacatgccaagatagacacaggccacgttgcttgctggggctgcctcctctgcttgagtcacaggcttccaccccgaagggcttatccccagcccagaggagtgttgtcgttatcacatttatcaagagttttctctgtgcacagcctggtttgcatgtgacatctcaattaacccttgcagcagcccagtgaggtaggtgcttgcatcctccattttatagataagaaacagtaggctgggctctgtggctcacgcctataatctcagcactttgggaggccaaggcgggcggatcacttgaagtcaggagttcgagaccagcctggccaacatggtgaaacctcgtctctactaaaaatacaaaaaatagccgggcatggtggcaggtgcctgtagtcccagctacttgggaggctaaggcagaataatcacttgaacctgggaggcagatgttgcagtgagtcaagatcgtgccactgcactccagcctcagcgacagagcgagactctgtctggaaaaaaaaaaaaaaaaggaaaagaaaagaaaatgtagaaagacaaaggaacattcccaagatcagaaagtatagtcggtggtagagccagggctctggagttggacacactatggatttcttatcctggctcttttctgctgctttagagacttagcttctctgtaggccaagtgggcactaggagttgcggggggtgtagtacctgctgatgggacttctgaaggtaggctttccctctgaggaacgcgtaggcctacatctgtttgaaatgctgggttggtaatgtcagagcctcatattagcacagctccatcttcttgggtccaggcggatctcactcacctacactagttctctgggggagcttttacacaagtgcccccatccccctctcttgaatatggagtttcacaattaccattttagtctaaaagcaactcattggcttgatttctgcagtgggaagagggaaagtttgtctatggtgcctcccttgcttaccagtttgcccacagggcctgtgagaaaatggctgttaggttgaggctgcagtgagccaagatcttgccgctgccctccaacctgggtgacagtgaaaccctgcctcaaaaaaaaaaaaaaaaaaaaaaaagagagaagatggctctcacctaggctctggccttctgcttccattctttcatttgtttacattgtttctcaaggggacactcttggcaccttgggcaggacaattctttgttgtgcaggactctgcaggggggtgggagtggatcttgcaactatagatgttattcctctttccctagtcttcccactaatgtctgttttctctttgtaatccagtccaggacccacagtatgtttgactgtcatgtatccttagtctcatgcaatctctgacagttctcagtttttccttttctttcctgatgtgacactttcgaagagtactggtcagttatttcatagtgtccctcaatttgggtttgtgtgatgtggtctcatgatgagaatgagaattttttttctttttttgagacagggtcttgctctgttgacccaggctgaagtgcagtggcatgaccatagctcactgcagccttgaactcctggcctcaagcaattgtcctgcctcggcctcctgagtagctaggactacaggcatgcatcaccaagcttgactgatttttaaaataaaaaaaatatacttttttttgtagaaatgtgatcttgctatgttgctgaggctggtcccaaactccagaactcaagcagtcctcctgcctcggcctcccatattgctgggattacaggcatgagctactgtgcctggccccaagattaatattttatttaatttttatttttatttttgtatatttatttattcattttctttgagacggagttttgctcttgttgtgcagactggagtgcaatggtgtgatcttggctcaccacaatctctgcctcccgggttcaagcgattctcctgcctcagcctcccgagtagctgggattacaggtgctcgccaccacgactggctaatttttatatttttagtagagacggggtttcaccatgttgctcaggctggtctcgaactcctgacctcgtgatctacccgcctcagcctcccaaagtgctgggattacaggcatgagccactgtgtctggccccagtttttgtatttttagtagaggcagggtttcaccatgttggccaggctggtctcgaactcctgacctcggtctcccaaaatgctgggattacaggcgtgaaccactgtgcctggccccaagattaatattttattttattttattttattttgtttatttattttgagacggagtcttgctctgtcacccaggctgtagtacagtggctctatctcggctcactgcaacctttgctgtccaggttcaagcagttttccctgcctcagcctcccaagtagctgggattataggtgcccgtgaccacacccagctaatttttttatttttagtagagatggggttttgccatgttggccaggctgctctcgaactcctgaccttaggtgatccgcctgccttagcctcccaaagtgctgggattacaggtgtgagccaccgtgcctggccaagattaatattttaaagcaccactttgatgatgccactttggtcatcaaagagtcttcagtgggctgggcgctgtggctcgcaccagtaatcccagcactttgggaggccaaggcgggcagattgcttgagcctcaggagtttgagaccagcctgggcaatatggtgaaacccagtctctacaaaaaataccaaaattagccaggcatggtggcatgtgcctgtagtcccagctagttggggggctgaggcaggaggatcatttgagcccgggaggcagaggtagcagtgaacaggaattgtggcactgcactccagcctgagtgacatagtgagaccctgtctcaaaagaaaagaaaaacataataaaaagagtcttcagtggctccccatatcttacaggataaagtccccatccttagcctcatcttatagaccatactaaggaatttgggctttacccataatacagaggaaaggcatcagaaaacttttaagcagggctataatgggcatcagatggtttttaaaagattgccttggttgtaggtggagaagagggattgaattagaggcagagaccagtacggtggttgttacagtagtcaaggagaggtgttggcttagactagggtttcacagtggaggtggaaggatttgcatgctgtttaggggggcacaattgacaggacagggaacctgataacttctggggctgagagaaagggaagattcaaagccaaccctgagctttctgacttgggcagactggtttatttactaggctagggaacactagaggaagagacgcaggttctgaggagcagatggggctgctgagtaggcagttgtatgtgtgggtctggagctcaggatggtcaggcctgggctgaatctgcagatttggaagattttggcaagtggatgggggtagaaggtgaggaagtgcatgggtaggatctcctgggaagggagaccagattgagaagagcagagattgaatcctgaggcacagccaggtgatgtcctgcatggtgacggcacatggctgtctgcttcccctcccctgcagggcctggaacatcatgacctgcatcgggttggtaatggaagttgttcagagtgcagtggaagaatattttttcttccatgcctctcctcccctcattcagcagcagtgctagagagtgactttgcatgaggtcacactgagaccccaggaaaccctcttggtcttcctgatcactggagaagggaaaatacaccccaactccttacagctcattttttccctcataggcacaggaggaagctcgtcggaacaggctcatgagagacatggctcagctacgacttcaggtaggaaatcaggacccaagtgcttcttctgcacttggtagagcttttgtgtcaaccctactggcaggtctcccccttccgctgtagtccccctgctctgttgcctctgtgtccctccgcctctcccagatgaccctccttactactcactcttcactcagccatttgcctcctttctgccttcatttctgtctctccctctttaactcttatttctgtttacttttcccccaaagccattggtagagagggtcctctgatccccttaacaacaggaggagccccatagagccaccttgagcaccactcttcccccggcccggctgcaggggtcccccacagctgtacccaccttgccctctctcaccagctcgaagtgtctcagctggagggcagcctgcagcagcccaaggcccagtcagccatgtctccctacctcgtccctgacacccaggccctctgccaccatctccctgtcatccgccaactggccaccagtggccgcttcattgtcatcatcccaaggacaggtaagtacattggagaggtaaggagacagagtatgactaaaagagattctgggcttgggattaagagaccttatttggggcccagtttatatgcagtaaccttggtcaagtcttactacctttgtgaacccgtcacttcatctgtgaaatggacataatccctattctgccttacaagacagttgggagaaacagaaaatgtaagtgaatataatgagaaagcacttggtaaattgccaagtatattgctggcagaaggtcatgttttcagagaactttgggagccctctagggagccagggtcccttctctgcctgaagagtgtactgaggtgagctcagatacttcctccagagccccttgtcacagcagtctgagcttatctgttttgtctttccctaccttgcccaccagtgatcgatggcctggatttgctgaagaaggaacacccaggggcccgggatgggattcggtacctggaggcagagtttaaaaaaggaaacaggtgagtgtggcctggctggacctgtgctgagccctgggtctgtcttttggataacacatgcttatgaaagccccttgctccctatgggtaagacacatacatacccgtctctactcacagttagctcacctcactgcctggggagtgataccagagataattagaagtcaaggttgtagctgctgaaatagagggtgaccaaagggatcaggagccctgtggggagcactgagctgctgtccttcctctggggcaagcctgtgatcagcacccactggggagaagggagcagacctccctcccccaactttagactgtgaactcctttataggaatttctcctgctttggggttgggacaggtgatcaggtttctcagagtgtgagggcctcatccaggctgcccaggggcttcccacctccctgctgagctgagggagtggtaagaccgaagccagccagggaggggcagctggcagcatgtgcagatgctcagccggtacaggcctgcccttctggcctttggggctggaggagaactaggcagagggtgtagggaataaggagaaagcttccctctccctgctagctggcccaccccctcctctgcatctgctctggctggccaggaagctgcacaaggtctgattgttcggaccttgtctccagaagccctgacttgaaaagcatctgctgcttctcccctcccagctcctcccctgagaggaaccaaataattgatgttatcaggaggaaaagtgagctgggcccagcagccaggaagccacttaagaatggctccagagctgtggtgggagagacatgttccccagccccgcctgcaaaaccaggcccccagagccacaacagactgctttgtgtaaggcaccctgccagtctcctgctcctgacctccactcgcacatctcctctgcaggtacattcgctgccagaaagaggtgggaaagagctttgagcggcataagctgaagaggcaggatgcagatgcctggtaacattttagccctcacccctagaacctcaggccacctgccttgctcctccacgagcattcctagggagaacgggtagggctggataattctgaggctccacacgtagcctgccagggccctcctgcaggcctcaccttgcgaggagtacgaagttgccgcagcacctgagcttttcctctgcagatgggtcagcctctttgggccttgcgatgctcaggcttggtgttttccctcaatgcacctttgcctgctccccatatgtctccagggccagcttccagggcccactgctgctcactgccctcccagcccccagctgcccctgtcccctggagatcctggtgtttgggctgtgctaatgctgggtcttggcccatcttcccctctgccccccatccccaggactctctataagatcctagacagctgcaaacagctgactctggcccagggggcaggtgaggaggatccgagtggcatggtgaccatcatcacaggccttccactggacaaccccagcgtgctttcaggccccatgcaggtgggtcatgggtgaggtggggggatggtgtggaatagggacgaggtaccagagcagactccatccccagaccctccacatagctacctttttttctcttccatcactccttccccagcgcctcaacaatttgctcttcagttcaggaggtcagaccctctccatctttccttctcccattccacaggcagccctgcaggccgctgcccacgccagtgtggacatcaagaatgttctggacttctacaagcagtggaaggaaattggttgatactgacccccaggccctgcagtggggctgactccagatctctcctgccctccctggcagccaggaccagcacctgtagtcaccccaccacacgcagactcatgcacgcacacaggagggaggcctagctgctcagaggctgcagggagggcccaggagccggctgggagggtggggtccctttgttgccaagacgttaggaaagcgaggaaagtgcttggattaggagagtcttgtgggcccctggccagccttcctgcctcagctcccctgctgtctccaggggcaggtggtaggcatgggtacctgcatttcactggaatgggttcttggatctctgaggggaaggaacagcaaaagaggcccttcttcctcacccaagatgcagggtggttggggccaggagtttggaccctctaggtcttgggggaagagctgggtaatacctggtgtctgagtgattctctgcagacccttcccctcctcaaggatcacccatcctcctttcagccccctttatggggaccaggcagctctggagccagccacaggggctgttagagaagcaaggcctggagtggcctgcaccgagtagcagggtcagggttcgtgtgctcctcctcctgctgcaggggctgcacatcccattgccccacttctgctttgtgtctccctctgtctagcttccagggcagggagcaggccccacctagggctgcaggcagtctggcctgtgccagcacggtctcctgtgcccaccagccccacaggtgctgtgctttgtgctcttggctgctgtgctgggacagaatgggatgccaggaagagaagaaagggggtgcagtctgaggccaccaccccccttcctatctaagggagggctgaagacaaggggccggcattcagtgggcagcagaaaggagaggctccttgaagctgctcagtcagaggcccccgtccctccttttgccttccgcaggactgaagacctgaaggggctggcttttggagtgttgaggtgaatatctgggagcagagatcatgaatagctcagggcagtgaatggcgcaccaagagcagggctgtgtgtgggaggctgcagccaggattgcctcagctcctccccctcaggctgggaggatagcacaggctaggggctcggggtggagggtctcagctctgctgcccccaccccagtactagcctagcttcccaagctgtggcttagaggatagttggcttcctgcctctctcctctaaaatagcaagtctgggaaatcctggggtgagtggagtcaccccactcccagttgctggcagagactgagactaaagcatcacttaataaaccccccaagcccaatccctgtctcctggtgcctgtctgtacagaagtttcattggggggtggggcactgaagatggcatcctgaaatgcattttggaaaggcttctttgaagtggatggaacagaacaagaagcaggcaatttgagtgaaggccctggagatggtttgataggcactgtcaagttccttgactgtaaactgaggcggtgcctttgcaggggtgatagtgaaaatctcttgccagcaacatcgctgcctggggttggttcgctgtcactagctgggtcctcttccccaagggggtggggaggtgagccttgaaaccagcctctggccaggcgtagtggctcacgcctgtaatcccagcactgggaggctgaggcgggtggatcacaaggtcagatcgagaccatcctggctaacacggtgaaaccccatctctactaaaaatacaaaaaaaaattagctgggcatggtggcgggtgcctgtagtcccagctactcgggaggctgaggcaggagaatggcgtgaacccgggaggcgaagcttgcagtgagccaatatcgcgccactgcactccagcttgggtgacagagcgagactccaccttaaaaaaaaaaaaaaaaaaaccagcctctgagtcctcaagtgcctgtcctgcaaggattggcatctcaaattgtattcggggggggggggggggggagggggaggtggtgagcctggtgaatcccccatgatagaaccaacatttaccaaaggcagtttgctctgagccctaggcagcaccaggtgctaagaggcagcaaagcatggtgagagatggcttctgaaatctgttctgcatttggggatttgggttcctctgccagcctaaggcagagctgtccccaactgctgggagaacctggaacgggaacactgctctgagtcgccggggggactctacagcaccatggccacatcctgccttgggcccctaccctgttctagccagtcagcacagggagtttgggtcgtgctggaggagctggctgtgtgcaggcggccgagtgagctgcctgctaatggggctgggccaccccgtgctgctccctggaggctggacaaggctgggattgttccctggctcccctttgtctccccactccccgcccaggcctggcccgcctgcctggccactcttcctccatcagcctggctggcagcagccttggactccgcccgtggagccctgggcctgttgacccaccagcttaggagcacccaccaagctctgggtaaggaagctcaccttctggggctcttctgggaaaatagaggtaaagcatcttgctccagccacccctcccccatttccatagcaactgcacacactccactccagagatctccaaaccctactactaagggaaggcaccgtgagggcagctagaccccagcgtattcctcactcctcccccagatagatgggcagcactcagggtaggggagacccccgaccatcccacttgtgggagcgagcaagggataccctgggaggccctcatccatctttgttctgctggggtgcagggactagggccaggtttgcctttgcccagcagggtctccagcacccatctcgggcagaggctgggggagtgactgctggtgcaagccccaaagtgcatgcggcaaaaacatggatgcagagctggtggcaagaagaggggctaagttatagagttgctgcaaagttttggcctggggaggtggggggagtgtcctagtcctcctcctggggcggctccgcctgcccagctggcccagcccctccacttgtgccaaggaatgtgccgggagaggcgggcggggcagcagagctgcggccacccggaggcagtgcacaggtctggggctgagggatacctgggctcaggaggggcagggaccccaaaattctcctgggggcacaagtgtagtcctcagagaaaagccaggcatccccctacctccttgtcccacctgatggcatctggcttctccagagattcggagtgccaagagtgttctgtgctcagttcaggcgctgtgggcgaagcacattctggtgggaaagggagtggtactcaggctgtctctgtgctggcctccaggagtcaggattcttcctgagacaaaaactggggcctgcggggctggatcactatttgaggcagcctcccggctgggaggaccccgccactctttgctgggctgaggccgccaagcccctcagtgtggggactgaatgccccaaggagaacaggggttggagttaagtggtgcaagggctggggaaggtggaccagcttccccaggcctgaaggaagcagctccaggagggagggtgccatctgcctcccacacgcacagcccatcctgcggctgaacccaggtgaaaggggcctgtggatgggggcagttatctgatcccctacctcccactctgtctctaggtcaacgtggaggtaccaggccaccatgctcagtctcaagctgccccaacttcttcaagtccaccaggtcccccgggtgaggggctccacccactgacccaccaacccccattccctagaggactgactaggggctgacgttcttctcttttagctattggggcagcccctcctgcaggcgaactcttaccctcccattccagtgtgagactcttcctctgttctctgaggaacaagcttgtggccctccatctggagtccccttccccagagcgccctgtgtgctgcgctccacccccatcccaccccaatctggctcttcggtttcctatttgttttgtgggttgtgggtactgggacctgtggtaacatcagatcagatttagtttggcttgggggccacgttgatctccagcccagcctctttgaccctgcttccagagatctcagatggagggaaagggtccgggcacagtgacgcccttcctctcccaccactaccctaggtgttctgggaagatggcatcatgtctggctaccgccgccccaccagctcggctttggactgtgtcctcagctccttccagatgaccaacgagacggtcaacatctggactcacttcctgcccacctggtgaggggaggctccgccccaggccgcggccttgagctcagagggggtacccaggcgggcagggaccgtccaggcccacgggctgcagcggcagtcgcgggggtccgcggcggcctgagcacgcgcccgccgcaggtacttcctgtggcggctcctggcgctggcgggcggccccggcttccgtgcggagccgtaccactggccgctgctggtcttcctgctgcccgcctgcctctaccccttcgcgtcgtgctgcgcgcacaccttcagctccatgtcgccccgcatgcgccacatctgctacttcctcgactacggcgcgctcagcctctacagtctgggtgagccggacaggcgcgggagcgcggggtctgggcgtcccggagcggggcgaggggtgggacgcgggacataggggcgcgcccctcaggcctcagctgcacgcccccacctcaccgcaggctgcgccttcccctatgccgcctactccatgccggcctcctggctgcacggccacctgcaccagttctttgtgcctgccgccgcactcaactccttcctgtgcaccggcctctcctgctactcccggtgggttcccaggcccctccagtggggacggggaaggcggaggcacaggagaggacacacctcactgctctcgaacagcactggaggcatcgggaccatgtactgaggacttcctctgtcagaccctttatccccacatacagatgtggtcctttacacaggaggtcatatgccctaacggttttcttagctgcaggctgtgctgatattccatctttgcccaagtcctcttgcctttctctgacccctaccccaagcacagcgatggtgaccggccttttcctcccgcctcccagtttcctggagctggaaagccctgggctcagtaaggtcctccgcacaggagccttcgcctatccattcctgttcgacaacctcccactcttttatcgggtaaggaggcctagggcccctgcccagactcctgctttcctgtcctgaccctcaaggtgcccacttccagccctgccccctcagtccctgcctcagcccagccgcctctcttggggtccagcaccccgcctagctgtgcccgcccgctctgcgtcctcaccagatcccagacacaccccatgtttcggctcccgagtccctccccagcagccttggttttcctttgacagctcgggctgtgctggggcaggggccacggctgtgggcaggaggccctgagcaccagccatggctaccatctcttctgcgcgctgctcactggcttcctcttcgcctcccacctgcctgaaaggctggcaccaggacgctttgattacatcggtgagggcacgcctggcccggcccgggaagaggcaggggcagatgccttcccagagcacagaatgaactgggtaaatgggtattacagccccaggatggaggcaaattataggagggacttccctgtcttcctataacgagagcatcactggaagggtcctccacctgccacttctcaggtagcaaaactagtagcatgtgtgctggggccacatgcacacatgctcattcattcctttcagtcactctgggagtcagggtttcttattctcaatttatgggggagtagcaggcccagaggatggggtgacttgcactgggaaaggtgtggctctgacctgcccatcctctccacaggccacagccaccagttattccacatctgtgcagtgctgggcacccacttccagctggaggcagtgctggctgatatgggatcacgcagagcctggctggccacacaggaacctgccctgggcctggcaggcacagtggccacactggtcttggctgcagctgggaacctactcattattgctgctttcacagccaccctgcttcgggcccccagtacatgccctctgctgcagggtggcccactggaggggggtacccaggccaaacaacagtgaggccccatccctgaccctgtcctggagggggcagaggccaggccccagtgctgacgaggagcccagatttgggcctaatcaggtggggacgcatctcagcctggaaccaacaggggctgaggagagagggcacaggagagagggcagagaagaggaggggtgtctagggggactggcagagtgtgagagggaccgtgagggggctcttgatgggagtggaagaagtgctgagggtctgagaggggagatgcatgcgtgtccaggctgaagatgcccctatattctgtcaaaggttggcggggggaggtgttggggtcctttcatctggctccgtttctggtgcttctggaagtctctgctcagcacagggaagaactaacacgactaacctaggcctaccctgaatgcttcttgctaaccaggccgagaggccacacacttgcccccccatccccacaaaccaggtaatgccagtttgccagcagctatttgcctatagagatgagtctgtcctggtcataactgtgtgctcaaggtgtccaggcttttgggggtgggcctatctgggtgcattatggatggtttggtggattgaggtgtggggaggagggtcctaggctagagggggtatccctagttagactttgggaagccaccttcaacgttttctggaacaaggcaggtacaaataaaaaaataaaactttggaaagcactttctagaactgaagaaggtaaaacctcctcacccccatcctcctgacacctccctcccacactccataaactggacagactcacaggcccacagattcctcttctggagtttatttgggagcagctgggatgatggggaccccacatccatagggctgggaggtcagggcaagggcaaggggaagaggaaagaagggtgcctggagaggagcagaactggggttgccggccaggccagcagagcgacaccctagaccgggccgtagaagcgccgataggcctcctgaaagccgatgtggtcagccaactcgtcacagtccggattgagctcacacacctccctcctgggctccaggggatccgggtaggggactggggctctgagacacccgacgtggtggcatcagcccccgtgcaaaatgcccatccctcctctccctacacatggggctccagggtgcccaccagggcaggctgcctgtacccccaccacaacccagagaggccactccctgctgcagctcccccacagaccatcccggagaggcagggccttggcccagctctgccttttctctcaccccagccattgatacaggtagcgcctgggtctcttcactacctcgctgccctcctgcttggacacaaaggctgtggagcagaggggcaggcatcaggtggctctgggtttgggaggatcaggtggggagcaggctggccttcctgatggccagacaggaggtggcaggagtgggggaatgagactgagggaccagggtgagaggggagggtccaggaacccatcaggtccatcctcatacctgcacctttgctggactctgcaccgctgggcttcgcacctgcaaaggaaagggagcctggttcaccccagctcatccccagggccctcatcctccttcccctgcgtctcgggcagcttgctcttccctcctctccctctgcaagggcagagctggggcaaatggattgagcctgcaacaaggtggttagactgcaaagggactgccagccaaaggggtgagaagaggtgggccatggtgcttcctcctctcagcccccactgcaatgcggcctgaggggaggtgggggcactcacctgcctggccagcgatgcaaagtgcggccagggccaatagggcgaggagtgtgagggctctcatggtgtctcggtggctgcgctgggctgctgctcaggactcagctggcctgccccgccagcctccagcac

SEQ ID NO: 11972 - DNA, 26427 bp, Homo sapiens; identical to SEQ ID NO: 11971

SEQ ID NO: 11973 - DNA, 104 bp, Homo sapiens
ccagcactttgggaggctgaggcaggtgaatcacctgaggtcaggagtttgagaccagtctggccaacatggtgaaaccccgtctctactaaaaatacaaaaat

SEQ ID NO: 11974 - DNA, 447 bp, Homo sapiens
ttttgagatggagtttcactcttgttgcccaggctggagtacagtggcgcaatcttggctgactgcaacctccgcctcccgggttcaagtgattctcctgcctcagcctcccgagtagctgggattacaggcacatgccaccatgcctggctaattttgtatttttagtagagacaggatttcaccatgttggccaggctggtctcgaactcctgacctcaggtgattcacccgcctcggcctcccaaagtgctgggatttcaagcatgagccactgcacccggccgtaatgattcttggagggtgccaagagtgacatctccttggcagctcatcctatccacagggaacccaggggtcctggtttttgtacaaggggctctgctgctctctgcacatgatggtctagtaagccccttgccaaaccaccccagcctggatgctccc

SEQ ID NO: 11975 - DNA, 111 bp, Homo sapiens
agacggagtctcgctctgtcgcccaggcaggagtgcaatggtgcgatctcggctcactgcaacctctgcctcccaggttcaagtgattctcctgcctcagcctcttgagta

SEQ ID NO: 11976 - DNA, 134 bp, Homo sapiens
tgcctcagcctcccaagtagctgggacaacaggcgcctgccaacacgcccggctaattttttgtatttttagtagagacggggtctcactgtgttagccaggatggtctcgatctcctgacctcgtgatccacc

SEQ ID NO: 11977 - DNA, 26427 bp, Homo sapiens; identical to SEQ ID NO: 11971

SEQ ID NO: 11978 - DNA, 26427 bp, Homo sapiens; identical to SEQ ID NO: 11971

SEQ ID NO: 11979 - DNA, 104 bp, Homo sapiens; identical to SEQ ID NO: 11973

SEQ ID NO: 11980 - DNA, 447 bp, Homo sapiens; identical to SEQ ID NO: 11974

SEQ ID NO: 11981 - DNA, 111 bp, Homo sapiens; identical to SEQ ID NO: 11975

SEQ ID NO: 11982 - DNA, 134 bp, Homo sapiens; identical to SEQ ID NO: 11976

SEQ ID NO: 11983 - DNA, 26427 bp, Homo sapiens; identical to SEQ ID NO: 11971

SEQ ID NO: 11984 - DNA, 26427 bp, Homo sapiens; identical to SEQ ID NO: 11971

SEQ ID NO: 11985 - DNA, 104 bp, Homo sapiens; identical to SEQ ID NO: 11973

SEQ ID NO: 11986 - DNA, 447 bp, Homo sapiens; identical to SEQ ID NO: 11974

SEQ ID NO: 11987 - DNA, 111 bp, Homo sapiens; identical to SEQ ID NO: 11975

SEQ ID NO: 11988 - DNA, 134 bp, Homo sapiens; identical to SEQ ID NO: 11976

SEQ ID NO: 11989 - DNA, 15987 bp, Homo sapiens
cttcacaaaagtggactcatacgatatctgtagttttgcgtctggcttctctatttaattcttaaaggggggtgggaactaaacagatcacaagggagctgcccacagaggtaaagacaaggtcagataggctgagagacgcaggaaagcgggtcaatgtgtagggctggagggcaggggcgggccctgggcctgggctgggggtcctgccccggggcgcacccagggcgagggctgcccggaggagccgaggctggcggacagcttggccctgagcttgaggggaaggcagcgatgggacaaaggacggaggtctaggaagagggtctgcagagcagaaagcacgggtaggggcggcctgacgctcggaagacaacggatgggagccgtgtgcacgtcgggagctcggagtgagcgtgagttccgtgcccaggcccgcgactcggtccaccaggacagcgctccgggtcgacggggtcctggagccgcgctcggggagggcgcagcggagggtgagcggcggcgttaggacccggaggcgcgggcggaggtggcggggctaggacccagcggctccggcagagcggaagcggcggcgggagcttccgggagggcggctcgcgggtgaggaggcgtccggggccgcgggaagtagggtcgtgggggcctggcggggcgaagtaggggacccggaggggctggagggaggcgggcgggaggcccgggaccgttcctgaccgagaagcctgcgccaagctggtgttccgcggccgctgcccggtgcccggctccactgcgaacgccgccgctgggccccgaccgcccgggaggcgtcttgggctcgccccggagcttcctccctggagccgcgccctgcacccggccttgcccggccctagcagggaagccaaggcttgtggggcgcagggacccgggctctgcggggtcccggttccgcctccccactcctgcgtcttcccgccccggccgggttctgggaagcctcgcgcggctcttccgcagctgctgcccgcccggatctcctggtccctcgtaggggaccccacttctctgacaccgcgttgggttcccggggcctacagcgaggcctgtaactccgggagagaccctggagcggggtgtgggagaacggtctggaggaagggctccgagcacttcgaaagtataaaccgcggtcccaaagaggcgtgctgtgtctgcattttcctgggagtgcacggtttacattctgtaaagcagtgctgtcgactagaaattttgtgcgatacacatgtacaagttttgtcacttaaaaagaatttgaaaaaacttcatagatgcaaaaaaaaaaacccaccattattaaagaatacttaggcatttgtggaatgcattgaagagttaacaaaatggataggcaggaaatatcgcagacctagagtgaattacagttacccactgtggaactgaggagctagggtttctcataaaactccctgataggagacgacttttgataaaaatttttttccgccaacaaaatcccctgtcttctccactagttattgtctgtccactaaataagaggtggtccgtcacttcttcagatgagcaactacaggcttttcaaaagataattgctaatcaacccctttgtgcctgggttttcttatttgtaaaaatagatactactacctaactccaaagtgtgtggtgaagacaaacaactggggtgatgtatactaaagtaacgaaagtgttgaccacacactacgggctggttagtgttagattcccttgtttttccctcagtatcaaaaacagatctaatttaggtttacataaagacaaagtatgaagataaggtgacttacagttggtactactaacaaaatgggctaagatttgcattattgcatgaaaacaacaaaacatatcaataaataacaaaaagcttggaattcagacaacagatcaagtctgggcttgatctcaagctagtgttttgatgttgaaaaaatgttatttggtctttctaaccccatttccttatgtaaaattggggatgataaattcactgataataagagttaaatgagattcttgaggactcagaatggttctaacgtgtaagtattagcagtcatactgtagcataagaaaataccgtctgctgaaagaggaacaataaagattatctacatggtcatcatttaaaagctaccagatataggaagaaggggccataaaatgataacgttatgatgattaattttgatgcttaggtcagagtccattctaggatatctgctgcccaaaaacagcagagactcatttctttggaatcacaggacgctgagtgagaggaaagaaaaagaaaagaaatatttaagtcacatatgtgatttctaaaagtaaaaagaaacagatgaaattagtaatatatttttaaaatccagtatatcccaagtatggttattttagcatgtaatcaatataaaataataagatattttacattctttttttctagtctttgaaatttggtgcatattttacacttatggcacatctcaattcagactatccacatttcaagtgctcagtggctgcatgtgcctggtggctaccatattggacagcacaggtctaaggatttcattcctgccacaagtccaaactcctagctttaattttgagtgtttttaacaaactggcctctgtttatcattctttcttctagtacttccccaaggatgattgtaccctcagcactcaagaccgcttgcggtttccctacacactttttgttcaagctgtttcttttacctggaatgctgtctttgcaccttcttcctggacctggttcactcttgttgcctaggctggagtgccatggcgcgatcttggcacactgcaacctccacctccccggttcaagtgattctccttcctcagcctcccgagtagccgggattacaggcatgcaccaccacgcctggctaattttgtatttttagtagagatggagtttcaccatgttggtcagactggtctcgaactcccgacctcaggtgatctgcctgccttcgcctcccaaagtgctgggattacaggcgtgagccgctgcgcccggccgagaggcacacattctgctaagagctttttcctgactcccctaactccaagagggatttgtcactccttagctttgtactcatgactggagtagaatgaatttaatttgagtttagttgtttttgagactctccctggctagtgtagtgtcttattcgtctttgttgtgatcatggcctgcacctaacagatgatcagtagatgtttgcagacagaaagtaaaccactcatcaggtgtattcagtcccgttcttgaacgggcttgctgcctcctttttgaggagatctgtgtatgtactcttctttcacgcatatgtgtgagcaaacacacacacactaacaagaaattcatctgaagatgtgcacaggaaatatcttgcatctttaccccctttgtgatcttacatatgggagaactgaggcacagaaataagttaggacagccagcaaacttgcatcagtataaatacaaagaagggaagggaggaacatgcttgaaaggggtgtgctggtctcagagggttaggtttctcagttggctgggcatcagctggccatgctttagttatttgatgggaggaaaaataagtgggaggtgaggagtaactcctgggctctgatgagtattataggcaagtacagatctggaaagcctgtatgcaaaggaggaactcactgaaaagtgctggcctgaggagggcagaagggagggctggggaagccagcagggggagcaaaggagtaggctccagctgggtgaagatgttggtgtggtatgttatgtaaaatatacaaattattattgggaataaccacgtctcagcagtgcgagttctcagtttgaagaatgggaaatggaaaggatcagattcagagacggcaacttactcaaggtcacagcattttaaacccaaatgaaatctcctaggcccttcatgccacactcatccatccctacctacttgtgttgcaaccaagggccccactgtagtgcctaggggagcaggtctagggcatagtgccaggcctgattaatgtcttccttaccattttccagcgaggggctgtgattaggcctatttataggggcctggtcccttaatattctgcctggtgcatctcttgccaatcaaatcagtgctgtctgcagtgtgattgctgctttagtggcaccagggagaggagttaattaaacccaatataaatagactctgccctcactgtgcaattccaggagtgtttttccttcctgtcctctacccccacaggcacctctttcctcttggccccctaagctctagcctgggtgagcagggctggatactcctatacctagagtcactagccactgcccagtctgtttcaggagcaggcctcaaattcctcaggggttaaagtgggaagaacccgtgtgtgcgcattttttgtgcttttccagaactgggtaccatttggcagttgatcacgcaatctcccccgctaccccatttctacccctttgtttccagcctcttctttcctctgcaaccaaggtttcttgtttatccaaggtggggagctgaactgagacaatgtatggaaagggtgcctggcaggtagcaagcaccttgtagggggtcagaaatgttgcaccttctctgaactcctccattgaccctacagattccccagtccctggccctgccctttccctcattcactcagcaggcatcagcagagtcccatctatgcgctcctggcctctcagcaaatgctctgtcccctactcccctatctgtgcaggctgaagctatgtgcatagttgggatgagggctgtgttgtctcaacaccacgctgccctgtggtgggggcgtgccggtggtcgtgggtggctctgatgctccggctccgacccacaggcaccatgactcctgtgaggatgcagcactccctggcaggtcagacctatgccgtgcccctcatccagccagacctgcggtgagaggaggccgtccagcagatggcagatgccctgcagtacctgcagaaggtctctggagacatcttcagcaggtgggtgctgccactcacccccacctgatgagagggccatccctgtcctgggcaatcccagcaacacaccctctgggagcagcccccttggggaatcccggtcctggggaacccatctggcttccctgtgtgggaggggctgaagtgagagcccaacttggaagcttttactcctgggagtccgagagctcactcccttccaccccacttagcctcctggtttcctgtggtggctctgctctcacaactcatgcttttcctcccattggagggcctattccttcacgttttcctgcagccaacaaatatttacccagtagtgctcgtgtgcaaggcagtgtgggaatctctatatatccagccacggataaggcaacatacctctccacctggagcgcacattctggcaggagagaaagacctaaataagcaatagatgattagttcttcaataacagttgtgacaaggtctattgataatattttgtaatcactaatattcatataaaccgtgcaccaccattgatttgagtgcattaactcacacttcatgagcaggcactgccgtcatctcattttatagatgaggaaactgaggcacagaaaggctgagagacctggcctagtgacagagccaggattcaaagccatagatcatggtcctgggttatgtaggttattactgcatctgttcaggggagatggggtactgtgaggctcgtcatgggaagcctggcttggtctcaggtcagggaaggcagatgtgaggaaatgacatttatggtaaagtctgagggttgagtgggtaggttgggaagaacattccagaaagaagcacatgaactacagcctggaggtggaggacctaaaaggaagccagcatggctggagcacggagtggccattgagggaggcgagctggagggctgcagcttcttgtattggcagtgctgacctcgcacagtccttgggctccagtgacttcactcagtgtttatctaacatgagtgagtgaatggtgtttgctgtttttttggcaaaggtcccaggggttgtcgggtacacaggtcctgtctttggccataagcaaactgaaatgaggcttggtctccttcccaggattccacaccatgcctcacatggtagaccccagcgggaagtatgtgactgcctgactcaggtgcctctcgtggtccaagccatccctgccctgtcccttccctggttgttgccagacctggagcccctgctccttcgctttgcagcctcctcttctgtcaccaactgggaacccacttcttcctgaaagtcctcccccacggactcaccggcttgccccaagcttgtcaagaatgtcccagtaaccaggggacacacactgaagtgactgaggggttaccttggagttgatgccttggctcagatccagctcccctgttttcttcctctgtaaccttgggcaacccaacccctctaagcctcggtgttctcatttgtgaagttgtggtaataatggtagcttcctggtagaattattgtaaatattaaattaatcaaaacatgcaaaggaatggaacagtgcctggcacctaggaagccttcaggaaatgctatctcttccctgttgataatcttgacccgtacactgcctttggttgccattcatgaacctgccaccaatagtaacaaagtgctggatgcaccttttgtgcttatctttgtgctaaatgtgcccgagggaagcctagggaagaggatgcaggtctttaagagccatcagctccagattatggccaccccatgtccagcacttagaatggaggccaaaaccattccctcggaaattgtgtttccttgccaagatggggactgcgtggttgcccttctctgagggcagcgctggatttttggcgtctttcctttcctgtcctggtacttggcaccttgtagacagttgcatgtcccctgcccagggatgggatgaggagagggcaggaaggcatttcctgggtagtggagtgctgcgttcattgagtgtgggttctccaagctgctggcacagcgcagggagggccagatgcctctcaggagccttgggcctgagtcctggctccctcactcctgggttccaggtcactgcatctgtctctccaccatgtgctccacctcgtgctggaccttaagagataccaattatgtggctgccactgtgtcctagaggctggaatgggaacacatagggcgagattgattgttaattgctagcatgaaccgcgtgggcttctcagggtctagagtggagagaaatcggtaagaattggtggcacgcctgtcagaactccccagaccaagctaagcagaaattaaccaatcagtagagcagccttcggagtaagggctaaaatgatgtcctcagggcctggttttgctttccttccatgtcagtttgcttctttgggtctggctgcattcccagacaggccatgctgtcgtggtagcaaggtgacatgacacagggtcaggtccagcaggaaagaatgctctcctgtgtccccacttcctccagaagccacactcacccatcccacctggcttggtcctcatgtctatcccagaatccattactggggccaggggactatgacacaaccacttggcttagactgaggagctctgtgggcagccccacctgaagctctgggactaagcctgcgagagagatggattccccaagggaaatggggccattgcttgagtaaaaaggaaatagttgctgaagaggaaaaccacgtgcttactccacacagggcagactcctggaagaggggggcagggtagggaggtggatatgcaggttgccctggtggggtctggaaatgggggccgcaggcttggagggaggcctcagtgtggcttggaacgtggtgtatggtggtctgccgcgaaggccggcctgcacaggggtgggaggggggtgcttctgcatgggaagcacagacagcgctgcctctcccttgcactcagctctcggggcatgagaggctgactttccgtgagcctgtgggccaggcctctttgaatggggctgagggagctttgccctggttcctttgtgtccccacggtgccacgggaggctccctggcagggtgtggggcaaggcagtgagtgaagagttgggatgagtgagttagggcccacggattactcaagacaggacttcacgttgattcaggagtgttagggagctgtgattggattttgagcagggcagggatgggacagaagagtttggggaaggttcctcaggcatccgtcacggaagggataagaagggagagagagtggatgccggggacacccagaagctgttattgtagtcaggatgtgacaggggtgaggctacagacaggggacttgcaagcagggagggcagggtgagacattcagaggaaacgacgacaggaaatggtgacagatagggaatgaggatgaagggaagggagagccagtgacgactggcagtggagtggggagcaccgccacctctcctcctccacttgcccctcctgtggcactggacaagttagtgggcttttcgttgtccatgggcttttttggtggggatgtgaccagctttgaacccttccccttaaacatgctcctcctgcacggaagagacaggggcaggggagagactctctccccaccacccagctcaggccccagcacagcccggcttctggcctcactggcgtctgtgcccagtgacgcaggcaggtgagctcctggcaaattagcattgcaggctgtgctctctcctcctgctctgctgcagctgggagtgtgcagagactggaggggatgacagtcacccctctgttttctgtggtggctctgttttctgtggtgctggatgcacctctgttttctgtgttggctcccagagagtgcacggtccctgctgattgaaagaaggatgaagggcagaagaggggcggggagctgtgtgccctaagatctcattgcctttttatgccgattaacatgcttttagcccctactgagcttatagttaacagaagtttccaggtctttcttcacctgaactgtgtctaaagcaagttccctccaccttctgtatttatacgcttgatttttaaaacctaaatgggcttcacatttattccttgtaaatttcatcttggtgattgcagtctaccctctggcctttaaaaattgtctgagccttgattcgatcatgaaaccagcttacccttcccctgtgtgctggccccagttttctaaccaggtgttgaatgaactgccagatccctccgtgcaaggctggaatcagtccattgttcaactgtgccctttggggctgtggttcatttggctctgatttttcctatatgttctctcctccaacccccatagctccatcttgtctacaagattttgttagaagccgtcaaaatcctgctgactcgagatgcactgtgctgcatgttttccccgggcacagcaggctaataatcctgttacaaagagaaatgctgtacatttcgagcagtgctggcccctgggactcaccgtggccttttctaagtgcttacagactctgtttaataatccattccagaaattttccagggctcattgttgagcttggtgttcgcaactttgagtgatcagcccttctcctttgtgggagcaccaggacagagcagcctttgtccctccccagtctcagttccctcccattgcccctgtggacctcgaatgcagagcttatgcacctactgaaggtcgtgtcagcacccaaggcagaatgaggctgtcctgggaactagggtaaattaaaacagcttgtgctggaggaccctttacagcagatgaaggcctctccccagccagaaaagatggagcacacgctgggtggtggccccgcttcctcactgaaaggagatggtgctcttcttttttctttctgaattgtggccaccttcataccagtctgtcatggaacacttaagccgcttgagtgcctgctggtactcccagccctgccatgcctgagccccctgcacacaaggagccaggagtaatcagggcagacccattagggcacggggacttctggattgtgaaattggctctctgggggccaaggccttctaacgttggtggaagtggctttggcttattgggtcggattctaggccattcattccaacctttagagacatcccagctttccctagcccagagtctgcagcccctccaccatcccacatcctccccctccctttcctcatgaaccccagtcgcgcctctgccttctcaaacccctccaccatcccacaccctcctcctgcccttcctcatgaaccccagtcgcgcctctgccttctcatccctgcgcaccacacaggctcgctcgtgcccggtgagtgctgaggctgctctgcacatggagtgtggccctgtgggcaagggctgggctcttggaggtaggggagctacaggggcgactgggaggaggatgtcgtgttacacacgcatcagagttaactttgcagtgagagcggccttgctgcggccaaagaacatggaaaagcatgagtggggtgatgtgtgccttaaagcatcagacacttgggcctcgggcatcaggagccagccacagggatgtctggggaaatggcgttccatgagatgcaagcacacaagaatgcacttggcacatctggggaacagcaggcagctgatatcactgggcccaccctgcaccagggaggatggaagcaggtgaggagctagaccacactgaggcggtggtcgggactcagggtttgctcagtgagccgttcactatgtgcaggggcagttccccgtctgaatttaggtgacgacactcaggtccagccttgccagtctcagcctccggtctccgttccccctctgcagaggccactttgtctgctgcacgtgatcatgaggggctgtgaagtgcttgccccatcagtagccatgtgtgcatgtgtaaataccatcctctgtgtgccctggaggctgtccttcagatagcatgtacaggtggcagcatagggcctgtccctactgagagtgcagggaactcagcaccgtcaactcctcgaccctgcaggtcagattatccttgtagaggccccctggatggcaccaagatcggccctggcaagcaggtgaccctgacttcagagcccttgcctgagggcctggcctggcagctctgctgttagaagcaggaggtgtgcagggggtggggagcagcccagcctctgtgatcttctccatggcaggatctcccagcaggtagagcagagccggagccaggtgcaggccattggagagaaggtctccttggcccaggccaagattgagaagatcaagggcagcaagaaggccatcaaggtagtccccatgcccctgtgtcctgaggctactgggcagtccctccatttccccgtgcctctgaggctgcccagtctctgccctgctgcccacctgtaccttgggctttcttctcgcccaggctcccaactccaccctcttcctgccaagcaatcctagccctctgagcctcttggggccccctcagacttgtccctgtgtccacaggtgttctccagtgccaagtaccctgctccagagcgcctgcaggaatatggctccatcttcacgggcgcccaggaccctggcctgcagagacgcccccgccacaggatccagagcaagcaccgccccctggacgagcgggccctgcaggtctgctggctgcgcacataacttagcctgtcacacaccaggaggactggatgctggggaggagccggggccaccatagggttctgtcccccagaggaggctgactgggatggggtggcagctgattaggcccagcaccaaatattcaccatcccttggccatcctggccctcccaggagaagctgaaggactttcctgtgtgcgtgagcaccaagccggagcccgaggacgatgcagaagagggacttgggggtcttcccagcaacatcagctctgtcagctccttgctgctcttcaacaccacctagaacctgtatggccagaaggcagggccgaggggtgtgggcgggaggcccggcctggcttagtggggacccagggcatcagacacaggtacagcacatgggccaggagccagggggtgactggggtggctcggctcgggaggcttgggaccccaagtgcacgctgtgcccctgatgatgtgggagaggaacatgggctcaggacagcgggtgtcagcttgcctgacccccatgtcacctctgtaggtacaagaagtatgtcttcctggaccccctggctggtgctgtaacaaagacccatgtgatgctgggggcagagacagaggagaagctgtttgatgcccccttgtccatcagcaagagagagcagctggaacagcaggtgggaggggtgggacagaggtggagacaggtgcagtggcccagggccttgccagagctcctctccagtcaaggctgttgggccccttattccacccatgggaggtgcacacaaggtcttgttggctgcccctgcaggtccctgtcacctctcacatgtccctgcctaatcttgcaggtccctgagaactacttctatgtgccagacctgggccaggtgcctgagattgatgttccatcctacctgcctgacctgcccggcattgccaacgacctcatgtacattgccgacctgggccccggcattgccccctctgcccctggcaccattccagaactgcccaccttccacactgaggtagccgagcctctcaaggtaggtgagctgggttctgggatgggagctgggccggggacctccctgctcacacaccttcttccctagacaccccacactttgtgtttcagacctacaagatggggtactaacaccacccccaccgcccccaccaccacccccagctcctgaggtgctggccagtgcacccccactcccaccctcaaccgcggcccctgtaggccaaggcgccaggcaggacgacagcagcagcagcgcgtctccttcaggtgggagcagctctttgaggccacctgatttctggcgtgctcagtgcactcgggtggattttctgtgggtttgttaagtggtcagaaattctcaattttttgaatagtttccatttcaaatatcttgttctacttggttcataaaatagtggctttcaaactgtagagctctggacttctcacttctagggcagagggagcctgaacaagtgaggctctgggttcctcattcctaattaaaccaatggaaagaaggggtctaataacaaactacagcaacacatttttcatttcagcttcactgctgtatctcccagtgtaaccctagcatccagaagtggcacaaaacccctctgctggctcatgtgtgcaactgagactgtcagagcatggctagctcaggggtccagctctgcagggtgggggctagagaggaagcagggagtatctgcacacaggatgcccgcgctcaggtggttgcggaagtcagtgcccaggccccacacagtcttcaaaggtctggcctccccagcgtggggctcctcgtttgaggggaggtgacttccctcccagcaggctcttggacacagtaagcttccccagccctgcctgagcagcctttcctccttgccctgttccccacctcccggctccagtccagggagctcccagggaagtggtcgacccctccggtggccgggccactctgctagagtccatccgccaagctgggggcatcggcaaggccaagctgcgcagcatgaaggagcgaaagctggagaagaagaagcagaaggagcaggagcaaggtgagcgggccctggagcctgcggtcggagggccttgggcaagatcgcctcctcccctccagccctgagtccaccgggtgctttctgcccaacccctgctcttgccagctggcccctgcttcccctagggcacatgctggaagccctgggctgccaccagaggtcctcagccctcctgcctgggctatggctccttcctggtttgggagccatagtggagctttcctctctaagctcacccagctcaaactgtgacaggagaatcttcttcgactgccaagagcggtccaaggcaatggtcagccactgcagcctcctgagatatttttagagactggacctgaggcctctggaggctactgatgatgcctgctgtgaacgcagacactggtgtgatgcgatgcctgcgcctgcagcggcagtgccctgggcactatggttttgagcttgtacccagcgctgcttttgccttgctctgtgaccccaggcaagctgcctcacctctctgggccagtttccccatcgtacagtggtgctgcacaccctggccctgtccccgaggtggctgggaggtggctcctcaaacagccgctttctcatcagtgcccagtgctgggtcagggatcgactgaggctctgagctaactgggaaacacagtggccttggagggctggggagtgtcatgggggtggggacagggagccaccggtcgcatgtgactgaactcttcaccccagtctgtgactttcccgttgcagtgagagccacgagccaaggtgggcacttgatgtcggatctcttcaacaagctggtcatgaggcgcaagggtaggaggcagggccgctgcccgccctgggccggcacattgtaattctgtcctgcctttttcttcctgtatttaagtctccgggggctgggggaaccagggtttcccaccaaccaccctcactcagccttttccctccaggcatctctgggaaaggacctggggctggtgaggggcccggaggagcctttgcccgtgtgtcagactccatccctcctctgccgccaccgcagcagccacaggcagaggaggacgaggatgactgggaatcctagggggctccatgacaccttcccccccagacccagacttgggccgttgctctgacatggacacagccaggacaagctgctcagacctgcttccctgggagggggtgacggaaccagcactgtgtggagaccagcttcaaggagcggaaggctggcttgaggccacacagctggggcggggacttctgtctgcctgtacttcatggggggacggctccacccagcctgcgccactgtgttcttctcttaagaggcttccagagaaaacggcacaccaatcaataaagaactgagcagaaaccaacagtgtgcttttaataaaggacctctagctgtgcaggatgcaaacgtctcggggtcagtgactgcctcctgcccctgttggtccctaggcagtgggggcagaagctcccagctgacctgtttctctgggatgagagggaggagagaagggcagttagcaggggcagctgttgcagatgggaggaatagtctcccacaaaaaaggtttcagtgacagacacggggtctctaaaaatagtcatgctgagagcctaatggcccttggcacaattgctggtgttggggtagaagatgtcttggagtttgctcaagtggttgagagggagggaggtgccatcgacttggaggaactggcaccaagccagggagatagacatccaggcaaggctgtggggcaggttagggagcaaggctgcaggagtgactcaggaagaaggtgggggaggtgacaagccccca

SEQ ID NO: 11990 - DNA, 569 bp, Homo sapiens
gactttaaaatcatacatttatccctcacagttctggaggcttggaagtccaagttcaaggtggcagctggacgggttcctggtgagggctctcttcctggtttgcagacagccaccttctcttcgcatcctcacttggtgggaaaagacagaggagagaaagagagagagagaaatgagatagagagagagagagaaatgagatagagatagagagagagagagagagagagagagagagagggagacagagagacaatgctctcttttcttaccagatctataatgagggccccaccccatgacctcatctaaccgtaattacctaccaaaggcccatctccacataccatcacattaggggttagggtttcaacataagaatttggagaggacataaacattctgtctacaacatgagtggagatccatctcttccttacctctggtaaggggaccacacgctgcagccagtgagacagtggcatgttcttgttacaactcaatctaactcccccagaagaggaggcagggaaggcggacaaaactgggagagggagagagtgtta

SEQ ID NO: 11991 - DNA, 1795 bp, Homo sapiens
ttctttgggattcccgttttctccaacgggcactaatgcctgtgcctgggtcctggcaacactctggactccacactctcctgggtttcacctttgtagcaggatccctgcagaccaggcccatgacaaacaccgtctccagcgggcagagcaaaggaagggcacagcgccaggcagtggtgcagctgcctgtcaggatgaggcctacttctagtgaaactgggcagacaaaaggcagtgagaaatgtgatctcggggtggtggaggctctagggaaaggaaaaggcaggagtgaacttccacacagcagcaatggcagaaccaaaggtggctttgacctccacgagggctcagatccaggccaacagcttgtccaggacagggtgccgggtgtatcactggtccaggagcactatgctggcagaatccctttggtgcctgatggccctgccttcgtgggaacagaggctaaggctttgagttacagctgcctccccaacagtgcatccccttctccctcctcagcctcaggtaggagacagggcaggcaaccccctttcctcttctccccttctccagcccctgtctgtccacccagctggaggcagccaggcttgcctatggactggttgacagccttcatgcagaggttctccaccagagcctttcttgggggcccctggcctgggctctgagctgggagtgaaggggatgacccatgcggactgtttgctgcttgtagctttccctgggaaagactctgccaggccttggagccagaccaggaggctttataaggccaccgcaagcagcagggctccagatgacatcacagggaagatcaagagggtgtggaggggcatcgaagcctctccaggagacaggagacgctggtccagtagagccctaggggcgacgccactcccactcactgtctactctcctctcacctctgcaacactggggacactcacaagagtgtgatccaagtcggccgtcgtcttctgcagctctggagacctgatgctagggaagggcatgcctggcatcaccacacacctggggggagacaggagcctggggccggtgggcccacacatcaccagctgctccgttctaccatttcttcagccctcttggctgtgcctgcagctctgcccctcccctctctgcacctaccacccagagagggcttgttgagctcagagatcccacctaggccaatccactgggttctgcggcagcgatggcctgcctgatcttccacctgctctcccagggccaaagccagacctgctgagcccctccctccagccggctggtctgagcagtcacagcccggctttgggctccgatggcagcagacggcaggtaggggtccagctgctggagcgagggccggccacctatcacagccaaggagatgagcacaagcactacttactggcctaggttgtcagagaagttgatgctctcactcatctttcctccaatctttcccctatgcctggttgtggtattaagttacatgcagacaacaggggccagaagatgaacaatggcccatcccactctaggcatggctcctctccacaggaaaactccactccagtgctcagcttgcaccctggcacaggccagcagttgctggaagtcagacacctgcagatcaagaccacagcatcaagaccctgtgacctctcaaaggaccggtggaaaggacacgggaagtctgggctaagagacagcaaatacacatgaacagaaagaagaggtcaaagaaaaggctgacggc

SEQ ID NO: 11992 - DNA, 3787 bp, Homo sapiens
gccgagatcttgccactgcactccagcctgggcaacagagtgagacgctgtctcaaaatctcaaacaaacaaacaaacaaaaaacaaacaaacaaagcgtcatttatccagcacccctggggaaccatgctacctggtgttttatggtacctggcaaggtgcaggtgaagttgctgctcttgggcattgaacccgtcttgtttggggcagctcaggccccaggcagggtccgggttggctctcgttggtgtggccctggcccatccagacctatatttctgccgtcctgcaggtgatcaatgttgatgggacgaagaggcggaccctcctggaggacaagctcccgcacattttcgggttcacgctgctgggggacttcatctactggactgactggcagcgccgcagcatcgagcgggtgcacaaggtcaaggccagccgggacgtcatcattgaccagctgcccgacctgatggggctcaaagctgtgaatgtggccaaggtcgtcggtgagtccggggggtcccaagccatggctcagccatgcagacttgcatgaggaggaagtgacgggtccatgcctgggcataagtgttgagctcaggtgccccgacctggggaagggcaggacaggaaaggtgacagtatctggccaaggacagatgggaagggaccaagggagctgattagggagtggttatggactaggaatgtcggtaacaatggttagaaagtgactaacatttgttgagcacctgctgtgtgcccggccctggccgggagccttcgtgcccacagtgaccccgtctgcaaatgtagttccttgccctactcgcactggggagcaggacgcagagccgtgcaactcacaggtgccaagctcaggactccctcctgggtctgcctgggctgggctgtgcttgttgcccctgtggcccacgcatgtgcaccttccacctgaaagccaggatcttcaggacgctccccgaggaggtcgttgtctggcacaatgatttgtctcttcctgaaaaggtgacagagttacactggagagagcagcatccaggtgcggcagggacaggcctggggctcgcgggcagggactctgtgtcctgccggggtcccacactgcacctgcttgtcagaggcactcagtcaatctttgctgatgaaggatgagaggacagaggacgtgatgcttgctgctgcattgcctgcagtcctgggtgagatgcccgggttgactctgctgcccgtcgggtggatgtgatgtcagatccccggctttaaaatacgagggagctgggaattgagggagcaggttggggcagaaagcacagccccgtggaagcctggagctgaggcagtgtgggcgacccctggagcagtgagtgcttccttcatggccttcatcgcaccctgcagtcctcatgtaggggatgccatccatgaatttagttttcccagcctcctttaaaaacgcgttcatgctggggccggggcagtgcagtggctcacatctgaaatcccaccactttgggaggccgaggcgggtggatcatgaggtcaggagatcgagaccatcctggctaacaaggtgaaaccccgtctctactaaaaatacaaaaaattagccgggtgcggtggcgggcgcctgtagtcccagctactcgggaggctgaggcaggagaatggcgtgaacccgggaagcggagcttgcagtgagccgagattgcgccactgcagtccgcagtccggcctgggcgacagagcgagactccgtctcaaaaaaaaaaaaaaaagtacaaaaaaaaaaaaattagtctgggtgtggtatcacgcgcctataatctcactactacgagaggctgaggcggaaaattgcttgaacccagaaggtaaaggttgtagtgagcccgtatcgtaccactgccctccacctgggcaatagagcgagaatttgtctcaaaaagaaaaaaaaaaaaagaacatttatgccaggtgtggtgggtcatgcctgaaatccccagaactttggaagactgaggcaggaggatcacttgagcccagaaatttgagagtgtcttccctgggcaacatagagagacctcatctctaccagaaaaaaaaaaattagcccggcatggtggcatatccctgtggtcccagctacttagggggctgacgtggcaggatcacctgagtctggaggcagaggttgaagtgagctgagatcatgccactgcactccagcctgggtgacagacagagaccctgtctcaaaaaaaaaaaaaaaaaaaagcatttactatccaccatggaaggtgagactgacctgtgagtgattgttcaaagaacaaaaaataaaccccagagataagacaaaagggtgcctccatgggggtgtgatttaaagctgagaaattgggcttcttccccctcccctctcaccccgtggtttgctaaaggagatgggaaaaaggattctttttttggctgaaatatttaacactaaattaaagccaattttaacagcactttggttgatgagtgaaattaacagactggccaaaaataaacgaacggtctgtactatgtgaaaaagaggcagctttggccatgctgggccaatgtgagttttcagggttgctgggaatgtctgtgaatcggaggaagggcctagctgggactctcaggagccaaggccctgaggggcaacttgcctggtccctgccctgaggcgttcactgctttcttcctgggccagatcacaggcccggaggctggaccactgggctggcactcttgccgagctgctccctgacttcctgaccatgctcctttcagcagccttgctgcactttagtttccttgaatgaaaaatggggatgagaatagctcctacctccaaggtgaatggagtgagttcggacaggtgactccctgggaccagtgcctggcgcctgacaaggtccagtcagagcccgcactgctgttactgatacccttggctgtaccaggggagaacttggttgccattgccaggtgttctcccaccacccccactactgtccctgtttgatgtgtggcgggaataaagctgtgcacattggagcttttggcacatcctggctttcaggtgaaaggtgcgtgtgtgtttgagggtttagcgctggccaacccagccatgaggtcggacctgacccaggggtgagtcctgagctcggcacccctgagctgtgtggctcacggcagcattcattgtgtggcttggccgcacccctttccctgctgggctgttgatgtttagactggagcctctgtgttcgcttccaggaaccaacccgtgtgcggacaggaacggggggtgcagccacctgtgcttcttcacaccccacgcaacccggtgtggctgccccatcggcctggagctgctgagtgacatgaagacctgcatcgtgcctgaggccttcttggtcttcaccagcagagccgccatccacaggatctccctcgagaccaataacaacgacgtggccatcccgctcacgggcgtcaaggaggcctcagccctggactttgatgtgtccaacaaccacatctactggacagacgtcagcctgaaggtagcgtgggccagaacgtgcacacaggcagcctttatgggaaaaccttgcctctgttcctgcctcaaaggcttcagacacttttcttaaagcactatcgtatttattgtaacgcagttcaagctaatcaaatatgagcaagcctatttaaaaaaaaaaaa

SEQ ID NO: 11993 - DNA, 12803 bp, Homo sapiens
gccgagatcttgccactgcactccagcctgggcaacagagtgagacgctgtctcaaaatctcaaacaaacaaacaaacaaaaaacaaacaaacaaagcgtcatttatccagcacccctggggaaccatgctacctggtgttttatggtacctggcaaggtgcaggtgaagttgctgctcttgggcattgaacccgtcttgtttggggcagctcaggccccaggcagggtccgggttggctctcgttggtgtggccctggcccatccagacctatatttctgccgtcctgcaggtgatcaatgttgatgggacgaagaggcggaccctcctggaggacaagctcccgcacattttcgggttcacgctgctgggggacttcatctactggactgactggcagcgccgcagcatcgagcgggtgcacaaggtcaaggccagccgggacgtcatcattgaccagctgcccgacctgatggggctcaaagctgtgaatgtggccaaggtcgtcggtgagtccggggggtcccaagccatggctcagccatgcagacttgcatgaggaggaagtgacgggtccatgcctgggcataagtgttgagctcaggtgccccgacctggggaagggcaggacaggaaaggtgacagtatctggccaaggacagatgggaagggaccaagggagctgattagggagtggttatggactaggaatgtcggtaacaatggttagaaagtgactaacatttgttgagcacctgctgtgtgcccggccctggccgggagccttcgtgcccacagtgaccccgtctgcaaatgtagttccttgccctactcgcactggggagcaggacgcagagccgtgcaactcacaggtgccaagctcaggactccctcctgggtctgcctgggctgggctgtgcttgttgcccctgtggcccacgcatgtgcaccttccacctgaaagccaggatcttcaggacgctccccgaggaggtcgttgtctggcacaatgatttgtctcttcctgaaaaggtgacagagttacactggagagagcagcatccaggtgcggcagggacaggcctggggctcgcgggcagggactctgtgtcctgccggggtcccacactgcacctgcttgtcagaggcactcagtcaatctttgctgatgaaggatgagaggacagaggacgtgatgcttgctgctgcattgcctgcagtcctgggtgagatgcccgggttgactctgctgcccgtcgggtggatgtgatgtcagatccccggctttaaaatacgagggagctgggaattgagggagcaggttggggcagaaagcacagccccgtggaagcctggagctgaggcagtgtgggcgacccctggagcagtgagtgcttccttcatggccttcatcgcaccctgcagtcctcatgtaggggatgccatccatgaatttagttttcccagcctcctttaaaaacgcgttcatgctggggccggggcagtgcagtggctcacatctgaaatcccaccactttgggaggccgaggcgggtggatcatgaggtcaggagatcgagaccatcctggctaacaaggtgaaaccccgtctctactaaaaatacaaaaaattagccgggtgcggtggcgggcgcctgtagtcccagctactcgggaggctgaggcaggagaatggcgtgaacccgggaagcggagcttgcagtgagccgagattgcgccactgcagtccgcagtccggcctgggcgacagagcgagactccgtctcaaaaaaaaaaaaaaaagtacaaaaaaaaaaaaattagtctgggtgtggtatcacgcgcctataatctcactactcgagaggctgaggcggagaattgcttgaacccaggaggtagaggttgtagtgagcccgtatcgtaccactgccctccacctgggcaatagagcgagactctgtctcaaaaagaaaaaaaaaaaaagaacatttatgccaggtgtggtggctcatgcctgaaatcccagaactttggaagactgaggcaggaggatcacttgagcccagaaatttgagagtgtcttccctgggcaacatagagagacctcatctctaccagaaaaaaaaaaattagcccggcatggtggcatatccctgtggtcccagctacttagggggctgacgtggcaggatcacctgagtctggaggcagaggttgaagtgagctgagatcatgccactgcactccagcctgggtgacagacagagaccctgtctcaaaaaaaaaaaaaaaaaaaagcatttactatccaccatggaaggtgagactgacctgtgagtgattgttcaaagaacaaaaaataaaccccagagataagacaaaagggtgcctccatgggggtgtgatttaaagctgagaaattgggcttcttccccctcccctctcaccccgtggtttgctaaaggagatgggaaaaaggattctttttttggctgaaatatttaacactaaattaaagccaattttaacagcactttggttgatgagtgaaattaacagactggccaaaaataaacgaacggtctgtactatgtgaaaaagaggcagctttggccatgctgggccaatgtgagttttcagggttgctgggaatgtctgtgaatcggaggaagggcctagctgggactctcaggagccaaggccctgaggggcaacttgcctggtccctgccctgaggcgttcactgctttcttcctgggccagatcacaggcccggaggctggaccactgggctggcactcttgccgagctgctccctgacttcctgaccatgctcctttcagcagccttgctgcactttagtttccttgaatgaaaaatggggatgagaatagctcctacctccaaggtgaatggagtgagttcggacaggtgactccctgggaccagtgcctggcgcctgacaaggtccagtcagagcccgcactgctgttactgatacccttggctgtaccaggggagaacttggttgccattgccaggtgttctcccaccacccccactactgtccctgtttgatgtgtggcgggaataaagctgtgcacattggagcttttggcacatcctggctttcaggtgaaaggtgcgtgtgtgtttgagggtttagcctggccaacccagccatgaggtcggacctgacctgggggtgagtcctgagctcggcacccctgagctgtgtggctcacggcagcattcattgtgtggcttggccgcacccctttccctgctgggctgttgatgtttagactggagcctctgtgttcgcttccaggaaccaacccgtgtgcggacaggaacggggggtgcagccacctgtgcttcttcacaccccacgcaacccggtgtggctgccccatcggcctggagctgctgagtgacatgaagacctgcatcgtgcctgaggccttcttggtcttcaccagcagagccgccatccacaggatctccctcgagaccaataacaacgacgtggccatcccgctcacgggcgtcaaggaggcctcagccctggactttgatgtgtccaacaaccacatctactggacagacgtcagcctgaaggtagcgtgggccagaacgtgcacacaggcagcctttatgggaaaaccttgcctctgttcctgcctcaaaggcttcagacacttttcttaaagcactatcgtatttattgtaacgcagttcaagctaatcaaatatgagcaagcctatttaaaaaaaaaaaagatgattataatgagcaagtccggtagacacacataagggcttttgtgaaatgcttgtgtgaatgtgaaatatttgttgtccgttgagcttgacttcagacaccccacccactcccttgtcggtgcccgtttgctcagcagactctttcttcatttatagtgcaaatgtaaacatccaggacaaatacaggaagacttttttttttttttttgagacagagtcttactctgttgcccaggctggagtaccgtagcgtgagctcagctcactgcaacctccgcctcccaggttcaagcgattcttctgcctcagcctcctgagtagctgggactacagacatgcaccaccacacccagctaattttttttatatttttagtagagacagggtttcatcatgttggccaggctggtcttgaactcctgacctcaggtgatctggtgggcagatcacctgaggtcgggagttcgagaccagcctcaccaacgtggagaaaccccgtctctactaaaaatacaaaaaaaaaattaaccgggcatggcggcgcctgcctgtaatcgcagctactcaggaggctgaagcaggagaattgcttgaacctgggaggcggaggttgtggtgagctgagatggcaccattgcactccagcctgggcaacaaaagtgaaactccgtctcagaaaaaaaaaagtttgattggtgtaaccaaagcgcatttgtttatggattgtctgtggcagcttttgttctgccgagatgagttgtgacagatctgtatgggctctaaagcctaaaacatgtgccatccgcccctttacagaaaaagtgtgctgacctctgttctaaagtattggacaactacaatgtttgctcatttattattctatgatttgttttctgctttttgttgttgttgttgttgttgagatagggtttccctctgtcactcaggctggagtgcagtggtgtaatctcagctcactgcagcctcgacctcctgggctctagtgatcctctcatctcagcctccctagtagctgggactacaggcacacaccaccactcctggctgattttttttttttttttttttttttgtggagacagggtttccgcatgttgcccaggctggtttcaaactcctaggctcaaacacccacctcagcctcccaaagtgctgggattacaggcgtgagccaccatgcccagcctattctactgtttgtattacatagctttaaaagattttttatgactttaagtcacaagggttctttgtagaaaaaaatatatatataggaaagtataaaaagaaagtaaaaattgtccataacctctccagccagagacgaccgttgctgacacctcagcatattgcctttaagtcttttttctctaagatagcatttctcttcatcacagtcatatgctacgcagaattctgtatcctgattttttcacttgacattacaacaggtatttgatggcgctgtgacaaactctttggcacaatcttttaaatgtatgaaatactccactgcacagatgtttgcttttaggcttaactgttcttttattttgcgtgtgctggttacagccgggcacagtggctcatgcctgtaatcacaacactttgagagggtgaggcaggaggatcacttgagcccagaagtttgagaccggcctgggcaacatagtgagaccccatctctacaaaaaacttttttaataagtcgggcgtagtggtgcatagctgtagtcccagccaccaaggaggctgagttgggaggattgcttgagccccaggaggttgatgctgcagtgacctgagattactccactgtactccaacctgagcgacagagcaagacttgtctggggaaaaaaaaaaaaatatatatatatatatatatatatatatatacatatatacatacacgcacacacacataatataaaaatatatatttataaatatataatatataatataaaaatatatatttataaataaaatttataaattatatttataagtaaatatataatatataatataaaaatatatattatataatatataataaaatatataatataaaaatatatatttataaataatatataatacatacttataagtatatatttaaaatatatgtaatgtatattttttaatgtatgatatataatatacatttataaatacacatttatattattttatataaaatatatataaaatctccaagttgctttttccaaaaaggtgtcttgctgcatttcaaacattcatttaaaaacttgaatgctggtgatctggtccagaatgtgttcagtagctgctgccagtggccaagcatctcgggagatgtctacaaaacacgctggttctggcctggcgtggtggctcacgcctgtaatctcagcactttgggaggctgaggcaggtggatcaactgaggtctggatttcgagaccagccttgccagcttggtgaaaccccatctctactaagaatacaaaaaaattagccaggcgtggtggcatgtgcctgtaatcccacctacttgggaggctaaggctggagaatcgcttgaacccagggggcagaggttgcagtgagccgagatcgcaccattgcactccaggctgggcaagaagagcgaaactccgtctcaaaaaaaaaaaaaaagatgctggttcctaaaatgtggcccttttcctcctcacctgctgccagaccatcagccgcgccttcatgaacgggagctcggtggagcacgtggtggagtttggccttgactaccccgagggcatggccgttgactggatgggcaagaacctctactgggccgacactgggaccaacagaatcgaagtggcgcggctggacgggcagttccggcaagtcctcgtgtggagggacttggacaacccgaggtcgctggccctggatcccaccaaggggtaagtgtttgcctgtcccgtgcgtccttgtgttcacctcgtatgagacagtgcgggggtgccaactgggcaaggtggcaggctgtccgtgtggccctcagtgattagagctgtactgatgtcattagccttgatggtggccaggactggtagggccctcagaggtcatggagttccttcgtggagcgggtgctgaggctgtatcaggcacagtgctggctgctttcacctgggccgtctcaccgaagtgtccatggagcctgcgtagggtgggtatctgtgtcgattttacagatgcagaaacaggctcagagaaaccgagtgacttccctaaggtcacatacccagttagagcagagctgggccaggaagtgctgtctcaggctcctgaccaggtctccttgctttgcactcttgccaaaaccatgatccagaactgactttgaggtccccggacctcaggctcctccgaaatggcctcttggaggctgctgagccacagcttaggacccacctcgagaggcaaatgtgctttgagctgccaggcgtcctgggggccctgccttgggcacggggttcagacaggccccagatgtgtggggcgtctttctggacttgagttttcttttctgtgtggtggacacagtgctcaccccttaaagcacctgtgatgtgtgcagcagcccaatccctgcctgtcgcctgttctgctagggaaggaaggaagacttcaggatggcaggacaacagaaagaggtccaggttttagagcaagggcaggtcaaacttagaaaattctggaatgaggatgtgcatttcctcttctggatctgctaaaagaagagggaaggaggggctgctgggggaggagcccagagccgagtttacatccggatcccgcaaggcctcccctgccctgaggtcttgttttgtgatgtgcttgtgtccatcctggtttctgccgtgtccccaacatccggccaagcttaggtggatgttccagcacacactcaccctgtctgtgcacctgtttttgtgtccgtaagtgggtatttactcaccttacgagtgagccactgtgggaattcagggaggtggcgcagtgaccacccctggagggatatgtgtgtggcaggggtcgagggtctcgcccttccctgcttcctgcgcgtggctttctccaggacggggagggctgagctgaagaggtggggacagttgcgtccccccgccacccactgtcctgcggtgagagcagactcactgagcctgcccttctcccttgtgccttccagctacatctactggaccgagtggggcggcaagccgaggatcgtgcgggccttcatggacgggaccaactgcatgacgctggtggacaaggtgggccgggccaacgacctcaccattgactacgctgaccagcgcctctactggaccgacctggacaccaacatgatcgagtcgtccaacatgctgggtgagggccgggctggggccttctggtcatggagggcggggcagccgggcgttggccacctcccagcctcgccgcacgtaccctgtggcctgcaagttccccaacctggcaggagctgtggccacacccacgactgcccagcagcctcaccctctgctgtgggagttgtccccgtccacccctgggtgcctttgctgcagttatgtcgggagaggctctggtgacagctgtttcctgtgcacctgctgggcactaggtcccagctaatccctgtgccaggactctaatttcaccctaacacacatggtggttttcattgctggggaagctgaggcctgagcacatgacttgccttaggtcacatagctggtgagttcaggatcccccagagataccagggccagcactcgatccccacccagccctgaaccccaccatgtgctgggattgtgctgggagtgtccacacgcctgggaccccagggctggtgctctcatctcctttttccagatcatgagaatgaggctcagggaagtttgaaaaaaacctatcccaagtcacacagcaacaggagcaggatttgaacccagaaaaggggaccgcacactctgttctgctagagtagttagctgtcctgggtgatatggcaggtgacaggggcaactgtgcttaacaaaggaacccccatcccccctgccaagttgggagactagaaggtcaggggcagaagctctgaagggccaggtgcagtggctgacacctctaatcccagcactttgtgaggccaaggcgggcagatgatttgagcccaggagttcaagatcagcctgggtaatgtagtgagacgccatctctacaaaaaaattttttaaaaattagctgggcatggtggttcatgcctgtagtccaagctacttgggaggctcaggtgggaggattgcttgagcccaggaggttgaggttgtggtgagctgtgatcatgccactgcactccagcctgggcaatagagtgagaccgtctccaaaaaaaaaaaaagaagaagaaaaagaagctctgaggctccaagtccccaggcaccccttggcttgagggcagacaagggaggagagggtcacctgggcagccctgacttttgtcccctggcaaagggaccttcagtgaccttggccctaggagagcctctgagcacgtcagccatgtcgaaccgctcaggaagggcagcaagaatttggcttctgacctctgcctctcctactcgccatctgcactgggtgtggttgtgcccattttacagatgaggaggctggggcatcgaccagctgaatgccttgtcccaggtactgcgtaggcagagctggcagttgaaccccgtgtcctggttgtcgctgggggtgggctgcaccctgacttgtgaggccagtagcaaggtttgcacgtgacttcgtgaccgtcacccagctctgcagcacatcccgtgacccagctcatccaggccgcatgcaaacctgttgccaggcgagaaaccagtcaccgcacagctgtggttgcctgaaatgattaagctcattaatcaccccggagtgaggacagactcagatgaaaaccagcaaaagccctggaaactcatgtgaccctgccaatgagggcggccatgtgcattgcagcctggccgtcactcctcggtacgtgttttggacttaaacgctccggatgtttactgagtgcttgattaataacatggaaggcctggtctcattgctgtgggagtgaaggatgcacagccaggcctgacatgatgagaacaagaacctggagtctcgctgcctgggtggtaatcctggccctgccacttagcaactgtgtgactgtagccaggtcacttaattttgctagatcctgcctgcgcttcagtggatcttgctggttttccaaggtggccaaacactttaaggcattcatgtggtcgctaggctgcagggttgaaccctggctcaccccgcagggcgccgtgtgctctgtggcctggctgtgcctttgctgacaccgtgcccgtgtgtgttcatgcaggtcaggagcgggtcgtgattgccgacgatctcccgcacccgttcggtctgacgcagtacagcgattatatctactggacagactggaatctgcacagcattgagcgggccgacaagactagcggccggaaccgcaccctcatccagggccacctggacttcgtgatggacatcctggtgttccactcctcccgccaggatggcctcaatgactgtatgcacaacaacgggcagtgtgggcagctgtgccttgccatccccggcggccaccgctgcggctgcgcctcacactacaccctggaccccagcagccgcaactgcagccgtaagtgcctcatggtcccccgcacctcactccctcgttagatcaggctggttctgggagctgacgctgaaaggagcttctcatctggggttcctgggtgtacatagatggttgggtaggttgtgcactgcacaagctgcatgatgctacctgggggtccaggtccaggctggatggacttgttgcttcatcaggacatagataaatggccaaaactcctcagctggaaggtcctgggcaggatctttgggtgtgaaaaccagtcacaggggaagggtgcttgctcatactgccagcacagtgctgagtgctttccatagcgctcgtttactcctcaagcctggagggtggggagtagcatggtcccatttcacgtacaaggaacccgatgcacagagaggtgtggcaacccatccaaggccatacaactggggtgggttgagccggggttgactgtggcaggctggctcaagagtccctgctcctgaacccttgccaggcagcctggcatcagctcggggaatttttgccctgacccttggaagcaagtgggcctctttgttctcatgtcagtgatgagaagagtgactttcctatggcccctctggagtacaggtgtttcctgttggcgggctcttcccccatgacatcagcagcgagctggttatgattccctacgcagaacttgatagtttataaagctctttgtcatccaggccccgttggagtctcacgcagacctggtcgcaggcggggctggtcttgcctgtcccagctgcatggatggggaacttgaggcttgcaaaggttaaggggctgttcgaggcccaggctggcaggagatgggcctgggccagagtctgggacttcccatgcctgggctgtctttggtcctgttgctcaccatccctccctggggccatgaccttagagagccaaatggaggtgcaggtaacccacggcaaggaggggttgccatgactcagagtccccgtcctgtggccggcagtacctggtgcaacgacttggatttcagaccagccactgtagcccgctgacggtgcgctcgaagtgccacagcttctgaagccaggcaggactcaggccaggagactctgttagctgttgagagggagaggccaacggatgttctggttctgctagagagctggttcttcggatcctggtaccagtgcactgagaggaggcccagcttgattctggggctgccttgtggtggcatgtgctgctcactgacaccctcgaggagtgtcttctctcgggcttgttgactgtgcccggttttccgcagttcactggtgcacacataggcacatagcaaaccgcacacacagtcgtgggtatgagtttcactacattccaccaccagtgttcactaccattacctgccttccgtcttaagtgttcatcatttaaaaataaatttattgggctggacgcggtggctcatgactgttatcccagcactttgggaggctgaggcgggcagatcacctgaggtcaggagttcaagaccagcctggccaatatggtgaaactccatctctactaaaaatacaaaattagctgggcatggtggggcatgcctataatcccagctactcaggaggctgaggcaggagaatggtgtgaacccgagaggcagagcttacagtgagcccagatagcaccactgcagtccagcgtgggcaacagtgcgagactccatctcaaaaaaaaaataaataaataaaagaaaaataaatttatgatctatttcaaaaataacacatgtactttgaaacagcagagacacatatgacacggagaatgaaattccccatagcgcacccccaagagacagccctggtccccccgtctttcccgtggacctccagcggggcagatgctgagccgcctgttgtcgagtggcgtgctatcccgtcctccagctcctctgtggcttacagacacccacctgcagccctgtctttgcctcctctagcgcccaccaccttcttgctgttcagccagaaatctgccatcagtcggatgatcccggacgaccagcacagcccggatctcatcctgcccctgcatggactgaggaacgtcaaagccatcgactatgacccactggacaagttcatctactgggtggatgggcgccagaacat

SEQ ID NO: 11994 - DNA, 90 bp, Homo sapiens
tatttttagtagagacagggtttcatcatgttggccaggctggtcttgaactcctgacctcaggtgatctgcccgcctcggcctcccaaa

SEQ ID NO: 11995 - DNA, 104 bp, Homo sapiens
ccagcactgtgggaggccgaggcaggtggatcacctgaggtcaggggttcgagaccagcctggccaacatggtgaaaccccgtctctactgaatatacaaaaat

SEQ ID NO: 11996 - DNA, 1674 bp, Homo sapiens
catacgcagaaatggttaaattctgacttggaattccatgggaattagcaggctgtagacgaggttctggccgagaatgtcatggttggaccaagacttcccatggggctgctgtttgtggccagtttcttgtttttatttatccaatgtgtacatatgcccagaagctatttgtaatgggagtgttttaagaaattcataaatttaaaacactccacacatacaaaactctttctgaaatgtgacatcttaaaattattttctcaaagtgacataaaataaaacagcgtaacagccatctctttgtaatatgctctcttatatttaatttttattaatcttcacctaaatactagataacatcatgaagagagcaaaataaactggccatctcagtttaaatggccaacagtcatcttttgatgtttatttctttgaaacaaaatgcaccctacattttattttggagcaaacagtcatcagaagtaatgtgaatttgtatgttttgacaaaaagttttacatatatgatttaaaaggtgtttatgtaatatgaattaacttgtgtacaaaagagatacagatttttcaaagagcaagcatctgaatgttaagaactgagttcattgaggttaaattgttctcaggaagtttaaggtaaaaaagaaagaaaaagattgtacttctcctatggcaggaagaggctcatttccagggtagagacttctgaaatccataaaatacattccagatccaagacttcatgcatcatacctggacactgctgtcatagagagagacttgtgagtggtttcctttcatttactgaatagagataaaaatgcccaaagcatatgtgagggacaaattttaaaaattaatttaaaaattctgttctgtttaacactaataatctctaatgtatccaacttttcaattattgaaaatccaaaagtcaaatgtggagcaaaccttgaaacatagagcagtaatgaatatctgctgccaatagcaaaatattcaccaaaattcaagcagaaggtgaatgtgactgaatgagaggtccttaagctttttcatgccatggaccctttggtagtctggctaacgtttctaataaaacaaaacacaggcttataaagaaaatcaatcatatggaaatgaatgttgatcacaatatttaaagaaataccaagtttgtgatgtagtaatatttgtgtctttattaatgctataaaaggcaagaatgaacaggaggcttgatattgactcctttttgaagtaggatgagcataaatgatacattgaaatatctgcaaagttataatgtgatatgaaagtgtctgtaatttttattcctggcaatgtgatagaaactgctagtaatactgtggtttgttgaaagaaatgctacatttcagataagattagtgaaattgaagatataatttttttctattcaacttcatggaatctgaagaacgtaggttagaaagccctgatgtaaatgtacaatgcaaggtcatggccataaatgtatagtttcacatatttgcctttggtcaagattttgtctaatatcttggttattttagccagtgagtagtatttaccacatgggttttcactacaaagaggttaaaaataaaacagcaacaacaaaaaacaacaacaa

SEQ ID NO: 11997 - DNA, 28766 bp, Homo sapiens
ctctgtccccagtaaccccggctcccctcctcccccacccgctggaaaccacgactccgccgcccacctctgcatttgactgctccaagtacctcaggaaatgacctcatgcggtctccgcacgttcgcgtccatcttgtttatttccagcgtttggcccgtgggagcgatgagcgcacctgttcagcccctgctttcagttctttcagggagttctcacgtggtcttcagaggttcccacacgctgcttcccacagcagctgcaccattgtacattccaacagcaacggacaagggctccaatctcttcgtattcttgcaaacatttactattttatgtggtttttttttcttttctttttttttttttttttttgagacggagtctcgctctgtcgcccaggctggagtgcagtggtgcgatctcggctcactgcaagctccacctcccgggttcccgccattctcctgcctcagccgcccgagtagctgggactacaggcgcccgctaccacgcccggctaattttttgtatttttattagagacggggtttcaccgtattagccaggatggtctcgatctcctgacctcgtgatccacccgcctcggcctcccaaagtgctgggattacaggcgtgcgctactgcccggtttgaaaaggcaattgaggtttctaaactcctactaaaggaaataattcctagagttgggctgcctaagagcttacagagcgataatggctcacctttcacagcgacagttacccgaaacacatcttcagccctaggaattcagtgccgccttgactcggcacggaggccacagtctttggggaaagtagaaagagctaatcaaactctaaaaaggactcttgctaaactatgccaagagacatcagaaacctggaggtctttattacctgtagccttattacgggttcgaatggcccctaagggaaatctgcatctcagcacttttgaaataatgtatagaaggcctttcttaactacagacctcctaatagacatagatactttcaagctacagaattatgtgatcaacttaggacaagtgcaaaacgcactccttgactatggaaatcagagactcccttcccccactgaggaagacaatctggttccaacccagctgggagactgggtcctattgcaaacttggaaggaaggatcctcagcagatcaactttccccccaagtggaggggactctatcaagttctccttagtaccccaactacagttaaacttctgggaataaacagctgggtccacttatctcaaattaaacctgtctcttataaagccccacaggccaacggaacacaagagactgatcccgtttattcccgtgagccagtcagtgacctctgattcctgttcctaagaaatgagagggatggggggcataaatacctggattggcattctacttttaggcacaagttggaatcatgcagagagtgatttatttactgagtaggcacagactttagcctgtctacataatcacataaacggttgggtatgtggagaattgccactttcctccacctctgggttgccctggcatagtcaactggccagcctaagtctgtggggattttacgttccagaccattacccaggctatgagagctttagagctcacgtctctgccattgatgagctgtcagtcagtcctctattggcttggttccaacagctgcccagttcttggaaagcctttctgtttagctagtttacttggaatgattttatttattttgctttgctattgtagaatatattgcggttgtactctttgtgtaggaatgcatgacaagctcactcaacactttcttcagttggacatttttttgttttttttttgtttttttttgagacggagtctttctctgtagcccaggctggagtgcagtggcatgatcttggctcactgcaacctccaccttctgggttcaagtgattctcctgcctcagcctcttgagtagctgggattacaggcgcacaccaccatgcctagctaattttgtatttttagtagagacggggtttctccatgttggtcaggctggtcttgaactcctgacctcagatgatccacccgcctcagccttccaaagtgctgggattacaggtgtgaaccaccatgcccatcctgtttttccttcttaaatgagacaagagggatagagaatggggctgtgtgtttcccttcccaacataaaagactggagggagctggagttgatacttcccttcctccaggttggttagactctgattaaactctggtacgttaaaaatagtttctcttgagggcagaggaagaacagaatgctctggcatatttcgaaagtgctacttctcccctccccttgtccaaagcacaaggggatttttctctggtatttacctgggggatctggtagagtttgtgcaggtaaaactcacagaagtgtggcctccaccctaagactgggccctggagtttttaactgtcaagcttggccacacagcctccagcaatctgccagtgacagtttaggttttcccaacctggcagtggttcccagggaggtgtctgctctgcagaattgggattctctgcatctgtctgtcgtctctacaacttttttgggcagtggtttgccctgtgacctcatcatctgttgaatataagaaatattattgactttcagtttgctcacgttttgttcttgtgaaaagattgattgtttccaagcttctcacacagtggactagaaattgattcatttcatttatcctttttgggtttgtggggttcttgaatttgtgacttgatgattttgattacttttagaaatttcctggctattaactctggagtattgcttcaacctcatgttctctcatctcctctctgggatccagttacaaatatattggtccttcttcctgaatcctttgtgtatcttaacctgtcacctgtattttccatttgtattatccatacttcattctgaatattttctactgacctattttccacttcactaattctctcttcagctgaatttgctattaaagccactaagtttataatttaagtgattttatttttcagtgctagaattttcatttggtttttctaggtttttttttttttttttgctgaaattctaaattccacctctatttctgcaaatgctgtaagcacagttttgttccagtctctgtctcgcgactccagtgtctggactggtagatcttctgcctatggtctctgctgctttcattcttgctgatttgttttttcaattgtctagaatttttattgtggactgaacattgtatttgtaaaattattttgtagaaatcatttgaggtctattttattttcctccagagagggtttatgtttgcatctgcgagacatgggggcactaggggtcctggatcatcttactctagtttcagggattgaaatcatttcaagatgattacagtttaggttttcctaccctggcagtggtgcaaaaggccctgagttgctgcaagagccggtctccttctatccacccctatgtctagggtgcggttatttgttgtcccaactcaaaatggtgggggtcggggggatgttcgccaactccccactctcaggtgggctgaatctctcgctgtctggctcctcagtgggctgtgagctatctgaagcagcaaatgctttgggggaaaagtgagcgtcccgaaggcttttttcactctggatctttgtctttctgggattttgtttgtttgcattccaagcaaatatttttaacattttgctcagcttttgtagtcaccatcagaaaagtgatgggtccagattaactagtccctaataaccagaaactggaagtctgatggttgttttcagtcttgaacaacattgattctgcggtgaccagtttagagttcatgcaatagaccttcctcccccttgtaaaatcatcactatttcagctaatacttagagtgacctcctggtgactcatcctcagccccctttgccggttcttcttttccccgacattttcattctggagggcttgggattcagtcctttggcctttttcctagctgtgtctgccccctcggggatctcatccaatacccttcccacagcctacccagaccccagtgctgaactccagactcacggattcagcggagcgcagaatgtcagatgtgtgagggccgcctccgatgcagcgcgttccagatggagctgcggcctcccccagacccgcccacccccacccccagattctgttgagggcaaatcatgcttcctcgcagctcacaccctgttggttctccctcccacgttcatctggaatgcggccgctccccacctcttcccgcctgccctcagtcagcacagcagccttctaatggcttctgccctcccatcatccccagaccctccctttcacacagcagctgtgaggtcctcctcaggcagggtcaggtcacgcctctccctctcagagtcctgcctcagcccctcccctgtcatcaacaaagactagactgtgaatggccccatctgcctcctgcctcccgagctcacagcctctgaggtcccggatgggaaatcccaccaggcagtctgtggacgccgcactgcaggcgagtggggtctatcttttcaaagctgatgcccacgcccagagagggtgtcttccatgagagacgtggcctggcagctgctgctgtgggccctgggcccggggacacacccggccctcattgaagacaggaggcatcccgctgggggagtcagatgagatgtccagccccacgtcacctccctgtgctcggccgtgctccgtgaatggcctggtgggtttctgtgtgtggagagctgggtgggcttctagggtcttgactacggggctggatgtagagtactctagagaggctggggatgagatgaggcagctgcaggtggcccctcctcaccgcctgaggacgcgggaccacgccaggcttttctgggcagggtgcccctggctgtgtggcaacagatatgcacagaaatgccacatgggctcctgaggcagcctcatgtctccactggtgggtggtgtgggagaggggacctgagattttgcctggctccttgctatttgggggacgggtgtgcctctggggtcccagctgtgaaccaggttgtttcacctggggtggggtcgggcttggctctgtccccgggtcctgggctttcctgggctcccactcactgccctctgggcagctgggcctccccacatccctggcgcgctggggcagccccatcttccttcctgctgctcaagcgagagcctcgccaccactctgagtgccttcgctcacgctcatccagtgcatttgaaatccccgtgctccaccttcccgacacccagagtcagccccatcacaggtctcatctgcacagggctccctgcctttccctgtctccacctcccccacccctgcccagtcagccgcatcacaggtcccatctgcacagggctccctgcctctccctgcctctccctgcctctccctgcctctccctgcctctccctgcctctccctgcctccacctccccccgccccgcccaggcctgcagctcctctcacccggtgctccacccctgcatctgggctgctggggcccccgtggccatgacagatgccgcagaggcgtcacatcctttctgggtgtgatggcctcggcttctgctcgctcactgcccggcatctccagtccagcttctcctgcagcatggagagaggccacgtggagggtgtgcccagcccatggcccacccaaggtcccctgtgtattggtgaccctgcttggaccttgcaacccagcccagccccacgggatgcagccacgaggtcaacccagccacacctcatgaagcggacacggccaccccgacccttctctagtcctgcacccagagttgtgactgtaaagtgggggttgttttaagccaccaagctctggggtagtttgctccaggcagcaggtgactgagacactgccctgtgggactccccatttctgcactcgctcccctgtatgggggctcctggatcatgccagggtcacgtctgataaacccaatgttagttgaaagcctccagatgaaaggcactcagtgcactccgcctcctgaatatcattgttcggcctcccggccttcaccatgtgcagacgctgacgtcagcacattcgacaaagtccccaattcccttgctctgtttctaaggccccgccacccccacgctgtggctgcgcttccttgtcctcatccttgtccacctgtgttctttccaggtgccctgagtggactggaggggcacagggcagcctggcacctgctgagcccttgctggggccatgctgtcctgagcccctgctgagcaccttatggggacatgagtgggggctcagtctgggaaggaggaggggaggcctggggagatggtctgactagctctgcccagcccctcggtgctgtctggggacaggctggggtccagggcctccccagatgatgggaccagtgtctccagggctctgcaggctggtcggggcggctgacctgggcatttcttcttctggctgccgggaggcagcaaggccccaggtttgcatctcagtggccaagtctgggcgaggcttttcggggagcaggggtgcagcggccaagtgtgtctttggccactctggggccacatcaacgggtcctggggtccctgaagcacccgggaggcagccaggagggcgccagtgctgggctgtgcagggtgggcctgaagaagggggtggtgcctggcggtgatggagtgggcccgtcccatcccccaggccggcagccctgcctcaggagagccctcagtgggctgcagaggggcctcccacggtgagagaggacggggagggactggagtgtggttcatgtggtggcctgctggtgcagggctgggctccatgttggcagggcttgcgggggcggtgctgggcttcacagtggcaggacttgcagagggggcctgggctccatggtggcagggctggtgcagggctgggctccacagtggcagggctggggggtctgtgcccacaaggccacatcaggcacaggggaccagcccccaggacagaggtcaaggcctggattttgtggcccaacctggacccctaactctctccttgccccacagtgagtaaaccgaggtgcagtcatggcgcctgcctcctgccgtgtgtttaggtgaatgaggtcaggccgggtactcacctgtgcatccccgctgctgggaccacagcaggtgcacccacggaccccagccccactccgaccgcctgtgtcctcaccctctgcgggctgaccctttccccctctggccagtggaggtgggaaggctctgagggcccctgagcccaggttccctctctgtggcccttagccctggccacagcactcggaacttctaaccgagccctgccgccatagcacacggtccgtggtgcagtcacctgacactgcaccagggcgtgatgtccacaggcaggccatgccccggctccacacagcggccccggactggagtgccccccgcagagacagcgggcaggaggccgtccttcggggccaccactgtgaccatgagatgcccagccctagagggtcaagggtccgtctgagctgcccgagaggtcctctgggctgagcagggagtgcacaggtggtggccgacgcctgctgctgagagcgcagctctgcggtgttgatgtggaagcagctgagccctggggcatgggctccaccagggccctcacggcctgcgagactcagggctggggactgggtgctgccatgtggtggccctgctgtcagctgcagtccccagctctgacctgcagagtctcactgtctcctttcggcgtttgcggagttggtgcgtgtgccctggccgtgctcggcaagggttcctcccggataaggtggaacccgatttggggtgcgctggtatcactgtcgcaatgatgcagtgtcgtcccgtctgggaacaaggcatcttgccatttatttaggtcttgaatttttctcttcaatgccttgtggtttcagaatgcggcttttccacagagtttgtgagattttcctatttgtcccacctgttcttgctgcctcttctcttgtatcgtttgggactaacggacctttcacatgactctgtgcttactgtcactacccgcttgtttgatactcccttccttccttccttcctttctttcttttactttctttgtctctttgtttctttttcttttcacagtcttgctctgtcactcaggctggagtgcagtggtgcaatctcggctcactgcaacctctgccttctgggttaaagcaattctcctgcctcagcctcccgagtagctgggattacaggcatgagccaccatgcccggctaatttttgtatttttagtagagacggcgttttgccatgttggccaggctggtctcaaactcccgacctcaggtgatctgcccgcctcggcctcccaaagtgctgggtttacaggtgtgagccaccgcacctggccctttggcttacgtcttagtggccaccctcttcagtaggtaggcttctggtacgtgcttccagatcaccaaggcgtagctctaaagagcaccatgagttcataacagcataagatccgctcgccgcccacccgctcgccacccacccgctcgccactcacccgcccgcccacccgcctgcttgccctttgtactatcgttgtcagacgttttactaaatccacatatgttataaaccccacagtgtattatgaatacgtttgctttaacaggcgattatctttcaaaatttgaaaagtaataaaaacagcatttttttttttaaagagacagctctcaccgtgttgcccagcctaaactgaactcctgggctcaagtgatcctcccacctcggcctcccaaagtgctgggattacaggcgtgagcaaacacgcccagccagaaaaacagcatttttatcatccacatattttccctatctagccactttctttgtctgtgtagactcatctggtgtcattttccttctgcctgaataactttgatgtttcttgtaccgcacgtctgctggtgataaattctctcggccttttgttgaaaaaaatctttatttgcctacatttgtgaggatatttttcccgatgtagagttttagcttgacaggtattctcttctttcagtcctttaaatgtgctaacgcgtcgtctgtctcccagctcacgacgtttcacacgatgtcggctgtaattcctgtctctctatgtaacatgcctgttttctttgactgcttttaagatttttctgtgtcactggttttctacagttttattacaatggccgtgccgtggtttctttctgtttattctgcttggagttcatggagcttgtctagatttttgtccaattgaaaaactttattaaacattttttcttgatccctccaccacattagctgtgtgcagcatattgtggatttttttttttttttttgagatggagttttgctctgtctcccaagctgggatgcagtggtgcgatctcagctcactgcagccttcacctcccgggttcagtgattctcctgcctcagcctcttgagtagctggggctacaggcactgccactaggcctggctaatttttttgtagttttggtagagatggggttttgccatgttggccagcctgatctcgaactcctgacctcaattgatctgcccgccttggcctccccagatgctgggattacgggcatgaggcagcacgcccagccattggtcttccagtcttttttccctcactgggcttcattttgaatatttgctattgctatgtcttcacattccttaaaaaatgtcattggatgttattcctgtccatcgtgtttcatttccgatgtatttttcgcctctgaaattgcgtttaggttcctaaagatctgtcattgcactcttcagcacgcttatgttttcctctgtgtccttgaaaatgtgggccctagttgtgactgcggctttaatgtccttgtctgctgatgccatcgccgccgtcctttctgggtctgtttctgttgattcttttttctcctgatcctgggtcatacttccccctttgttgcatccttggtaatttttggctgcacgcttccttgtgagtgctacattgttaggtgccaggttttgttgtaaccctttagagagtgttgggcttagtcctggtatgtggtgaagctgctgggaacccgatgaccctttccaggctggccttgggtgctggcaggccggatgcaggttatctcagcgccgtagcagttccctttggagggctctcccggtgacgctccctccctgtggggatgcagcttattcctggcctgtgtgagttccaggtgctgtccctgttccattccccagggctttctcccatcttgcagtctcatcccaggcacgtgcaagttggtacctttctaaggctttcggggagccctctgtggacctcggtgctccctctctgtgcagccctctgtctctggtcttctgccccgtggctatgccttctgtctcctcagctcagagagatgtctgggttctgtttgcagccccttctgagtcgcagcatgggagctgtcttcaggtggtgagccgggcaagtgtgggtgcccctcacttgctctctcaggggtcatggtcctgcactccagaccccgagtctgaaggctgctgtccacgtgtgttgtcggtttctagttgtttataggggaggggccctttcctagacgggcaccggagtctggctgcttctgtccctgttctctccactggccggggaccatgagaggctctggtggggccggtgatgtttattgagtggtgacgtttattgagcagtggaggggaccggctctgtaaagcctcagctctgtgcaagcactcagcggcctccttccctcctgtcctacagacggggacctgcgcctggagagcactctgcccgctgaggcagagcccgagtatgtgctgccgtctgtctgtctgcagagcttgggagctggtgtgtgagggggggtgtccagagtcctgggcggtgggtgctgggttctcctactgtgggaagacctcagggcaccaagcgtggggctccctgatgtccacgtgggccctgcccatcccccccatcactgagtgcagagtctccctctgggttcccggatggttccagacgatgtgggtgcaggcggtaggtctctctgcagtgtggatgggtccagacgacgtgggtgcaggtggtgggtccttctgcagtgtggatgattccagatgatgtgggcgcaggcggggaggagtgaggggagcacggcgcagggccatgctttctgagccctgactggacacagcattgtatggggcggagacctggacgtcttgagctgggtctcgccgacttccccttccacacatcccaagctgcacaggaggctggcccgggtcccgagggcccctggaagctgccccagccgcgttgctctcagacaggggcgtcctggctgcagcgggggccctgtgccgcctgcggtgtctgagaaggcgtgaacgcctggagaagcccagggacagagactgcgctgggagcagagtgaatgtgtctgttattgattttctccacgtggctcccacgttattgcacacgtgattttgtacttggctgagattaaatattaatacattgaacattaaaagagttttcagccctttaaacaattgtttatggcacaattaaaaggcaaatgaatgatgttttttaggagcaagtttgttggcctgagtcttatttgtgagggctggagctgaggggaggccccttgagggggcgcagagagggaagccgtgtggcatggccacttgcagtgggcgggcatctgctatttattgaggcaagatgagggggcaggctgccctggtgcccctgctccagacccgcaaataccaggagcagcccctgacgagagaccctagccccctagcccatccaccgttttgatgtaaaccaggtttccatgagcctcccatgcggctgcagggggtgggggaggtgggtcagcagagagcgagccaggtgggcagatggggtgtgggccgctgccctgtgcagggtgctcccctctccctggtgaatggaccgtcacctctgcttcctggcgccagctcctcgtctgtctgacttctctcgtgctgtgacctgcagggtcaggaccgcacggcctttcctctgagctggggttcagtcacttgcaactgaaggatcctgactgagccaaactagttaaagtaggaaaagggcctctggagttttcagttacgtgaaccgagaacggcttcaggcacagtggagtccaggtgccactgctggcacaaagcctgggtctccttccatccctcagctctgctgtgtcctgggctgacttgactctgaggcagtggaaccctcagcgtggcaggagctgccggcagccccggaggaaaacgagcacctcttcctccagcatctgctctctcttggcctggaaattccgtcctgagtctccttcccaggtctcagtcctggcggtttgagtggctgatcagaatctcccgcgccgcccacaggagacccagctgggtccggctggtcagtgccaagccctggacctgcgtggtggcgcccccaaaggctgctcggaaccggcccgtgcaggtggacctctgtctgttggttcccctcttccctcttcacaccctttaggtgcttcctgcaagtctgaaaggaggtgcaccctggcccgggggaggtttgcggggtgaacacttaatccggactagtttcaggagggcttcctggagggggctgcatttgggtggtgtcctgatggagcagagattgtctttttggaggaccgggtcccatgtagaggctgtgagctgcccacacactcttcatgccatgcctctcctttctgtcccctgccgctccctgggccagagctggacagattcttcctgagcacctggtccaacccggctgaggctggtcagtggcgtggttaactcggggctgccccggggggctcctgccatctcaggattcccagcacggacccctcccctgcctgcctcctttgctcctcgttgcctgctctaaagggagggatttgggcttagcatgtccacccgatgccacttcttttaactgtcaatacggtcggcatctgccaacctttcccacggtgactggcccctccttgggccactgtaggcagagtgatggggtcaactcgacaattgctttcactgtcaacccaagttctgcctaattagggggaacggcagcgtggctgagaaaatgagggtgtgtgtgtttgagcacacgtgaggccttccaacctgaaacaacagctgtgcccgcggccccggagcctagggggctgtgtagccccaggcccctgacccggcccccaccctccctggccccggggtcctgtggtcgcccaccacggtggcaccaccttgcggggatagcacagaacacgggcttctcagacccagagttttgaaattaggcagatttgagtgatttttaagaacggggtgggagatcggaactatttcacattttccaaatacagtgaggctctagagtgacgtgaaaactggatggtgcagcacggcgatgtcagttatgtgaacagccgccaccctcgtgcgggcaaaagcggctgatgggaaggactggatctgtggctgccactccgctgctccgtggcggtggggggcggtggccgcccagtccactctgcagtgcgggagctgggctccgcgagctcctggcccccacgccgctggacactggccagcccgggtcgaggtggatctagggtatggcagacagagagctggagcctctgggcctcctgtgggaggcaaaccctcacttctctgtagctggaagttcagcaagcgagaagttttacgaggccgtcaataagattgcatctttgttctgatgccgcggtgcctgcgtgatgatttaaaaccgctgagcccgacgtgctcacgggccaggcctcattgtcaaggcacaaggctctgtcgcttaatcacacaccatgatggcgaagctctgatgggattaagcttcccttctgcatctccacctcccttattcctctcagagggggcctgtgaggccaggggcctgtgaggccaagcgcctcacaatcccgctgcctttggggacatcgtcatggctccaggtgtctgcaactctgctgtgaagggttccctgggggagccatcctcccctgaacgggcaccgggtgtcttgggaccatcccactccagctatggcactcaggtgaaccccgagtgttttgtgctgtgactgggaacccgggcattggcaggtgatgtggttccagctgcagcttcccgtggtccttgggaaggcggcttcagggacggtgtaagttgtcagcgtcacccctgggaagggctccgaagcagaaggatgggggtgtctgtctccaggacccagattgtcctatcgggaagagttgaacgagggtggggagggtctcctggggggacaccagagccgagcctgaaggtgagcagagccttcgccctgggtgagtttcgttctggctgagcagtttctctgtggcccaagggacctgcattggttttttgagttgggttaggggcagagagggggagtgatggggctgtgggggtggaggtgggactttgtttcacttagttttataccctccacgatgttctttcccatcaaggacaggaacacaccacccacaaaatgaccttggagagacttttgttattttttagataggaaaaaacaaaaaaacaaaaaaatccccaaacccaataaccatttgagctactttgatggtggaggcagcgaatcccggggaaagccaggctcctaagccccagacgcccctgcctgctgaatcaggtccccgcccagtgctcagatggtcacgggctctgggatcctgcgggatttggaggaagaggccgtgctgcgtccgggctggctctgcccacaccccggcgagagatgctgacttcacattcacctctgtgaagatcacaggatttaagctgtcagcgtgggacgggcatgtgctttaaggatgattgcgccagcaaagccgccttcctgagccatgcttatgccaggctcctcctgtctctgagcaaatgctggccgcccggcccgggagcttccggaagctgtttgctccccgtgtgcaggaggaaatgtgtgtctgcagccatgtgtgtgggccgctgtctcctgctgcacccggccttcctcacggcaagagctctgtgctctgtgggctctggaaggaacgttccgggccggtgtgtcttgagagtgttgggcagctgccgccctgggggaaggaccctcactaggctggcccggggcaggagcaggaaggatgcggctcagctgccgcctagctctgtgtgccaagtccctgcagggaccctggaagccgagaggggcggctgggtggccacgcagcggggtgggaggtgaggggcctgaggaagccgcggtgccgcgttccctgggcagcgtcgctcacacacagggaggctcattcacgctcactcagcacggccgtgtcaaggcactgcaagtacactgacacgcagcttgcggtgggagggacggtggggtcctcggaccacccaacacagggccgcagactgggctttgacaacagaaattcagtgtcactgtgctggagccggaagtgggagacctgggtgctggaggtttgctgcgatcctggtgttccttggctcgagaaaccatcacttggcctctgccttcatcttctcacctttccacgcctctcccgtgcgtgtctgtgtccacgtttcccctaagggcacagtcacattgaattagggcccaccctactctagcctgaccttgtcttaactaatgaccctgcagtgaccttcctcccaagtaaggccacatctcaggcaccgggatgacgccttccacactagaattcttaagggacccaattcaacccctaagagggatgcctgagctgaggtctgtcgtggacaggctggagctctatcccccgggcctctctcctgcctggtgcctcccatttaaggagcaggttgaaggagctgagacccccccttgggcattgagcactcctgtcttggatacaggcttccccaatgctgccgcctctctccctgacctcaacctgcttccctgcactgagcctcacctttgaacgtccttccttccccagcgcgtggagccccgcacagctggggcagctcagccgagtgcaggcggtggcaggtcccaggggctggtgtcttgggtggggcctggtgtccgaggcctgcagatcagccctgctagccctgcccagtgcccaggctgcccctttgcctggttgggggttggtggggcagggagcctggtgggcttcactctgggtctaccaggaaggtggcactaggttaatcattattgccccgaccccctccgtatgggggggcaggaccagctcagaaattttagagtaccacgcaaaataagaacgttgggcttcttgctcaaaaatgaagaattctgggacagcagtggcggagcatgcagccttctgagcgcagacgtcgggacaccagggacgctggccgggagcgagggaggggctttaccgaggaatgggtttcctcctccagccttgttctggagatcacgcctgtgcaatctttttaaatacagaacagaaaaaaatgccagccccctgcagcctggtcacgagaatgccaggatctcagggcacctgctggctgaccttcgctgagatagaatttacacactgcacatgctcccatctgaaagggatgccccgcggccttcagcacattcacaacatcgcgcaaccattgccactcattccagaacttccaccaccccgaaaggagcccatcagagtctccccactgcccctgtcagctccttgctgtccctgtggacttgctggttctggacacttcatggaatcagaattggtgtgacacagggccttgtggcgtggactacggccctctgagcggtcttgacctgttcacctaaaaccagacgctgaaattaaccaggcccacctctccaggccagggcgggtgaattcccggggacccagcccttgcctgcaccaggagagtaagcgacttattaatagggtaatttatgcgggtgcctgcgcaccgggacggaccagcatctatcatggctgttttgcgtttcttgatttcacgatgtctgttgtgtgctcaggcccctcctctccaaggtcccagctgtccttgccctgttccctgtgaagagtgaagaaccaacgcgggcggggagtggaccggtggggagagggccggtggggagaggaccggtggggaggggccggtggagagggggccggtggggagggggccggcggggagtggtttggtggggaggaggctggtgaagtagcgtcaggtgcgggcctggcgtcggcgagtcaagtcgagctgatccagggccttctttctgcagcttcatcaggttctcaattagcggagggcgctggcggtggaggagggcattagccgtgcctgctctcgggctctgcctgccagagtgccctcatgtggcatgagattaaggctcagcctctttcctgacagcaggttttccatttttcttctccttcctcctctcctggcaacaaagtcctttgctgggctggggggtctccactctgatccacttccctccttcctgcctccctcccacgccctggaaaccccggcccatgactctttccctgagggggccgcccgcagcctctcccccatgggggctttgctctgggcaccccctttcccccggggcgggtggggcagcggccgggactcaggaagatggtggcccagtggggctctctccttgggtgtgtgggagcggagtcccctcgctcttctgggatagaacgctccgttgagctccccaaactgctcccgtgccgagctctgggggagggagtctgttcagagacggtgcagtcctaccttttagaaggtacgcctgcctttttaagcagctcagctctcaacaatgcacaagtggcttgagtagaagagctgctcctgctgggaggcgcaggaggctgagcgaggcccaccctgcaggggcgaggccacggtttgtgttatttcccatgatgactccaaacgcacccgagtcccccgggcctccgcgcctccgtgtgcaggtcccccgggcctccgcgcctccgtgtgcaggtcccccgggcctccgcgtctgtgtgtgcaggtcccccgggcctccgcgcctccgtgtgcaggtcccccgggcctccgcgcctccgtgtgcaggtcccccgggcctccgcgcctccgtgtgcaggtcccccgggcctccgcgcctccgtgtgcaggtcccccgggcctccgcgcctccgtgtgcaggtcccccgggcctccgcgcctccgtgtgcaggtcccccgggcctccgcgcctccgtgtgcaggtcccccgggcctccgcgtctgtgtgtgcaggtcccccgggcctccgcgcctccgtgtgcaggtcccccgggcctccgcgcctccgtgtgcaggtcccccgggcctccgcgtctccgtgtgcaggtcccccgggcctctgcgtctctgtgtgcaggctcaagtttgccaacgtccatgcacgtctcagcctctcagcctggactggacaactgggcttcgggaattcatttaaattctacccgctacacgccttccctggattcagggcggcgtccagtgcattcatcacgcgtgtgctgccgtgaaggtgcggggaccccccccaaaaggcttccttccctgtcctgcgtcctgcccacaaggcggtgctgctggcaccaggcctgacctggcgctgccagtgctccactgttttgagttattgaccaacaattcactctcgggtcccgaggggaactggcctgaggccactcaagcagaggctcaatgaggaaagataaatatttcatggtctgggtcggtgagagagggaaatcaatagcgcatcccatcctcagtacggcgcaggcctcccacccaaggcagcgagttgcatcctccgtgccgcgcgggccctcccacccgaggcagcgagttgcacttccgggcttgttctcttcctccctttaaggcaaggctgcaaactgccaggccgatggcccgtgctgggagcaggcaggtgtcctgactccgcctccagccggtgaatcagagccctgagattcaccaagggccccctgcccgggtcgtggaggcagagcctggggctgggagaggcccttcaggacccctctgtgggagccggacgcaggcctggggatgttggaggtgggagcgcttccaggccccttgtgtaggaccagaggctgctccgaccctgctcggggctctggagacagaagaacggcatgagtgtttcacaaatggtgcagacagttcacaggtcaagacaggggacaaaagtgaccacttttagttaaaaacaggtgactccgtcccaggacaagcacgatgctgtgttaggtcccgttagtccccttggaaagctgtcggctttccctggagaggacctcgttctgtccacgccactgccctgcgagcgagagggagtgcgagcggggcgtccacgcgctcccatgggggacctggggctgcttcccgcttcccgattttccttcagcgctgctcgtggcgtgccctttctcccgtggcgcagtcaccagcaggacgtgtgtcccgctcacgctttgggaaacacggccttgtagcaggagctgctctcggggttcagcatcgggggtggcagagcccagtgcctgctggggcattgccaggcatcgtggagctggacccagagccaggggtcccagctgctgctcctcaaggaccctgtggctcaggaaagccctcccattgctaacgtgtcacccgaagggcttggggacctccacgcaggatgggcttcaaaagtcagctcaggcggtgccctggcctcgggtgcgcggggagaccactggcctccctcatgccggctccctgctgactgtctcgtgagctcctggcagcccttctagaatgttctggcgtggctccctgctcacgtttctaaagcaactatcagcccatcctcaattaccgtgtctccaggaccacagacgacctggagcagcaagagtcagtgctggggccgggcgcggtggctcacgcctgtaatcccaacactttgggaggccgaggcaggcagatcacctgaggtcgggagttcgagaccagcctggccaatatggagaaaccctttctctactaaaaatacaaaattggccgggtgtggtggcgcatgcctgtaatcccagctactcgggaggctgaggcaggagaatcgcttgaacccgggaggtggaggttgcagtaagccgagatcgtgccactgcactccagcctgggcaacaagagtgaactccgtctcaaaaaaaaaaaataaataaagagtcagtgctgggacgagaggcaccggtaacatggccagtgttgcagccggaggcgggcagggctgacctgtccagggaccagcagagctcgggcaggaggtgaccctgagtcgggggagagggggcgtgggagcctggggctgggggaggagggaggatgtcactgtggatgaggctggttcccagcctcaggagccaggcccgggcccctccagctccacctgtgctcacctgggcaggtgatgccccatgctgagcctctgctctctggtccttagggtgggggtgcagttcatgccccatgggctgggtgaaagaataaacccccacccagtgggcacgtgcggcgggcacccagagtgcttgaagtttccttgtgaggctgctgctgactctggggagggacggtgtcgttggagtggggccacctggcttggcccgttgcccttggcagcaggaatacagctgccctgggggctcctctgccacacgggcactcaggggtgctggtcgttgggtccaggcagggtgggggcaagagccactgaggggccctttgtttgcatcttaggtgacgctgcagaggtgagtggccggggcatccagagcttccctgaatgactgggccacgacgatgaaggcgtcagggctgcagcctgctgggcgtgccccagccaagttttcaggacggcctctgcttctccttcggggaaggagcagccctactccctctgatggggctgcctgggagggttggatttgttgtttgtagggaaagactggggcggagagcagggtgctgtggcccctctcgtccctttctggttcctggggctgtccgcacagagcaggtggggacacgctggctggatttcatctggatcagaggagggtgagaggatggtctcctggtggggagtgcagagcctcagctctggagtgtggagaaggatccagcttgttgggtggtgtatggtcagaagtggggacctcggggcctcagatctggcctctgatcccaactctgttcccctcggagccacccttccctcatccatcaggagccagtagcagccccaggacagctgccgtgggataaataaaaggagccgccttcaggagctgcctgccgagtgtccacagaacgtagcgtcttcccagcactcagcgggtcctgatgggcctccttcccaccgccctcttccgagtgtggggagctcaacccctgacttggggtcccgggacattcagttttgtgtgtgatcagggaggcagcgcctgacccacagaaagcacctgctactggtggggtctcagatctgtgcacacctgtgtcccgggctcctcactgtccgggtggtcacactgtccctgcgctgctggacttgggggcttgggtgcagccagccttgtgctcctcagcctccctggtacaggaggactgtccatctgcctggcaggggcaaggccgtcttcagcggagagacctggaggccacgtggtctgctcagaagtacctgcatgcagtttgatgccctgctgcagcaatcttgaaattcttagtaattttatctttgaatgctcgctttgtaagtgcaatctaaggatggtggcgtgagcatgactgaaggaagctggagatggtcagggtgcgagtccactgcggagccagtaggtgccagtggttcgagaggccacgctttcccttgactcagagctggccccaagtgcagaaaggaggtggtgttgctctcagatgcccacacaaccaaggacacatcccccccgtctccctgggactcccatgtgagctggccacctgcactgcagatgacgatgtggaaggagagagaaagacaggagaccgcggcttttcctttcagtccttcgtacccaacagcaactgagagggcgtcccggcagggtatgaatggccagcaggacgctgaggctgcgtggcgtttccaccgtgctgcaggaacaagatgcacatcgtgcaggagccgcagagcacgcgtgcagaggtttcggtggctttgccccgcagctaacgtgtgcgtgtgtgccttgacttatatttgcattacttagaatgacattcaatagcaaatgaaagacagccggcaagtcaatagagagaatgcggaaggaaggagaaggctttgtttgtggctctgagggcacttttcctcctgcatttgcattttgcactgtgcagatttgcaccgtgcagccacccgggcctcctcgggtctggggctccatttccagcacccccacccagcgctgtgggcccctcccccacgcacctcccccactttggtggtgacagttggttgtggaggaacaatcgtcagtgatgggtgaactagctgtgtttcacgtggcctcctcatcactctgccaagcccctggggcaggcacattttggctgccatcgactctagaatgttctctggtgtctccagggggtgtgcagagctggtccctcccagcgaggagctctgctcacaggttcacaccccctgccctgttctccaagatgggaatgtctgatgagagccccagagaagaatcagccgctgggggtcggggaggtgttggactctcttgaaacaaaggaggcccaagcctggggtcacggggctgggggtgggggtggggtgggagggagtgggcagtgacctgagaacaggaagggaggtggaggtcttgggtcacgggtgatggatgatggaggaacaggcccaggaggccctgcttgctgggggcttctttcctcttgcgtagtcaccctgtggggggctctcaaactcacagagtttggccgtagggaagtgcaggggtggcctgggaggctgcaggctctgggacagcctggctcacacaggagatgggatggcgctgagaggagaccccggggcgcccagcgtctcaggctataaggagcagccactcattgtgacacccgatggtgaaatgctgcattattatttatggtgttgaataatcacagcacaatcattgcaggccacagggcagaaagtgctaatgtagtttaaaaacagtacatttgaatctggacactggcaagaaaataggcaaaataaatacttttgtccacccctccctaccctcttttggtgacttggggtggcctgggtcggtgctcagcccagggtcccgcggccagagccaaccatggcgcgcctggtctcctccagataaacgcgcgcccacgtctctgctgggctttggaattagctcaatactcattcagacgcagagtgcgtgtgccctgccaggacagacgtcattgctgtgcggtgcttgagtgccatcaataagccacagaagagaaatccggaaacaagggacgcgcagcgtgattccgtgccacggcgtcaggagcggcatgtagcatcttttggtttgagagtaaaattccgcaatcagaaatgaaatccgagcaaagaagcaaagcgcacagaggctggagacgctaaagcatccaggcaggactccgccaggtgggcaggcagaggcctgtgcacaggcagacggtgtgcccgtgagcaggacatgcttgtagggtcacaggtcacccacccgcaggacacgcatgcaaggtcacgggtcagccaccagcaggacacgcatgcagggtcacgggtcagccacccacaggacacgcatgcagggtcacgggtcagccacccgcaggacacgcatgcagggtcacgggtcagccacccgcaggacacgcatgcagggtcacgggtcagccacccgcaggacacgcatgcagggtcaggggtcagccacccgcaggacacgcatgcagggtcacgggtcagccaccagcaggacacgcatgcagggtcacgggtcagccaccagcaggacacgcatgcagggtcacgggtcagccacccgcaggacacgcatgcagggtcacgggtcagccaccagcaggacatgcacacccatgtgtgcacatgggtaggtgtgctcgacccacacatgttgtgccatcaccccatccttgtccttggagaaagggctattggccatcgtgacggggagcctctcagctgcgactgggccctgggagccatggagtcttctggccgcctctcctggccaccaaccaggaaccccaggccccaggcccacggttgcatctgctgtgccatcctgtggacaaacggacgatccaatccagatggcactgcaggggactgaacggggctctgaaacccggccggagctgccctcaggccaccctcctcaccttgagccattcccctgctccgtcacctgtgtcaggcctgggtgccgccaggaggcctccttccagctctctgcaagctggccccgtgttcacgggcatccagcgggatccaccatggaaagacagctttctcagaggcatctcagcacgtgggcccagccagaacctcgagggcttctgtccctggagggcagggcagagcgggaggacacagggacacagagaaggtatcagctggcgagggcagggcagagcaggaggacacggggacacagagaagatggcagctggctgagggcagggcagagcaggaggacacagggacacagagaaggtggcagctgactcggcgggagcggaaggtgctgctttcttcgaggtccccctctttgcggctcacccttctccctctatggcccccttaaccccaacccccctcggctgcctctctgagtaaaggacaggccagcgccgagcaggtatgtcccctgccagggtcccccgcacacctggatcttctaggctggggagtagtggaaggatctgcggggctctcgaagccgtctgggaggaacgtcaatgaccagaggaaggaacaagggtttcgggtgggattggccaattccctgggtcatctcagaaccacgagcttgtcttcctgggttacagggtcctgagcttggccgaaaagggacaaacgaagggccgggtgtgatgaccctgcataggtttgacagccctgtgtccttccaaatcaagtgagtgggtctgggtccccggccccctccagcctggggtccaagcctccctggtctcctcgggcagtcagcctctctgctccagtgccgtcagttgtcacctacgtgggtaaaacgccaggagaggctggatccccagctcaccggcctgtggcccgggcatcctgggcttgcagagggagggccgagggtggtaactaggaggagtggctctgagccggggagggaacacggccagagggggatgaaggccacacggagcaccgcgggagccccgccgtctgcgcagggttcagcctttcagcctcgatgtgggaagtctctccatctgttcaggttttctttgggtctttttaccagccatgtttcgcagtttgcagcgtacaagtctcacacttcctttgcgaaattattcctaagtagcttattctttctgatgctatttgaccaggacgctttctgcatttcatcttggggtgttcactgtcagtgcagaaatatcctacgccccatgatcttgttaaactccttcgatcatcttatcaggttttacttcattttattttatctttgtagattccttaggcgattccacctacggcgtgaggcgtacttctacatcttttttgctaatctcggtgatttgagttccatgttcttgcctcactgccctggctggaacccgctgtgcagtgtgggaggagcgggaggggagggtccccttgacttgctcccttccgtggggagacggtcaggctttccccaggaagcgtgctgtaggtttccatagattcgagacggtcaggctttccccaggaagcgtgctgtaggtttccatagattccattgctaggttgaggaggttcactctcatttctggtttgttgaaagtttttttttaattataaatgggtgtcagattttgtcaaatggattttctatatcagttgggatgatcatgtggcttttgtcctttattttattaatatgatttattacattaattgagttctggctgttaaaccaatctttcagtcctgggaaatatcccacttgatcatggtgtacagtattatctttttaaaataaattgttggatttggccaggcacggtggctcatgcctgtaatcccagccctttgggaggccaaggtgggaggatggcttgagcccgggaggtcgaggctgcagtgagccgagatcgtgccattgcctgggtgacagagtgagaccctgtttcaaaataaataaataaatagtcgaatttggtttgctaagttaaaaaaattaagtaagtgtcccgctcagcagcattaattacattcacgatgttgtgtcaccatcaccaccagctacatccccaactccaaacagaaaccctgtctccatgaataacaactacccattcctctccacccccagcctctcttaacctagaatgtactttctgtctgtgaattaggctcttctagatatctgatgcaagtagaatcatacaacatttgtccttttgtttctggcttatgtcactcagcacaatgcttccgaggtcgctcagcagggggcttccgaggtcgctcagcacggggcttccggggtcgctcagcacggggcttccggggtcgctcagcacggggcttccggggtcgctcagcacggcacttccgaggtcgctcagcacggggcttccgaggtcactcagcatagtgcttccgaggtcgctcagcacagcgcttccaaagttatttacctggtagcgagtgtcagacttccttcatttttctggctgaatcctattcccatgggtggatggaccgcattttgtcctccattcatctgctgggggcaactgtgctgtttccacctttcagccattgtgagtaacgctggtatgggagcctaagtgtctgtttgggtgtttgtcttcattcttccggacctacccttgggagtggaattgctggatcgtaaggcagttcggtgttccactatttgaggagctgccaaatcgtctcccacggtggctgctccattttacattcccgccatcaattccaacttctccacatcctctctgaggcttgttattttatttttatttatttatttttttgagacagggtctcactctgttgcccaggctggagtgcagtggtccaatctcagctcactgcaacctccacctcccgggttcaagcgattctcctgccttagcctctcgagtagctgggattacaagcgcatgccaccacacccaactaattttttgttttttggagagcagccgtcctatcgcatgtgaggtggtgtctctgtggttttgattcacatttccctagtgaccagtgagtgctgttgagcatcttttcatgtgcttattggccattttatatcttatttggagaaacatctattcgagtcctttgcctatttttaaatggaatttttttgttgttgaagtgtagcagttctttataaatcctgggtattaaaacccttatcagatatatgatttgcaaatattttctcccactctgtggttgacgtttcactttcttttttttttttttttttcgtttttgagaaggagtctcgctctgtcacccaagctggagtgcagtggcgggatctcggctcaccgcaagctccgcctcccgggttcgcgccattcttctgcctcagcctcccgagtagctgggaccacaggcgcctgccaccacgcccggctaattttttgtatttttagtagagacggggtttcactgtgttagccaggatggtctcgatctcctgacctcgtgatccgcccgcctcggcctcccaaagtgctgggatgacaggcatgagccactgcgcccggctgacgtt

SEQ ID NO: 11998 - DNA, 792 bp, Homo sapiens
aaaatagtgaaactgttcacagatgggatgatcttatatgtagaaaaatctaaggaatctactataaaaaccagtaaactaataaataggttcaacaaaggttcagaatacaaggctaatattaaaaaatgagtagtatttctatagagtagcaatcaacaaaccaaaaattaagaaaacaattttatttataataggatcaaaaaaataaaatacttaggaacttaagtgtaaaacttatactctgagaattctaaaacatcattgaaagaaattaaaccctaaataaatgtaaagacatcccatgtctttgaatcagaaaattaatattgttaagataatgatagtcccattctgatctatagatcagccttacagattcaacacaatttctgtcataactctcagctgactactttgcacaaatggagtagctgatcctaaagttcatgtggaaatgcaggagacttggattaacaaaaacagtcttgaactaggccgggtacagtgactcatgcctgtaatcccagcactttgggaggctgaggcaggaagatcacttggcctcaggagtttgaggccagcctgggtaacatagtgagacccctgtctctataaaaaatttaaaaattaggcaagcctcgtgacacccacctatagtcccagctactcaagaggctgaggtgggagggtagcttgagcccaggagtttgaggctgcagtaacctgtgattgtgccactgcactccagcctgggtgacagcaagactctgtctcaaaaaaaaaaaacaa

SEQ ID NO: 11999 - DNA, 1218 bp, Homo sapiens
agcacaccaagtatagcaacatacaaggattgtataccatgaccaaatggatttatgcaagtttggttcaacatttgaaaatcagtttatgtaatacactgtgttaatagaataaaggacaaaaaccacatgatcgtttccataggagcaaaaaagcatttgacaaaatccaacaccctttcatggtaaaaacaaaaactcaggagagaacttcctcagcctgttaaagggcatctacaaaaacccatggctgacatacctaatggcaaaaaattgaaagcttctaccactaagatcaggaacaagacgagttcctgatcgtttctggaagtggcagtgccattgccacttctcttcagcatcgtattggaggttctggctagggcagttaggcaagaaaaagaaattaaaggcatgcaaattagaaaagtagtgaaactgttcacagatgggatgatcttatatgtagaaaaatctaaggaatctactataaaaaccagtaaactaataaataggttcaacaaaggttcagaatacaaggctaatattaaaaaatgagtagtatttctatagagtagcaatcaacaaaccaaaaattaagaaaacaattttatttataataggatcaaaaaaataaaatacttaggaacttaagtgtaaaacttatactctgagaattctaaaacatcattgaaagaaattaaaccctaaataaatgtaaagacatcccatgtctttgaatcagaaaattaatattgttaagataatgatagtcccattctgatctatagatcagccttacagattcaacacaatttctgtcataactctcagctgactactttgcacaaatggagtagctgatcctaaagttcatgtggaaatgcaggagacttggattaacaaaaacagtcttgaactaggccgggtacagtgactcatgcctgtaatcccagcactttgggaggctgaggcaggaagatcacttggcctcaggagtttgaggccagcctgggtaacatagtgagacccctgtctctataaaaaatttaaaaattaggcaagcctcgtgacacccacctatagtcccagctactcaagaggctgaggtgggagggtagcttgagcccaggagtttgaggctgcagtaacctgtgattgtgccactgcactccagcctgggtgacagcaagactctgtctcaaaaaaaaaaaacaa

SEQ ID NO: 12000 - DNA, 339 bp, Homo sapiens
acggtctctctctgtcacctaggctacagtgcagtggtgtgatcacagctcattgcagccctgacctcccaggctcagccatccttctacctcagcctcccgagtagctggaaacaggtgcacaccaccacgcccagctaatttttttattttttgtaataaaaagagacaggatcttgctgtgttgcccaagctggtctcaaactcctgcactcaaatgatcttcccgtcttggtcttccaaagtgccggaattacaggcctgagccactgtaccaagccagaatgtgatatatttatactagcggatattattcagcaataaaagggaatgctgata

SEQ ID NO: 12001 - DNA, 339 bp, Homo sapiens; identical to SEQ ID NO: 12000

SEQ ID NO: 12002 - DNA, 844 bp, Homo sapiens
ggttggtctcagatggcctcaggtgatctgcctgccttggcctctcaaagtgctgggattacaggcatgagccaccaccacccagccaaaaaagctggagagactttaaaacaaaaactgttatcagagcaaaatagggatatttgataataacagggtgaaaccatcaagaagatacaacagttataaacatgtatgcatccaaaaacagcccccaaaaaatacatgaagcaaaaactaacagattggaagagagcagtagttcaaaaacaacagctggagaccttaacatactacttttaataatggataaaactaagcagaagatcaacagggaaacagaagacttaaataacactgtataccaacaaggactaacagagaactgtagaaccctccacccaactactacagaatgcacgttcttctcaagtgcacatgaacattctccaggacagaccatatgctaggctgttaaaaaaaagttcagcaaatttaaaaggattaaaactgtacaaaagtatgtcctcaaatcccagtggggtgagttagaaataaataacaaacttgggaaattaataaatacatgcaaattaagcagtatacttctaaataaccagtgggtcaaacaggagatcacaaacaaaattaggaagtgtcttgaggccgggcgcggtggctcacacctgtagtcccagccctttgggaggccgaggaggcgggtcgcttaaggtcaggaggtccaggcaggaaaattgcttgaacccccgaggcagaggttgcagtgagccgagatcacactacagcctgggtgacagagtgagattccatcaaaaaaaaaaaa

SEQ ID NO: 12003 - DNA, 3129 bp, Homo sapiens
ggctgggcgcggtggctcacgcctctaatcccagcactttgggaggccgagatgagtggatcacgaggtcaggagatcgagaccatcctggctaacacggtgtaaacctcgtctctattaaaaataacaaaaaaattagccgggcgtggtggcgggcgcctgtagtcccagctactccggaggctgaggcaggagaatggtgtgaacccgggaggcgaagcttgcagtgagcccagatcgcaccactgcactccagcctgggctacagagcaagactccgtctcaaaaaaaaaaaaaaaaaagataaatagaaggagcccaggtaccttgtgacactggagtgtcatattagccctggactacccacctccagacttgttttatatgacagaaaaataaatccttagtgtttaagccagtataatttggcatttttggttatatgcaactgaatcgaatactaattgataataccatgttgtaatgttaaatataaaaggtaagttgctaagtaaagccagaagaatataaactcaaacgtgtataggtgataggccagtaatacagaaaggtggatgagtggcagtataaatagtagggatgcagaggacatgttgaattggaaagcccctgcaacattaataatattaccatgtggccatgtggattgagatcttccagtttttcatgttaaatttccccagtgttctgcaaacaaaacattttcccagctgtatctacattgcagcctatcagtttgtgacttttgatttgtactatggtctaatatttagaaaaatggaataaaagggagaaggatggaagggagaaaagaaggaagggtggaccagcacttcgggaggctgaggtggctggattatgaggtcaggagtttgagaccagcctggacaatgtggtgaaaccccatctccactaaaaatacaaaaattagctgggcatggtggcatatgcctgtaatcccagctactcgggaggctgaggcaggagaatcgcttgaactcgggaagcggaggttgcagtcagccaagattgtgccactgcactccagcctgggtgacagagcgagactccatctcaaaaaaaaaaaaaaaaagttattgtctgctgtgtgttaaactgggagtctaatgtataaacatgtgaccttgccactttggagaaattccaggaaatggtacaaatggtaccttgattttttttttttcttttttccttttgagacagagtctcttgctctgtcacccaagctggagcgcaatggcacaatcttggctgactgcaacctccaattcccaagttcaagcgattctcctgcctcagccccccgaacagctggtattacaggcatatgccaccccacccagctaatttttgtatttttagtacatacggggtttcaccacgttgtccaagctggtcttgaactcctgacctcatgatccacccaccttggcctcccaaagtgctgggattacaggcatgagccaccgcgcccgccaccttgattattgtttaaataaaagatgaataaaagtacattcttatttttgattataatgtggcccaatgtatacatttcacttagtgtagcacatcacattgttcttactaaaactatttctagttttacaccagctcagatttttaaatattcattgctttttcctacttctgtctcaggcattgccattctcttcaaaacatatttgaaaaatgtccaggcttctcatctctgtgtaaaactgttcagtttgttccagtgtgacgagaagaaattggactgagcatacttttttgtgagacatccattttcttcctttgatgaatttgacaacttgtgacaattctcacattttggaacaagtctcctaattatagaagaagctaataatgataatataagaaattataaattatttgactgttttcaatttatccaaaaggaagtttatcaaactttctcctcctactttctgctccaccccacccctcagccccgatgcacacgctgtgccgtcacagcacttatgcctagagaattatgatccttaaatagcagtcaactcttcttaaatagcagtcagttgttctagcagtgtatcagttagacattctagaatatttcacaaaataagaattttgcagaaggaacattatagctccctaggtctagcaaatgagggaactagggtacagagaaattaagtgacttaagatctcacaacaaactagtggagtacttctacttaaatatatctctagatactcatagaaggtaaaagctacattgaaaattcacacaactcttctggaaagtggcaaattcaatgatgctgtaaagtctggcataatattctagtggtcaagacactttgggtagtaaatgagagaggccaaattcaaatcaggctaagaataaaaagaaatgttttctttcaagtgggtggagctcaagtaagtgtaaattccaggggataaattggattcaggcatagctggatgcaaaggctcaaaaatgtcatcagaatctgcctctttttctctcttggtgttgcttgccactgtgttgtcctcattctcaggtagcttgactcacacagctacaacaatggcttatatcctaatggttgatcagccacagggcagagtacacttttcctcagtggtccaagcaaaaatcctggggctcactcttactggctgacttggatcaggtgtccttctggagcacaacacagtgactccaggtggccaagcttgaatctcatgccacatccctaccaccagctccactaaaaagaaccacatggacagaaggggaggagtggttacaaagggaaaaataaatgtttattacccagggagggataatgaatgtaaggcaagcaaaaacgggaaaaaaaaaagtccattaaaaattcaatttacactatttacactcacattgcactgtaaactgatgcaattaagagtctcatttcttgcttggtggttagggatttatatttcattaaaaaaaatactaccaacattaagtaaggggatacttgaagaaaacaaagatatgcgatgaagaaaactgggctttgcaaaaaaaaaaaaaaaaaa

SEQ ID NO: 12004 - DNA, 2815 bp, Homo sapiens
gagcccaggtaccttgtgacactggagtgtcatattagccctggactacccacctccagacttgttttatatgacagaaaaataaatccttagtgtttaagccagtataatttggcatttttggttatatgcaactgaatcgaatactaattgataataccatgttgtaatgttaaatataaaaggtaagttgctaagtaaagccagaagaatataaactcaaacgtgtataggtgataggccagtaatacagaaaggtggatgagtggcagtataaatagtagggatgcagaggacatgttgaattggaaagcccctgcaacattaataatattaccatgtggccatgtggattgagatcttccagtttttcatgttaaatttccccagtgttctgcaaacaaaacattttcccagctgtatctacattgcagcctatcagtttgtgacttttgatttgtactatggtctaatatttagaaaaatggaataaaagggagaaggatggaagggagaaaagaaggaagggtggaccagcacttcgggaggctgaggtggctggattatgaggtcaggagtttgagaccagcctggacaatgtggtgaaaccccatctccactaaaaatacaaaaattagctgggcatggtggcatatgcctgtaatcccagctactcgggaggctgaggcaggagaatcgcttgaactcgggaagcggaggttgcagtcagccaagattgtgccactgcactccagcctgggtgacagagcgagactccatctcaaaaaaaaaaaaaaaaagttattgtctgctgtgtgttaaactgggagtctaatgtataaacatgtgaccttgccactttggagaaattccaggaaatggtacaaatggtaccttgattttttttttttcttttttccttttgagacagagtctcttgctctgtcacccaagctggagcgcaatggcacaatcttggctgactgcaacctccaattcccaagttcaagcgattctcctgcctcagccccccgaacagctggtattacaggcatatgccaccccacccagctaatttttgtatttttagtacatacggggtttcaccacgttgtccaagctggtcttgaactcctgacctcatgatccacccaccttggcctcccaaagtgctgggattacaggcatgagccaccgcgcccgccaccttgattattgtttaaataaaagatgaataaaagtacattcttatttttgattataatgtggcccaatgtatacatttcacttagtgtagcacatcacattgttcttactaaaactatttctagttttacaccagctcagatttttaaatattcattgctttttcctacttctgtctcaggcattgccattctcttcaaaacatatttgaaaaatgtccaggcttctcatctctgtgtaaaactgttcagtttgttccagtgtgacgagaagaaattggactgagcatacttttttgtgagacatccattttcttcctttgatgaatttgacaacttgtgacaattctcacattttggaacaagtctcctaattatagaagaagctaataatgataatataagaaattataaattatttgactgttttcaatttatccaaaaggaagtttatcaaactttctcctcctactttctgctccaccccacccctcagccccgatgcacacgctgtgccgtcacagcacttatgcctagagaattatgatccttaaatagcagtcaactcttcttaaatagcagtcagttgttctagcagtgtatcagttagacattctagaatatttcacaaaataagaattttgcagaaggaacattatagctccctaggtctagcaaatgagggaactagggtacagagaaattaagtgacttaagatctcacaacaaactagtggagtacttctacttaaatatatctctagatactcatagaaggtaaaagctacattgaaaattcacacaactcttctggaaagtggcaaattcaatgatgctgtaaagtctggcataatattctagtggtcaagacactttgggtagtaaatgagagaggccaaattcaaatcaggctaagaataaaaagaaatgttttctttcaagtgggtggagctcaagtaagtgtaaattccaggggataaattggattcaggcatagctggatgcaaaggctcaaaaatgtcatcagaatctgcctctttttctctcttggtgttgcttgccactgtgttgtcctcattctcaggtagcttgactcacacagctacaacaatggcttatatcctaatggttgatcagccacagggcagagtacacttttcctcagtggtccaagcaaaaatcctggggctcactcttactggctgacttggatcaggtgtccttctggagcacaacacagtgactccaggtggccaagcttgaatctcatgccacatccctaccaccagctccactaaaaagaaccacatggacagaaggggaggagtggttacaaagggaaaaataaatgtttattacccagggagggataatgaatgtaaggcaagcaaaaacgggaaaaaaaaaagtccattaaaaattcaatttacactatttacactcacattgcactgtaaactgatgcaattaagagtctcatttcttgcttggtggttagggatttatatttcattaaaaaaaatactaccaacattaagtaaggggatacttgaagaaaacaaagatatgcgatgaagaaaactgggctttgcaaaaaaaaaaaaaaaaaa

SEQ ID NO: 12005 - DNA, 247 bp, Homo sapiens
gtggatcacgaggtcaggagatcgagaccatcctggctaacacggtgtaaacctcgtctctattaaaaataacaaaaaaattagccgggcgtggtggcgggcgcctgtagtcccagctactccggaggctgaggcaggagaatggtgtgaacccgggaggcgaagcttgcagtgagcccagatcgcaccactgcactccagcctgggctacagagcaagactccgtctcaaaaaaaaaaaaaaaaaa

SEQ ID NO: 12006 - DNA, 2976 bp, Homo sapiens
aaaccccaggcgcagaggccaggagcgagggcagcgaggatcagaggccaggccttcccggctgccggcgctcctcggaggtcagggcagatgaggaacatgactctcccccttcggaggaggaaggaagtcccgctgccaccttatctctgctcctctgcctcctccctgttcccagagctttttctctagagaagattttgaaggcggcttttgtaagtatcgtgctctgcttttactttaaaaagaaagaagacaaactttccttcctgtccctgtccttttcgtattatttattcattattcatcatattattattcattatattctcagatgatggaaagtatgtttctggccaaagtcttccacccaaatttggtcccttgtaatgataataagaggggaaagaggtttctgttgataattaattcacttaacaaaatagtacccaggcgaggtactgaaattggccactttcacagcattctggtgatgtctggctgttgatacacaccacacacacacacacacaacactacacacacacacacacacacacacacacacacacacacacactcctttttgcccttaagaggagccctagtcacctggcttgttagacaaggagaaatgatgccactttggtcttcagtttctctgccttgggtactcacaatttcaatcagttgtaattgttgaaagtttcttttcacactacgaaataaatcccatctttcagtgcaggcttgaaacttgcactggcttgggtaaactgtacaaaacactgtagctatagtggacatgtgaatttttattaaatttttcactgcataaccgaaggttctaatattaaagaaacatggacactaactttttaagcacaggcaaaactcaaagccctgttatcaaactatgtgtcttaaagagtgctgaattaacagagtactcttctcagagattatgctcactgctttgagaaactgcttttcaacaagaggtgaatttaaaactctagaataacatgaagaaagacacaacttctgaatacttagcaactctgacttgctatttgaacaagccaaaaaacaaagggtctattttgggcaattgtacaatttgcatttataaaaccgtgattataacttggtatgctatgagatacagagatttattgttttaataagatttcaggtaagaaaactaagaactataaattggtaataatgtagaaaagcaaggcctctcacttttaatgctgtaagtgctgtgattcatttgtaaggctttatcatctttacctctagatgaatagatgtgaaaaccatgtatagtatgtatgtatatgttagtgtgtatatgtgtctttatcttaaattcttacatttgttgtatctatctagtgctcagtatgttatatgatagtacaacatccaaaatggatcaagtggagaaatttatttcacatcaactttcagattgcaatgtttattcagtatttattaacacacatgggaaatattataaaattatgtctttttttagattctctttaaatgatattttcccttagaattctctgtggctcccatgaaattctaaggtataattaaagtcaaaaataagattggattctagttgcttttacccctaaatttaaaagtgatatttcaacactaaattctatactttacctaatttgattacaaagatgaaccacataatctcagcattagcctcaaaggcaaactcaatcataatagaaggaacacaagctttgatgagatctggatttcaggcttagtttggtcaaactgaattaactgagccttgtgacacacacctgtagtcttagctactccggtgactgaggcaagaggatcgcttgagcctagaaggtggagactagagtgagttgcgtttgtgccactgcacctcagcctgggtgacaaagtgagatcctatctcaaaggaaaaaaaaaaaaaaaaagagagagactattgtagtgttccagtgagaactgctgggggcactgagcagtgtaggtggacaatagggcgcagattccagaaatatttagaaggtagaacattcttgactcagggctggatgaagggaatggaggaaaaggaaacttttataatattagttttgggcctgggctactgggtagttgtaatagaataccatagaacaagaggaggtactggtttatgaagaaaattgagttagttggagtaatatcaggttgagatatcactaagaggttagactgcaacgctgagtaaaaataaaaagcaatttttttaagcataaaattatcatctggatgtggtggcatgtgtctgtagtcccagctactcaggaggctgaagcaggaggatctcatgagcccagaggttcaaggctatggtgcactataatcaagcttgtgaatagatactgcactccagcctgagcaacatagtgagaccctggctctttaaaaaaaaaatgctagatttttgtctttgaaattttgaggagatacataaagactgagctctccctactatgttctaatgccccccaagaaatggtcactatctggactcaatgaaatcagagctttaatcttgtgtccctgctgccaaatgaatttttttctcattaacttttcaataggaagcccatgtctagggcagtcttgcctgtagctatgtgtatcctcaaagagagtaatttttacttcttcagagacttcagaaatgagcagagactaaagatctatgagctagtagaatacttattcataaaaagcacatatgcatgaagaagtaatacttatcaaaaacaaaccctttccttaacagggattcttcacttctcttgaacaaggaactcactcagagactaacacaaaggaagtaatttcttacctggtcattatttagtctacaataagttcatccttcttcagtgtgaccagtaaatt

SEQ ID NO: 12007 - DNA, 265 bp, Homo sapiens
cctctaatgtgcagcagcaaaggaacaacagatgccaacattcttgtttgcctcatgaacttaagccctaaagtaagctgacttgagtaaagtttagaggctccccttcaagttttagaaaagctttcttgtttaacttatgcaaatttacacaccctcatgaacctattgcatatatccgacaaccgtccatattttagtaccatgtggtggctctcacctatgcccatatagctggcgacaatgcaggtaagatctggtcagc

SEQ ID NO: 12008 - DNA, 138 bp, Homo sapiens
tcaagcaattctcctgcctcagcctcctgagtagctgggattacaggcacctgccaccacgcctggctaatttttgtatttttagtagagacggggtttcaccatgttggtcaggctgatctcaaactcctgatctca

SEQ ID NO: 12009 - DNA, 480 bp, Homo sapiens
atttttataatactatgctgaatctacaaatggaatactgggtaggttggctgggcacaggagatggctgcacctcctgcagagttaaccttggctgagcaagaggctccagggctgggcaccagatcaacctcatacccctaagtgagggcatcattaatgtctgtggcctgcaagtcgaggcatgcaggcagtcactgggtcaacatctgagcactcctggaccagaaccagtgcattccagaattcttgaattgaggatactaagacagggattcataatgccctctgcttgatgtgctggtggttgccaggaggcttggcttcagattcagaggaagataccaaaaaactgatcgtttccttgaattggcttttctatttacttcgtctgtgtctctcatattgaatatcctaagagagatgctggaatattttggcgttcctctagaagaagttttaccgattggagaaaataaa

SEQ ID NO: 12010 - DNA, 811 bp, Homo sapiens
tgcaccccaacataccgtgtttaactcttctgtcttttgtttttgctgctatttatattttcatttgatatgttttataatgtttgtccctagagttgtcctttattgaatacaagggtcttttctcaattgctataatgtctgttataatccagatgtagatatttgaacaatgtgaatacacatctttatgtgtattatcttaagtgctgtttaatattaaagtgtatttaaaatgaccagatttcaaattagtgcagttttgagatatttgttacttaggtcttaccaggtatgcacctgtgttgtaatttatgttggtatgctttagatctggtgtttccttggttttttgctgccgtatctcaagtggctagatttgatatttccttatccctgatctgacatttttatgtgaccaagtttctgtagcattttgttgaacaccaggtactgttgccactgtgcctaaccctaccatctccactccatgctatctcttactttacatgtaaatgacagttattttagtcacttttcacaatgtgaaatgtttctaggacacttgtccatgaacaggagcaaattgaaatttgaaatgatcacatctgattgacttgtaattagaggatgtttgggtgtggttgaatgtattgtatctgtacttattgaaaaacctgaaagacctggactcactatgttttgttctgcaacctggttagtcagctacgtggaagtgaccagagagttgaaagccaatttatttatccctccaagatgaataaaacataaattactcttctagcaaaaa

SEQ ID NO: 12011 - DNA, 557 bp, Homo sapiens
ataagatctagctttgcattaaggaagctagaaactgaagattgctatgtagtctatccttgatcattccttgacaattagagaacaaattgagcatggaccatttatcccctatttatatgcaaaattgttctaagtaagtattgatgatgttctctatagaaatttcaatcactcacttccttgtctgttctcctacacaatattatcagctctgctgcacatttcctcattggtgatccctgcaggaaaataggagataaggtcaattctagttgacttttatgagaatatgattatagcaggctttctttagttattggaatatgtgataagttaggacaaacaattatgcagcaataaatttatcttggttgttttaagttcatgtcaaaaattcagacatgctaatgttggtagctaagctcacacaactacctgcttatttacaaacttgcaattcaggaataaatgattgggatcttatatggcaagtgcatgatgccagtctaacaggagcagacgctctgtgcatttgcaactacaaaaaacaaaaa

SEQ ID NO: 12012 - DNA, 113 bp, Homo sapiens
cacgcctgtaatcccagcactttcggaggctgaggcaggcggatcacgaggtcaggagatcgagaccatcctggcctatatggtgaaaccctgtctctactaaaaatacaaaa

SEQ ID NO: 12013 - DNA, 529 bp, Homo sapiens
acaggagaaaaacatatacatttatttaatataagtttatgtggcatgaaaaccttcagaatttgtgaagacccaaagatgcagtttgtattgaccacttatataaggaattagacaaagagcagtaaattgcagaaatgtgatgaggtggggggtcgggggcttgggccagggcaggtgattggaggagaatggctgggaaggaagggccagtatagcaggtggtacaggtttccctcagcctcagcttctggtccttgcccataggaatcatgcctcccacctggccaagggaggacacctttcacatgggaatgtcatctcctgcttttcagaaacagaaggaaggtcagagtgatcttcttgtacctgctttttgtttttgtttttgtttttgtttttgagagagtctctctctgtcacccaggctggagtgcagtggcgcaatctcggctcactgcaacctccgcctcccgggttcaagtgattctcctgcctcagcctcctgaatagctgggattacaggcac

SEQ ID NO: 12014 - DNA, 343 bp, Homo sapiens
ctcgttcataagtaaagttcatgaaagcatataaatatatttaaataataataaacacactgagagaaatgacacaaaaaataattttgaattttctcatgtcattgttactaaagctgagaaaccagatattacataattaacataaagcggtattggaaacaaatgtggagacaagtcttttagattactggcattacatgctgctgactctcgcatcttcatgaaatctgttcccctttgccttctgtgacactggaagcttctgatttaccttcagtctctctgattacatcttctgaattccacttacaggtgcccttttttttttttgcccaacctt

SEQ ID NO: 12015 - DNA, 926 bp, Homo sapiens
tgctttttgaaataacttagacaaataatttcacacaataccagcataaacaagtataaacccgttcacattaatcaggcatccttagggaagattctgatggcctgaatggacatttcaattacatatatgttgatcatgtgtatttttctagtaagcactagtaccttacttgccctcccctgattaaacaaaaactgaaggtataaaacctgcccaaatggaaacctattttttcatagaaaacattgacaattatattttcatgttattctatctctgtttctaatgcatttttctcatattcataacagggagatagagttattcttcttaaaagagttgatcaaaactggtatgaaggtaaaatcccaggaaccaacagacaaggcatcttccctgtttcctatgtggaggtcgtcaagaagaacacaaaaggtgctgaggactaccctgaccctccaataccccacagctattctagtgataggattcacagcttgagctcaaataaggtaagaacatactctatcatgttaatgtaatattggaagctccaagtaagataatcggtgtgtgactttaggatattagattagaatatcatatctattgcagagaaagagatttacatattatgtttctacatgtgtgagtgccacatcagtaaatataagtcagtgtttctcaaataggtgctggcataaagatttaatgattaattttgctcatttcattttcaagttaaaatatcgaaagagaaagagaaaacgagagtatcatgaagtctcgtatgatatatatctgtactcctgtgtacataaatgttttctgaaataattttttcctaaagcttcatttttatatatgtaaattttatgtatataatataatctttacatataaataaatataatcatatattc

SEQ ID NO: 12016 - DNA, 163 bp, Homo sapiens
tctcagctcactgcaacctctgcctcccaggttcaagcgattctcccacctcagcctcccgattagctgggactacaggtgcccgccaccacacccggctaatttttgtatttttagtagagatggggtttcactatgttggccaggctggtctcgaactcct

SEQ ID NO: 12017 - DNA, 6584 bp, Homo sapiens
cagattgcttccaagtatgatcatcaggcagaagaagatcttcgcaattggatagaagaggtgacaggcatgagcattggccccaacttccagctgggcttaaaggatggcatcatcctctgcgagtgagttacagccctccagaatctgtttctgctcttccagttctttccacagccttctctctcactctccttctcagcccagggtgtcagaccttgatattctacagatatctttaatgctttcccttactgatgctaaagggagcaacttgatatttcaatccttgtttttgtgtgccagtaaataagatgtctctcatatttttcttttcagacttataaacaagctacagccaggctcagtgaagaaggtcaacgagtcctcactgaactggcctcaggtaacagccaaaccaaccacctctggttctagttggttgcattttatgtagtgaaaacttgatttcaggtttggttttttggttttgtgttttttttttttttaactttttgattacggtttttacatagacattgtagcagaaatttgtgcatatttaattttttgcccttttgtaatggttctgtaattacttatttaactagttctgtaattattatgtttagcttagaagttttcctatatttagtctgtgtacattcagaaaggacttgacacagcttacacagagaaatgcaacccagaccttaaggataagggaaaaaacaaggcattccacataactaacagtggactgcagagcactgtatcagacataaccttagttcatgagtgtgtatgaggaaggaaaatgggatacttactggtcttgaacatgtgtttggagatatgagagaatgagtatttagtaaccacaaatgtattctgaaattaaaataacacataatgaattatttattagtatgagtaattatataccttttgacaaataaaattccaggcctggatagctctgatacagaatccttttaaaatatataaggaagatcttgcccataaaaactgaaaacacgtaactgcttaaaaatattaagactgtgatgtgacccacagtgagagacacactctcttcttgctctttcctgttccagagagagccatgcttagtatgtatttggttgaatccttgtcaaacagctttctgggcagcgtcttataactggttatgaagacttggaattcttagaaattatgaatgtcaatatttagctccagaaattataaaactcttcttctttatagttggagaatattggcaactttattaaagctattcaggcttatggtatgaagccacatgacatattcgaagcaaatgatctttttgagaatggaaacatgacccaggttcagactactctggtggctctagcaggtctggtacgtacatgtctttaatggctggttgacagattcccaccacattggtgatgaattgcatcattgctttttcatgggggttcagaccaggtggggcggggcctgtctcttctgtaattagtagctttgtggaaaggctgctgacatcagctgcatcgtactagatagcttacttagaacactcacatttcaaatgatgcagtatattattgaacagccttaaatactttttatctctagtttgggcccctttgtctatggacatatcatttctttgttgttccttctgtgaaactctgttggccttttcagttagtgtgcatgtttctgtctaggctaaaacaaaaggattccatacaaccattgacattggagttaagtatgcagaaaaacaaacaagacgttttgatgaaggaaaattaaaagctggccaaagtgtaattggtctgcaggtaagtaatgtggtgttgcttattcaattacttattcaatatgattaattctcaccatgcaaaatattaagcctctcctaagaatagatagaagtactatagtactggggggggtgtagtttatacaatttatatctatttataaagcccataagacagtgataattttttagaggaaacctcaggtatgccacctgacttgacaattatttctccaggaaacgaaaatttttaattgaatcatattgtcttttttttttttttttaaaagaaaaatacacttttaaattttttattttatctttttttttttgagacagagtctcactcttttgcccaggctggagtgcagtgacgcgatctcggctcactgtaacctccacctcctgggttcaagcaattctcctgcctcagcctgccaagtagctgggattatgggaatgagccaccatgcccggctaagttttgtagttttagtagagataggatttcaccatgttggccaggctggtcttgaactcctgacctcaggtgatctgcccgcctcggcctcccaaagtgcttggattacaggcgtgaactactgcacctggcctgttttatcttttatatatagatgggatctcactttgttgcccaggatagtctcaaactctggagctcaagcagtcctcctgccttggcctcccgaagtgctgagattacaggcatgagctaccacacccagccagaaatgtactttataaattccttaatgttattgaccaaattaggcaattttacacgaccttaatgccaaagtcacttatttacagtaccaaatcatgatatagcagccaagccctgttagaatttgtcagtttaaattcttctgaaatacgtagttcagatgttttccttctcttcattgttctcttcactggtcatggaaacgtcattgctaattccccaaatgctgttggctttactctccaaaagccactgtacctgcttgatacagtgcccctttctactgagtctatgcaagttagatttatttttacacagtacaaaattgtattggtggtgagaaactggaaacctaaatttcagaacagtagtcagttggttgaattacaactccataaaagcaaagtgtaatgtaaaattatacactagagtttgaaaagataggttatgggggaaaaaaatcagatcatcaaatactgtggtcagtatggatttttaaaattaaaaatgcacatgtttttgtatgtatttgtatatatgtgcatctatagatatatacatagacacataggttaaaaagctaaaaggatattcacaaatgttgacagtgaatggatggtggtatcacaatgatttttcccccctcctttttgcttatatgtgttttctgaattttcttcaatgaacagattttatattagtaataaagattttctttaatcttatttttaaagaaaaaatatccaacatcagaaaagtgtgcctaaccagtggaacagggtgtaatggttggtcctgaagccatactgttctcagtggggaagaaaaattaattattgtttccctgaactttgctgagttcaaattcctcattccacctttctccagctctgtccaaggacatgggagttacaggaataaaatgtggttcctttctggagaaaatgttggtgattttgaaactttaaaaagcccttgttaagctcccagagaaaacacttggcatttgctttcacattttatgtaaaacattcctggagtagaacagcatattgcttggcctaggattacttctgttgaaataaccgaagctggtacctcttaatttggttatctggggaaagagtagcagaggaaattattctgccactgtaatgacttttggtgtgtcagtccacctgttaaagtgtgtttaattcttctatgtatgagtttttatctatagtgactttaaattttctttttaaagttagcacttgaaatttgtttgtagacacatagaagagttgactggagcctcagctcagtaacttgtcggttgtgccccttctgtctttttggtagcatggaaagttttgtttgtgttgtgtatattgttgacatctgataatttgtgcaattttatttttaacttaaaagatgggaaccaacaaatgtgccagccaggcaggtatgacagcttacgggactaggaggcatctttatgatcccaaaatgcaaactgacaaaccttttgaccagaccacaattagtctgcagatgggcactaataaaggagccagccaggtaagcaatacctttttatacgtgtacaagagtacacttaccttatttttattaaccagaagtttaaagtaggtattttttgtatagtttatttagagtatattccttcaggaatgtggactttgctgggaaagcaaaataatcaaaagaccttttcgatagcagcaaaagcatgatgtgtctcgtggtttttgttggcagttagaacagctggcctttctacctagccagcagaaaaaaagatatgtttattacagtgttcttgctccaaaatccaagtaaaatattgctcatttaaatgctgacttttttttttaaggagcccttaattaataggtaaaattacctggtgttccactaagaaggatttaactagcattcctattagatgtgtcaatataaggagatggaaatgcaacatggtgaaaataccagtataccacatccaagatagaaatatttccttgttaaaaatagatcaccagcacctcagaaggaagttcaacaaccatttgagaacagacaggtctcacatccaacaacagctgggatagggtttgaaaaacattttcttaccgagtccaagggagatttatcaaactttgcccttatggaacacatcctaccgggtgcggcattatgtctctcatagctgccactcacgtttacttttctacccactctgaacctggaagtgtgtgcttgatgtaagtagagagatgaagtatgagttactgtactctgaaaaagaggggagtggctgtgaagtggctggttcttctgtatctcagccttttgaaaagactcaagtccttaagatctgctcaacatagtttctgttgaatatattataaatttttgaaattggtaacccagataatgtatgtggtccccatgggcattcacatggaactttctggtgtggaagcattatgatttcacattctttatgtctcattctctcttaaatccagagtaggtagtaatgtctccattttgcagtttgagaaacctaaagctaaatttacgtgtttgaggccacatagtaattttatagcagagcaaggattttgaagaaaggtctcacctagctcaaaagccaatgaatattgcttcatggaagtgattcggtatcaggatattttggttaagctagctttacccctgaaccaaatgaaagttcatgtattactgttcatattcaatgtgaattctataatttataaattattcacaagaatagattctagctgctgttttaacttttatactatgttctaataccaggcagggatgttagcaccaggtaccagaagagacatctatgatcagaagctaacattacagccggtggacaactcgacaatttccctacagatgggtaccaacaaagttgcttcccagaaaggaatgagtgtgtatgggcttgggcggcaagtatatgatcccaaatactgtgctgctcctacagaacctgtcattcacaacggaagccaaggaacaggaacaaatggttcggaaatcagtgatagtgattatcaggcagaataccctgatgagtatcatggcgagtaccaggatgactaccccagagattaccaatatagcgaccaaggcattgattattagatccacacagaaggagctcagtatttagtcctttgtttttattcagtgagaaccaagctagccttgagtaatttttatcttgtcttcctaaaacactattaagcttattgtacttttaagaaaaattgccttacgtacattcctttttcctttttctgcctcttccctcaatagttgccttttagtgctgtaatagttaaatcctacagcataatcaataactcgcatatgaagtaaaaaggaatactgtgaaaggggagtactcttgtacagccagttcttttatgcaaaaatctatgcatttttacaatcttatattaaactggtattttcaaacaataggaaactttttttttttttttttttacagtttagtgtatctggtttctacatggaagactaaactcatgcttattgctaaatgtggtctttgccaactaaatttaagatgcagcattttagaaatttacatatcaatgtttctacagtattgtttgctaatttttaaataaagtcatgatcagtgtgcatttgtgattatatgtgtactcattctcttacctagcgaacaagatcttttcagagtggtgtttctaaaagagcatgtacaaaagtggcctgtggacatttaggcctgggtgatgcatttgctcttcctgtttgtgccaatgtatcaatgtagagttgctctgttttcttcaactgtatttattgctgcatttctcagcataaacttatcccattgtattttttataaataaatattttttttgaactttcatatgaaccacaggctgatta

SEQ ID NO: 12018 - DNA, 2582 bp, Homo sapiens
ggaaccaacaaatgtgccagccaggcaggtatgacagcttacgggactaggaggcatctttatgatcccaaaatgcaaactgacaaaccttttgaccagaccacaattagtctgcagatgggcactaataaaggagccagccaggtaagcaatacctttttatacgtgtacaagagtacacttaccttatttttattaaccagaagtttaaagtaggtattttttgtatagtttatttagagtatattccttcaggaatgtggactttgctgggaaagcaaaataatcaaaagaccttttcgatagcagcaaaagcatgatgtgtctcgtggtttttgttggcagttagaacagctggcctttctacctagccagcagaaaaaaagatatgtttattacagtgttcttgctccaaaatccaagtaaaatattgctcatttaaatgctgacttttttttttaaggagcccttaattaataggtaaaattacctggtgttccactaagaaggatttaactagcattcctattagatgtgtcaatataaggagatggaaatgcaacatggtgaaaataccagtataccacatccaagatagaaatatttccttgttaaaaatagatcaccagcacctcagaaggaagttcaacaaccatttgagaacagacaggtctcacatccaacaacagctgggatagggtttgaaaaacattttcttaccgagtccaagggagatttatcaaactttgcccttatggaacacatcctaccgggtgcggcattatgtctctcatagctgccactcacgtttacttttctacccactctgaacctggaagtgtgtgcttgatgtaagtagagagatgaagtatgagttactgtactctgaaaaagaggggagtggctgtgaagtggctggttcttctgtatctcagccttttgaaaagactcaagtccttaagatctgctcaacatagtttctgttgaatatattataaatttttgaaattggtaacccagataatgtatgtggtccccatgggcattcacatggaactttctggtgtggaagcattatgatttcacattctttatgtctcattctctcttaaatccagagtaggtagtaatgtctccattttgcagtttgagaaacctaaagctaaatttacgtgtttgaggccacatagtaattttatagcagagcaaggattttgaagaaaggtctcacctagctcaaaagccaatgaatattgcttcatggaagtgattcggtatcaggatattttggttaagctagctttacccctgaaccaaatgaaagttcatgtattactgttcatattcaatgtgaattctataatttataaattattcacaagaatagattctagctgctgttttaacttttatactatgttctaataccaggcagggatgttagcaccaggtaccagaagagacatctatgatcagaagctaacattacagccggtggacaactcgacaatttccctacagatgggtaccaacaaagttgcttcccagaaaggaatgagtgtgtatgggcttgggcggcaagtatatgatcccaaatactgtgctgctcctacagaacctgtcattcacaacggaagccaaggaacaggaacaaatggttcggaaatcagtgatagtgattatcaggcagaataccctgatgagtatcatggcgagtaccaggatgactaccccagagattaccaatatagcgaccaaggcattgattattagatccacacagaaggagctcagtatttagtcctttgtttttattcagtgagaaccaagctagccttgagtaatttttatcttgtcttcctaaaacactattaagcttattgtacttttaagaaaaattgccttacgtacattcctttttcctttttctgcctcttccctcaatagttgccttttagtgctgtaatagttaaatcctacagcataatcaataactcgcatatgaagtaaaaaggaatactgtgaaaggggagtactcttgtacagccagttcttttatgcaaaaatctatgcatttttacaatcttatattaaactggtattttcaaacaataggaaactttcttttttttttttttttttttacagtttagtgtatctggtttctacatggaagactaaactcatgcttattgctaaatgtggtctttgccaactaaatttaagatgcagcattttagaaatttacatatcaatgtttctacagtattgtttgctaatttttaaataaagtcatgatcagtgtgcatttgtgattatatgtgtactcattctcttacctagcgaacaagatcttttcagagtggtgtttctaaaagagcatgtacaaaagtggcctgtggacatttaggcctgggtgatgcatttgctcttcctgtttgtgccaatgtatcaatgtagagttgctctgttttcttcaactgtatttattgctgcatttctcagcataaacttatcccattgtattttttataaataaatattttttttgaactttcatatgaaccacagctgattatttt

SEQ ID NO: 12019 - DNA, 2579 bp, Homo sapiens
ggaaccaacaaatgtgccagccaggcaggtatgacagcttacgggactaggaggcatctttatgatcccaaaatgcaaactgacaaaccttttgaccagaccacaattagtctgcagatgggcactaataaaggagccagccaggtaagcaatacctttttatacgtgtacaagagtacacttaccttatttttattaaccagaagtttaaagtaggtattttttgtatagtttatttagagtatattccttcaggaatgtggactttgctgggaaagcaaaataatcaaaagaccttttcgatagcagcaaaagcatgatgtgtctcgtggtttttgttggcagttagaacagctggcctttctacctagccagcagaaaaaaagatatgtttattacagtgttcttgctccaaaatccaagtaaaatattgctcatttaaatgctgacttttttttttaaggagcccttaattaataggtaaaattacctggtgttccactaagaaggatttaactagcattcctattagatgtgtcaatataaggagatggaaatgcaacatggtgaaaataccagtataccacatccaagatagaaatatttccttgttaaaaatagatcaccagcacctcagaaggaagttcaacaaccatttgagaacagacaggtctcacatccaacaacagctgggatagggtttgaaaaacattttcttaccgagtccaagggagatttatcaaactttgcccttatggaacacatcctaccgggtgcggcattatgtctctcatagctgccactcacgtttacttttctacccactctgaacctggaagtgtgtgcttgatgtaagtagagagatgaagtatgagttactgtactctgaaaaagaggggagtggctgtgaagtggctggttcttctgtatctcagccttttgaaaagactcaagtccttaagatctgctcaacatagtttctgttgaatatattataaatttttgaaattggtaacccagataatgtatgtggtccccatgggcattcacatggaactttctggtgtggaagcattatgatttcacattctttatgtctcattctctcttaaatccagagtaggtagtaatgtctccattttgcagtttgagaaacctaaagctaaatttacgtgtttgaggccacatagtaattttatagcagagcaaggattttgaagaaaggtctcacctagctcaaaagccaatgaatattgcttcatggaagtgattcggtatcaggatattttggttaagctagctttacccctgaaccaaatgaaagttcatgtattactgttcatattcaatgtgaattctataatttataaattattcacaagaatagattctagctgctgttttaacttttatactatgttctaataccaggcagggatgttagcaccaggtaccagaagagacatctatgatcagaagctaacattacagccggtggacaactcgacaatttccctacagatgggtaccaacaaagttgcttcccagaaaggaatgagtgtgtatgggcttgggcggcaagtatatgatcccaaatactgtgctgctcctacagaacctgtcattcacaacggaagccaaggaacaggaacaaatggttcggaaatcagtgatagtgattatcaggcagaataccctgatgagtatcatggcgagtaccaggatgactaccccagagattaccaatatagcgaccaaggcattgattattagatccacacagaaggagctcagtatttagtcctttgtttttattcagtgagaaccaagctagccttgagtaatttttatcttgtcttcctaaaacactattaagcttattgtacttttaagaaaaattgccttacgtacattcctttttcctttttctgcctcttccctcaatagttgccttttagtgctgtaatagttaaatcctacagcataatcaataactcgcatatgaagtaaaaaggaatactgtgaaaggggagtactcttgtacagccagttcttttatgcaaaaatctatgcatttttacaatcttatattaaactggtattttcaaacaataggaaacttttttttttttttttttttttttacagtttagtgtatctggtttctacatggaagactaaactcatgcttattgctaaatgtggtctttgccaactaaatttaagatgcagcattttagaaatttacatatcaatgtttctacagtattgtttgctaatttttaaataaagtcatgatcagtgtgcatttgtgattatatgtgtactcattctcttacctagcgaacaagatcttttcagagtggtgtttctaaaagagcatgtacaaaagtggcctgtggacatttaggcctgggtgatgcatttgctcttcctgtttgtgccaatgtatcaatgtagagttgctctgttttcttcaactgtatttattgctgcatttctcagcataaacttatcccattgtattttttataaataaatattttttttgaactttcatatgaaccacaggctgatta

SEQ ID NO: 12020 - DNA, 4114 bp, Homo sapiens
tccttatcttaaaaaggtttatttattagttgtgcacttacaaacttacctcagttcttacatagtgtactttgtaagttgatgcatataaacatggttttagaagagtttttctgtcctaatttgtacaaaaaaaggtaaactaatatagttccagtattgttacctggtcaaacaataatgacaaagacaatgaggaagaatagggtttattaggtcttttaaaaaaaaattcactaacttttctctagtggtctcatcttctattctgtaaatggctcttagaaggaaatgttttccaggtacagatacctaaatgggtatctatctcacaatggcctggagttctgttccctcctcattccttaatgagtgcttgtcctgctgtgcccttgcattgtttaatttgttgctcctttttacgaaactctgaaaaacaaaagaacaagttagaatagtattatgtgtctgtactgttgataacgtaggggccgagggaaaacttctcctttgccctctgacggtttgctgaagaattaacttacaaaaggcagattaacaggagaaatggcatataaagtagcacaggggagaatcacagtgagtgtctaaatggggtacagataattctgtttttgggaaagggagatggggaagtgtggatgattttatgggggtggtgaattacttttaggggagtttaatgagcttgaagaacacttagtggctgggaacaaagtctgttgggcccacaggacagtggtttgtgacaaaagtctgtccaggtgtgttgactgaatttagtctttgtttctgctatataagtccagttaatggaaaactcagggaaggggccagaggtggtttttttctttggtgggtctggactttaggcagataaggggatttcattcagatgacagcttcatcctgtgctttgggagaaggtcagagagttcttgaggcttcttcagttcagcatgtcaaagtgccatattatggagtatcaatttctgagtcccaatgatagccatttacaagttcttggccttaaatttcagataactggatccttaagaaagtttcttctgttgaaaaaactattttaaggggtaaatttcaaggtggattttttttgggggggaggtggtggagacggagtcaccctctgtcgcccaggctggagtgcaatggcgccatctcagctcactgcaacctccacctcccgggttcaagcgattctcctgtctcagcctcctaagcagctgagattacaggcgcctgccactgtgcctggctaatttttgtatttttagtagagatagggtttcaccatgttggccaggctggtctcaaattcctgacctcatgtgatccacctgccttggcttcccaaagtgctgggattgcaggtgtgagccatagtgcccggatttcaaggtggatttttaactggaaaagtaaatcaggggatggagacctggctagctacataccaccatcataagcactttccttagagtacatacaaataagtcaataaacaagtaaaaagtaaaaattgtattttggctgagtgcggtggctcacaactgtaatcccagcacttgtgggaggccgaggcagatggatcacctgaggtcaggagttcaaaaccagcctgaccaacatggtgaaaccccgtctcttctaaaaatacaaaattaggcgtggtggtgcacgcctgtaatcccagctacttgggaggctgaggcaggagaatcgcttgaacctaggaggtggaggttgcggtgagctgagattgcgccattgcactcaagcctgggcaacaagagcaaaactctgtctcaaaaaaaaaagtaaaatttgtagtttatgttttatatggagaaggatgaggatacattaattataaattgtagaagtggttcttaaaaaattgagtgcctgctgaaccaaagagtgcattaaatgctctgtttaaagctaaaagggctttaacacctaatttttatggcaacagaatgaaagaaaagtatgcaaatatcatataactcagacaaggaaaagagatgagacatcattcagctgttaaaatatccctgtctacccaggataaggcaaataagcaacaactgtgttgcaaaggctgttgcaaacagctgcctgctatttccagatataagcagtatgggcgctccgctgagggtgtggcttttctcacactggtgtgcctgggctaataaagggcctgagaattgcagatctgtcaatactggcacagaggagcacacaagtgtgctctccctaatatagtgggtatgaacatcatgcttggagatgcaaaaatgctttagaaaaagatcaactgttaaacttctagaccacccaaaaggccagatcatgccatgagcaccaaagggagctgaactactgtgttcaggacatcttctgcccagggtaagaagtgctgctgctacttaggaatccatctgatcagcattcttgttcagcttcacttcttcagggagaaggttctcagaaagggaggtgggttcagccttggagagttcagcgcaaatcccactttcaggcccgggggtagtagaagcctcagagccctctagaagagagaggctgggtatgagcctctttcgtgtgtgcagctttacaaaactttcaagattgcgagcatggagattgcaactggaaatgaaatgtttgcttaccagaaattcttgatccataaagtagggcttttctgacgatccatcatttgtttccagatcaacagcaaaacacaggaaaagtgcatccagcacagtttcaaacacagataaaaaactatgggctactaagtaggcaaaaaaagctaccaataacagagggactgcccacacctggaatgcccgattgtagttaaaagccatgagtcctccaaaaacagtgaaacacaccactaacacctgtgcaaaagaagagtttgttgaaaatctttatgaatcagttgcttagatgtttttgtcagttacaagtaatggtttaatatacgttcctgtgtgcaacgtgtgtgtgcactattgtaaagaatgcttgtcagaaattttggcagaatgaaatagaggaaaaaatgaaaagctgtatcaaaaggaaacccagttaatggcgagtaggaaggttatatgtaattttatctgtgcctagcttttgtatttatataaatgtaataatatctcacaagctttttattctgctttttcacttaacaccaaaataagcctattcactttaaaactttttttagaaaccatccctctttcttttgagacagagtctcgttctgttgcccaggctggagtacagtggtgtgatctcggctcactgcaacctccgcctcccaggttcaagtgattctcctgcctcagcctcctgagtagctgggattacaggcacccgccaccacacccggctaatttttgtatttttagtagagacggggttttcccatgttggccaggctgatctcaaactcctgacctcaagtgatctgcctgcctcggtatcccaaaatactgggattacacatgtgagccactgtgcccagtccaggtttcaatactctttccatatattcttaatgagaaacccacaaacgttcattttctgagattagtagcattttcattttagacctgaaaaagagggaatcagaatggtagaactgatcacaggtaagagagtaagactaagattaaaattctggctctacctattgtagtaccctggaaaggttattaaaccttcattttctcttctgcaaagtagggatacctcatgggattgaggattaaatgagataatgaagcacagcacccactatagagtaagtactcaagaaatatagttccctttcaaaccaattgttgtatggcttaattttcagaatcccaggctcctttatttagtcaagatatctcacctttcctagaaaaattatgaagtctccaaagcagttaatagatgtaaagtgacttgagttcttggacaagattttgaatgcatcttttgctgatgtacagaaatctgtcccattaatagcagttgtagtatatgc

SEQ ID NO: 12021 - DNA, 240 bp, Homo sapiens
tcacatgtttgggtgtcaggttcaattctagatactaagaatctgaatgaactagatgcttttcctgcctgtaagaagtctaataggatagagactacataaacagaatttaaatattgtacagtaattagtactgaggaaagtgtgtgtgtgtgtgtttagtatatagtgtgtatttggctgaatagaaggcaaataccagaactttccagtcaacaaaactattggaatgttatgtat

SEQ ID NO: 12022 - DNA, 1115 bp, Homo sapiens
tccttatcttaaaaaggtttatttattagttgtgcacttacaaacttacctcagttcttacatagtgtactttgtaagttgatgcatataaacatggttttagaagagtttttctgtcctaatttgtacaaaaaaaggtaaactaatatagttccagtattgttacctggtcaaacaataatgacaaagacaatgaggaagaatagggtttattaggtcttttaaaaaaaaattcactaacttttctctagtggtctcatcttctattctgtaaatggctcttagaaggaaatgttttccaggtacagatacctaaatgggtatctatctcacaatggcctggagttctgttccctcctcattccttaatgagtgcttgtcctgctgtgcccttgcattgtttaatttgttgctcctttttacgaaactctgaaaaacaaaagaacaagttagaatagtattatgtgtctgtactgttgataacgtaggggccgagggaaaacttctcctttgccctctgacggtttgctgaagaattaacttacaaaaggcagattaacaggagaaatggcatataaagtagcacaggggagaatcacagtgagtgtctaaatggggtacagataattctgtttttgggaaagggagatggggaagtgtggatgattttatgggggtggtgaattacttttaggggagtttaatgagcttgaagaacacttagtggctgggaacaaagtctgttgggcccacaggacagtggtttgtgacaaaagtctgtccaggtgtgttgactgaatttagtctttgtttctgctatataagtccagttaatggaaaactcagggaaggggccagaggtggtttttttctttggtgggtctggactttaggcagataaggggatttcattcagatgacagcttcatcctgtgctttgggagaaggtcagagagttcttgaggcttcttcagttcagcatgtcaaagtgccatattatggagtatcaatttctgagtcccaatgatagccatttacaagttcttggccttaaatttcagataactggatccttaagaaagtttcttctgttgaaaaaactattttaaggggta

SEQ ID NO: 12023 - DNA, 1115 bp, Homo sapiens; identical to SEQ ID NO: 12022

SEQ ID NO: 12024 - DNA, 779 bp, Homo sapiens
ttttgttttaatctttgggggtaaaataatgcaataatgataaaacaaaattcaaaagcctgtaaagctatgggatctgcttgggattttcaagggtgagatagggtctataatagacatgtgtttactgattgtgaccccaggcattggttttctgtccttcattgttaggataggtggatctggggacacagactgagtggagtggagaagaaaggatttattaataatcagggaggagcatgtgggatagatctgaggtatctgcaagcatttgagaactactgattgtaactatatgaactgaagatggctcagtgcaatcctgggtctttccacattccatatttaattaaaggcctttgccatatcttggttcctggctcaattttagtcagataaaatttaagttattataaaataataacaaatttggcatataaggttttaaactgatcacggtagctggacagcattagcaacaatagttgaaaaaatagagcttctttatgcagtgatatctgtataatctatttagctcaaagataacattgagtttatatccacgtatgtttatgaatgtgtaatttggacacctgggattttattgtatgtagatgttttatccgttccctttttaaaatccaatgttctatctgtaatgctctgccactacacattctttcaaaaaaattctgattctaaatctttaatgatgatatgcctcaatcttcttttaacatagatagctcttctggaaaaaaaacaaaaaaacaaaa

SEQ ID NO: 12025 - DNA, 3562 bp, Homo sapiens
  SITE (3379): n equals a,t,g, or c
gaaatcgcaggactacaagtccctcaatgccacttgcgccggaggcacttccttttccggttgtgctaggcgcctgctcctgccgacgtgttcttccggtggcggagcggcggattagccttcgcggggcaaaatggtgagagcgttgaggggagttccagacggagatgcgaggacccctcggggtctgacccacaccgcgcttatctcctcagacgccggagatccagagggctagacgctcctggaacctccggcttgggctgaagggtggggaagggggaagccccttgccatgaactccttaggtttctcagctcgcgatttctaagggcgagaggcgtggggcgaattttgaataccttccagtttgtatatctctgttatcggtggtgtgttatctttattgggaaagttcttctgccgaacccgtgccatcctacaatgccctgggcaaatgtttattggtgaagcacttccaactctcaggcacttggccagactttcctaggagcgcccacagcctctgtacagatctctggccacgttccatggacttctttgttttcggccacgcctcctagtgaccaccgtctgacgcgcatctagctctgggatgatgtctattcatctttgtattctcagtgccaaacagagggcccgtaattggaagctcaataaatggcagtgattgtctttatcattttgggggaagggggccgtgattgtttactgaattgaattccagtgtctcagaacaatgggggcagtttacttctctagagttgttatgttctggattttagaagcattggctgaccggtgacaatgaagttaacatttgtacagatctttacgtttacagccctctttcataaaagacattatctcatcatcttccctacagccttaggaaggaagcaaatacctgttgagcaaaatactccctgctaggcactagatgctttgattcatcatctttcttatttttcagttctgtgaaatagatattacagtcgctttactcagactcagattactcagaaccagaacttgaatgtcttgaccatagctcacaagattccataatagcataggtagtgaggaaaatactgaattagaaattgagggccaggcgcggtggttcactcctgtaatcccagcactttgggaggctgaggcgagcggatcaggaggtcagaagttcaagaccagcctggccagcaaggtgaaaccctgtctctcctaaaaatacaaaaaattagccgggcatggtggttcacgcctgtaatcccagctgctcgggaggctgaggcaggataatcacttgaacccagaaggcggagcttgcagtgagccgagttggcaccactgcactccaggcactccagcctgggcgatagagcaagactgtctggaaaaaaaaaaaaattgagcctgggcgcggcaactcacacctgtaatctcagtactttgggaggccgaggcaggcagatcacctgaggtcaggaattcaagaccatcctggccagcatggcaaaaccccatctctactaaaaatacaaaaattagatgtggtggtgcgcacctgtaatcctatagtcccagctactcgagaggctgaggtatgagaatctctagaacccgggaggcagaggttgcagtgagccgagatcgtgccactgccctccagcccgggcgacagagtgagacgccgtccaaaaaatgagactccgtcaaaaaaaaaagatattgagatctgggtaccaccagtcagtgacttatagcgggggttctcagcttggtgtctatagacactggtccacaaagctccggaaattgtaggcaaactttttcttgtatgtggtttttctcaggcagagagttcgtacctttagtcacgttttcatagtggtcagattattggcctcagaaaatgctaataagggccattgatctgcagctacatttccgggctaaaatcagcctctgtttcacggcagcaccaggctccttgataaccgcatgttctctccaggctgaaatcgtgggattctttgatagctctgatctctttccctcctctaggagctcgaggccatgagcagatataccagcccagtgaacccagctgtcttcccccatctgaccgtggtgcttttggccattggcatgttcttcaccgcctggttcttcgtgtatcctttcactgagcagccagaggaccagcattagtgatgtgggaagctcagggagaaaccacgctaggtacatggaccccgccggttttgtacattggattggggctgagagaaggtaaggaggagaggagggctagtgatgcccaggggcaggttatagccttatttcccaagttcaggtgagctcagtttgttctttggatttccaggacagtgagcaggggacctggctggagtggaggtggggaataggggtgctacagttggaaaggtggtataaggaagggtgcactcaggtgtcaggaggtctgagggctagtcccagctccggccctcatgagctgtgtgacctggggcaagtgacctaactcctctgggtctcattttcttcatggcagtggagcaccagagtccaaggcatctcttaggcccttctgcctggctgttctgagccagataggcctcccagaaggcattgagccaatgcttttctcctcagattgccgtgggctgggctctctgcactccacagtccaccccttcgctttgccttaactgctgtgcccagttacgaggtcacctctaccaagtacactcgtgatatctataaagagctcctcatctccttagtggcctcactcttcatgggctttggagtcctcttcctgctgctctgggttggcatctacgtgtgagcacccaagggtaagagctgcaatgggatggatgcgtgagcctccaaggcacagcccagggaagcctccccagagtcaggtcagcagggtccttaaagctcttaccagcatgaccccttggttgatggagacagactcagtggaatgggtagggacactagacatttgtgcctctttccctgcccctcatacggatttgagccaaatgtgactctcagttctgagctcacatggcccaaggcctcgatctgcctttgggatgtaccacctagagtgtggacgcaggcatcccatggctgtacatttacattcttagaagtcagaccccagtgacttggagaggctgctgggaagtcagctggctgaaaaggggtcaagatccagggcttaaaacttgctgcagacaatccaccaaacaggccagtaggaatcagctctggtggctcatcctcagaggtgtgtgctcaatagcccttgccccangagcacaggggtgcagggagagaaggaggaaagaagggccattggtcttattttgatacccctctcctcttttaggtaacaaccagatggcttcactgaaacctgcttttgtaaattacttttttttactgttgctggaagtgtcccacctgctgctcataataaatgcagatgtatagcagt

SEQ ID NO: 12026 - DNA, 3564 bp, Homo sapiens
gaaatcgcaggactacaagtccctcaatgccacttgcgccggaggcacttccttttccggttgtgctaggcgcctgctcctgccgacgtgttcttccggtggcggagcggcggattagccttcgcggggcaaaatggtgagagcgttgaggggagttccagacggagatgcgaggacccctcggggtctgacccacaccgcgcttatctcctcagacgccggagatccagagggctagacgctcctggaacctccggcttgggctgaagggtggggaagggggaagccccttgccatgaactccttaggtttctcagctcgcgatttctaagggcgagaggcgtggggcgaattttgaataccttccagtttgtatatctctgttatcggtggtgtgttatctttatttggaaagttcttctgccgaacccgtgcccatcctacaatgccctgggcaaatgtttattggtgaagcacttccaactctcaggcacttggccagactttcctaggagcgcccacagcctctgtacagatctctggccacgttccatggacttctttgttttcggccacgcctcctagtgaccaccgtctgacgcgcatctagctctgggatgatgtctattcatctttgtattctcagtgccaaacagagggcccgtaattggaagctcaataaatggcagtgattgtctttatcattttgggggaagggggccgtgattgtttactgaattgaattccagtgtctcagaacaatgggggcagtttacttctctagagttgttatgttctggattttagaagcattggctgaccggtgacaatgaagttaacatttgtacagatctttacgtttacagccctctttcataaaagacattatctcatcatcttccctacagccttaggaaggaagcaaatacctgttgagcaaaatactccctgctaggcactagatgctttgattcatcatctttcttatttttcagttctgtgaaatagatattacagtcgctttactcagactcagattactcagaaccagaacttgaatgtcttgaccatagctcacaagattccataatagcataggtagtgaggaaaatactgaattagaaattgagggccaggcgcggtggttcactcctgtaatcccagcactttgggaggctgaggcgagcggatcaggaggtcagaagttcaagaccagcctggccagcaaggtgaaaccctgtctctcctaaaaatacaaaaaattagccgggcatggtggttcacgcctgtaatcccagctgctcgggaggctgaggcaggataatcacttgaacccagaaggcggagcttgcagtgagccgagttggcaccactgcactccaggcactccagcctgggcgatagagcaagactgtctggaaaaaaaaaaaaattgagcctgggcgcggcaactcacacctgtaatctcagtactttgggaggccgaggcaggcagatcacctgaggtcaggaattcaagaccatcctggccagcatggcaaaaccccatctctactaaaaatacaaaaattagatgtggtggtgcgcacctgtaatcctatagtcccagctactcgagaggctgaggtatgagaatctctagaacccgggaggcagaggttgcagtgagccgagatcgtgccactgccctccagcccgggcgacagagtgagacgccgtccaaaaaatgagactccgtcaaaaaaaaaagatattgagatctgggtaccaccagtcagtgacttatagcgggggttctcagcttggtgtctatagacactggtccacaaagctccggaaattgtaggcaaactttttcttgtatgtggtttttctcaggcagagagttcgtacctttagtcacgttttcatagtggtcagattattggcctcagaaaatgctaataagggccattgatctgcagctacatttccgggctaaaatcagcctctgtttcacggcagcaccaggctccttgataaccgcatgttctctccaggctgaaatcgtgggattctttgatagctctgatctctttccctcctctaggagctcgaggccatgagcagatataccagcccagtgaacccagctgtcttcccccatctgaccgtggtgcttttggccattggcatgttcttcaccgcctggttcttcgtgtatcctttcactgagcagccagaggaccagcattagtgatgtgggaagctcagggagaaaccacgctaggtacatggaccccgccggttttgtacattggattggggctgagagaaggtaaggaggagaggagggctagtgatgcccaggggcaggttatagccttatttcccaagttcaggtgagctcagtttgttctttggatttccaggacagtgagcaggggacctggctggagtggaggtggggaataggggtgctacagttggaaaggtggtataaggaagggtgcactcaggtgtcaggaggtctgagggctagtcccagctccggccctcatgagctgtgtgacctggggcaagtgacctaactcctctgggtctcattttcttcatggcagtggagcaccagagtccaaggcatctcttaggcccctctgcctggctgctctgagccagataggcctcccagaaggcattgagccaatgcttttctcctcagattgccgtgggctgggctctctgcactccacagtccaccccttcgctttgccttaactgctgtgcccagttacgaggtcacctctaccaagtacactcgtgatatctataaagagctcctcatctccttagtggcctcactcttcatgggctttggagtcctcttcctgctgctctgggttggcatctacgtgtgagcacccaagggtaagagctgcaatgggatggatgcgtgagcctccaaggcacagcccagggaagcctccccagagtcaggtcagcagggtccttaaagctcttaccagcatgaccccttggttgatggagacagactcagtggaatgggtagggacactagacatttgtgcctctttccctgcccctcatacggatttgagccaaatgtgactctcagttctgagctcacatggcccaaggcctcgatctgcctttgggatgtaccacctagaagtgtggacgcaggcatcccatggctgtacatttacattcttagaagtcagaccccagtgacttggagaggctgctgggaagtcagctggctgaaagggggtcaagatccagggcttaaaacttgctgcagacaatccaccaaacaggccactaggaatcagctctggtggctcatcctcagaggtgtgtgctcaatagcccttgccccaggagcacaggggtgcagggagagaaggaggaaagaagggccattggtcttattttgatacccctctcctcttttaggtaacaaccagatggcttcactgaaacctgcttttgtaaattacttttttttactgttgctggaagtgtcccacctgctgctcataataaatgcagatgtatagcagt

SEQ ID NO: 12027 - DNA, 3564 bp, Homo sapiens
gaaatcgcaggactacaagtccctcaatgccacttgcgccggaggcacttccttttccggttgtgctaggcgcctgctcctgtcgacgtgttcttccggtggcggagcggcggattagccttcgcggggcaaaatggtgagagcgttgaggggagttccagacggagatgcgaggacccctcggggtctgacccacaccgcgcttatctcctcagacgccggagatccagagggctagacgctcctggaacctccggcttgggctgaagggtggggaagggggaagccccttgccatgaactccttaggtttctcagctcgcgatttctaagggcgagaggcgtggggcgaattttgaataccttccagtttgtatatctctgttatcggtggtgtgttatctttatttggaaagttcttctgccgaacccgtgcccatcctacaatgccctgggcaaatgtttattggtgaagcacttccaactctcaggcacttggccagactttcctaggagcgcccacagcctctgtacagatctctggccacgttccatggacttctttgttttcggccacgcctcctagtgaccaccgtctgacgcgcatctagctctgggatgatgtctattcatctttgtattctcagtgccaaacagagggcccgtaattggaagctcaataaatggcagtgattgtctttatcattttgggggaagggggccgtgattgtttactgaattgaattccagtgtctcagaacaatgggggcagtttacttctctagagttgttatgttctggattttagaagcattggctgaccggtgacaatgaagttaacatttgtacagatctttacgtttacagccctctttcataaaagacattatctcatcatcttccctacagccttaggaaggaagcaaatacctgttgagcaaaatactccctgctaggcactagatgctttgattcatcatctttcttatttttcagttctgtgaaatagatattacagtcgctttactcagactcagattactcagaaccagaacttgaatgtcttgaccatagctcacaagattccataatagcataggtagtgaggaaaatactgaattagaaattgagggccaggcgcggtggttcactcctgtaatcccagcactttgggaggctgaggcgagcggatcaggaggtcagaagttcaagaccagcctggccagcaaggtgaaaccctgtctctcctaaaaatacaaaaaattagccgggcatggtggttcacgcctgtaatcccagctgctcgggaggctgaggcaggataatcacttgaacccagaaggcggagcttgcagtgagccgagttggcaccactgcactccaggcactccagcctgggcgatagagcaagactgtctggaaaaaaaaaaaaattgagcctgggcgcggcaactcacacctgtaatctcagtactttgggaggccgaggcaggcagatcacctgaggtcaggaattcaagaccatcctggccagcatggcaaaaccccatctctactaaaaatacaaaaattagatgtggtggtgcgcacctgtaatcctatagtcccagctactcgagaggctgaggtatgagaatctctagaacccgggaggcagaggttgcagtgagccgagatcgtgccactgccctccagcccgggcgacagagtgagacgccgtccaaaaaatgagactccgtcaaaaaaaaaagatattgagatctgggtaccaccagtcagtgacttatagcgggggttctcagcttggtgtctatagacactggtccacaaagctccggaaattgtaggcaaactttttcttgtatgtggtttttctcaggcagagagttcgtacctttagtcacgttttcatagtggtcagattattggcctcagaaaatgctaataagggccattgatctgcagctacatttccgggctaaaatcagcctctgtttcacggcagcaccaggctccttgataaccgcatgttctctccaggctgaaatcgtgggattctttgatagctctgatctctttccctcctctaggagctcgaggccatgagcagatataccagcccagtgaacccagctgtcttcccccatctgaccgtggtgcttttggccattggcatgttcttcaccgcctggttcttcgtgtatcctttcactgagcagccagaggaccagcattagtgatgtgggaagctcagggagaaaccacgctaggtacatggaccccgccggttttgtacattggattggggctgagagaaggtaaggaggagaggagggctggtgatgcccaggggcaggttatggccttatttcccaagttcaggtgagctcagtttgttctttggatttccaggacagtgagcaggggacctggctggagtggaggtggggaataggggtgctacagttggaaaggtggtataaggaagggtgcactcaggtgtcaggaggtctgagggctagtcccagctccggccctcatgagctgtgtgacctggggcaagtgacctaactcctctgggtctcattttcttcatggcagtggagcaccagagtccaaggcatctcttaggcccctctgcctggctgctctgagccagataggcctcccagaaggcattgagccaatgcttttctcctcagattgccgtgggctgggctctctgcactccacagtccaccccttcgctttgccttaactgctgtgcccagttacgaggtcacctctaccaagtacactcgtgatatctataaagagctcctcatctccttagtggcctcactcttcatgggctttggagtcctcttcctgctgctctgggttggcatctacgtgtgagcacccaagggtaagagctgcaatgggatggatgcgtgagcctccaaggcacagcccagggaagcctccccagagtcaggtcagcagggtccttaaagctcttaccagcatgaccccttggttgatggagacagactcagtggaatgggtagggacactagacatttgtgcctctttccctgcccctcatacggatttgagccaaatgtgactctcagttctgagctcacatggcccaaggcctcgatctgcctttgggatgtaccacctagaagtgtggacgcaggcatcccatggctgtacatttacattcttagaagtcagaccccagtgacttggagaggctgctgggaagtcagctggctgaaagggggtcaagatccagggcttaaaacttgctgcagacaatccaccaaacaggccactaggaatcagctctggtggctcatcctcagaggtgtgtgctcaatagcccttgccccaggagcacaggggtgcagggagagaaggaggaaagaagggccattggtcttattttgatacccctctcctcttttaggtaacaaccagatggcttcactgaaacctgcttttgtaaattacttttttttactgttgctggaagtgtcccacctgctgctcataataaatgcagatgtatagcagt

SEQ ID NO: 12028 - DNA, 3481 bp, Homo sapiens
ctgccgacgtgttcttccggtggcggagcggcggattagccttcgcggggcaaaatggtgagagcgttgaggggagttccagacggagatgcgaggacccctcggggtctgacccacaccgcgcttatctcctcagacgccggagatccagagggctagacgctcctggaacctccggcttgggctgaagggtggggaagggggaagccccttgccatgaactccttaggtttctcagctcgcgatttctaagggcgagaggcgtggggcgaattttgaataccttccagtttgtatatctctgttatcggtggtgtgttatctttatttggaaagttcttctgccgaacccgtgcccatcctacaatgccctgggcaaatgtttattggtgaagcacttccaactctcaggcacttggccagactttcctaggagcgcccacagcctctgtacagatctctggccacgttccatggacttctttgttttcggccacgcctcctagtgaccaccgtctgacgcgcatctagctctgggatgatgtctattcatctttgtattctcagtgccaaacagagggcccgtaattggaagctcaataaatggcagtgattgtctttatcattttgggggaagggggccgtgattgtttactgaattgaattccagtgtctcagaacaatgggggcagtttacttctctagagttgttatgttctggattttagaagcattggctgaccggtgacaatgaagttaacatttgtacagatctttacgtttacagccctctttcataaaagacattatctcatcatcttccctacagccttaggaaggaagcaaatacctgttgagcaaaatactccctgctaggcactagatgctttgattcatcatctttcttatttttcagttctgtgaaatagatattacagtcgctttactcagactcagattactcagaaccagaacttgaatgtcttgaccatagctcacaagattccataatagcataggtagtgaggaaaatactgaattagaaattgagggccaggcgcggtggttcactcctgtaatcccagcactttgggaggctgaggcgagcggatcaggaggtcagaagttcaagaccagcctggccagcaaggtgaaaccctgtctctcctaaaaatacaaaaaattagccgggcatggtggttcacgcctgtaatcccagctgctcgggaggctgaggcaggataatcacttgaacccagaaggcggagcttgcagtgagccgagttggcaccactgcactccaggcactccagcctgggcgatagagcaagactgtctggaaaaaaaaaaaaattgagcctgggcgcggcaactcacacctgtaatctcagtactttgggaggccgaggcaggcagatcacctgaggtcaggaattcaagaccatcctggccagcatggcaaaaccccatctctactaaaaatacaaaaattagatgtggtggtgcgcacctgtaatcctatagtcccagctactcgagaggctgaggtatgagatctctagacccgggaggcagaggttgcagtgagccgagatcgtgccactgccctccagcccgggcgacagagtgagacgccgtccaaaaaatgagactccgtcaaaaaaaaaagatattgagatctgggtaccaccagtcagtgacttatagcgggggttctcagcttggtgtctatagacactggtccacaaagctccggaaattgtaggcaaactttttcttgtatgtggtttttctcaggcagagagttcgtacctttagtcacgttttcatagtggtcagattattggcctcagaaaatgctaataagggccattgatctgcagctacatttccgggctaaaatcagcctctgtttcacggcagcaccaggctccttgataaccgcatgttctctccaggctgaaatcgtgggattctttgatagctctgatctctttccctcctctaggagctcgaggccatgagcagatataccagcccagtgaacccagctgtcttcccccatctgaccgtggtgcttttggccattggcatgttcttcaccgcctggttcttcgtgtatcctttcactgagcagccagaggaccagcattagtgatgtgggaagctcagggagaaaccacgctaggtacatggaccccgccggttttgtacattggattggggctgagagaaggtaaggaggagaggagggctagtgatgcccaggggcaggttatagccttatttcccaagttcaggtgagctcagtttgttctttggatttccaggacagtgagcaggggacctggctggagtggaggtggggaataggggtgctacagttggaaaggtggtataaggaagggtgcactcaggtgtcaggaggtctgagggctagtcccagctccggccctcatgagctgtgtgacctggggcaagtgacctaactcctctgggtctcattttcttcatggcagtggagcaccagagtccaaggcatctcttaggcccctctgcctggctgctctgagccagataggcctcccagaaggcattgagccaatgcttttctcctcagattgccgtgggctgggctctctgcactccacagtccaccccttcgctttgccttaactgctgtgcccagttacgaggtcacctctaccaagtacactcgtgatatctataaagagctcctcatctccttagtggcctcactcttcatgggctttggagtcctcttcctgctgctctgggttggcatctacgtgtgagcacccaagggtaagagctgcaatgggatggatgcgtgagcctccaaggcacagcccagggaagcctccccagagtcaggtcagcagggtccttaaagctcttaccagcatgaccccttggttgatggagacagactcagtggaatgggtagggacactagacatttgtgcctctttccctgcccctcatacggatttgagccaaatgtgactctcagttctgagctcacatggcccaaggcctcgatctgcctttgggatgtaccacctagaagtgtggacgcaggcatcccatggctgtacatttacattcttagaagtcagaccccagtgacttggagaggctgctgggaagtcagctggctgaaagggggtcaagatccagggcttaaaacttgctgcagacaatccaccaaacaggccactaggaatcagctctggtggctcatcctcagaggtgtgtgctcaatagcccttgccccaggagcacaggggtgcagggagagaaggaggaaagaagggccattggtcttattttgatacccctctcctcttttaggtaacaaccagatggcttcactgaaacctgcttttgtaaattacttttttttactgttgctggaagtgtcccacctgctgctcataataaatgcagatgtatagca

SEQ ID NO: 12029 - DNA, 3483 bp, Homo sapiens
ctgccgacgtgttcttccggtggcggagcggcggattagccttcgcggggcaaaatggtgagagcgttgaggggagttccagacggagatgcgaggacccctcggggtctgacccacaccgcgcttatctcctcagacgccggagatccagagggctagacgctcctggaacctccggcttgggctgaagggtggggaagggggaagccccttgccatgaactccttaggtttctcagctcgcgatttctaagggcgagaggcgtggggcgaattttgaataccttccagtttgtatatctctgttatcggtggtgtgttatctttatttggaaagttcttctgccgaacccgtgcccatcctacaatgccctgggcaaatgtttattggtgaagcacttccaactctcaggcacttggccagactttcctaggagcgcccacagcctctgtacagatctctggccacgttccatggacttctttgttttcggccacgcctcctagtgaccaccgtctgacgcgcatctagctctgggatgatgtctattcatctttgtattctcagtgccaaacagagggcccgtaattggaagctcaataaatggcagtgattgtctttatcattttgggggaagggggccgtgattgtttactgaattgaattccagtgtctcagaacaatgggggcagtttacttctctagagttgttatgttctggattttagaagcattggctgaccggtgacaatgaagttaacatttgtacagatctttacgtttacagccctctttcataaaagacattatctcatcatcttccctacagccttaggaaggaagcaaatacctgttgagcaaaatactccctgctaggcactagatgctttgattcatcatctttcttatttttcagttctgtgaaatagatattacagtcgctttactcagactcagattactcagaaccagaacttgaatgtcttgaccatagctcacaagattccataatagcataggtagtgaggaaaatactgaattagaaattgagggccaggcgcggtggttcactcctgtaatcccagcactttgggaggctgaggcgagcggatcaggaggtcagaagttcaagaccagcctggccagcaaggtgaaaccctgtctctcctaaaaatacaaaaaattagccgggcatggtggttcacgcctgtaatcccagctgctcgggaggctgaggcaggataatcacttgaacccagaaggcggagcttgcagtgagccgagttggcaccactgcactccaggcactccagcctgggcgatagagcaagactgtctggaaaaaaaaaaaaattgagcctgggcgcggcaactcacacctgtaatctcagtactttgggaggccgaggcaggcagatcacctgaggtcaggaattcaagaccatcctggccagcatggcaaaaccccatctctactaaaaataccaaaattagatgtggtggtgcgcacctgtaatcctatagtcccagctactcgagaggctgaggtatgagaatctctagaacccgggaggcagaggttgcagtgagccgagatcgtgccactgccctccagcccgggcgacagagtgagacgccgtccaaaaaatgagactccgtcaaaaaaaaaagatattgagatctgggtaccaccagtcagtgacttatagcgggggttctcagcttggtgtctatagacactggtccacaaagctccggaaattgtaggcaaactttttcttgtatgtggtttttctcaggcagagagttcgtacctttagtcacgttttcatagtggtcagattattggcctcagaaaatgctaataagggccattgatctgcagctacatttccgggctaaaatcagcctctgtttcacggcagcaccaggctccttgataaccgcatgttctctccaggctgaaatcgtgggattctttgatagctctgatctctttccctcctctaggagctcgaggccatgagcagatataccagcccagtgaacccagctgtcttcccccatctgaccgtggtgcttttggccattggcatgttcttcaccgcctggttcttcgtgtatcctttcactgagcagccagaggaccagcattagtgatgtgggaagctcagggagaaaccacgctaggtacatggaccccgccggttttgtacattggattggggctgagagaaggtaaggaggagaggagggctagtgatgcccaggggcaggttatagccttatttcccaagttcaggtgagctcagtttgttctttggatttccaggacagtgagcaggggacctggctggagtggaggtggggaataggggtgctacagttggaaaggtggtataaggaagggtgcactcaggtgtcaggaggtctgagggctagtcccagctccggccctcatgagctgtgtgacctggggcaagtgacctaactcctctgggtctcattttcttcatggcagtggagcaccagagtccaaggcatctcttaggcccctctgcctggctgctctgagccagataggcctcccagaaggcattgagccaatgcttttctcctcagattgccgtgggctgggctctctgcactccacagtccaccccttcgctttgccttaactgctgtgcccagttacgaggtcacctctaccaagtacactcgtgatatctataaagagctcctcatctccttagtggcctcactcttcatgggctttggagtcctcttcctgctgctctgggttggcatctacgtgtgagcacccaagggtaagagctgcaatgggatggatgcgtgagcctccaaggcacagcccagggaagcctccccagagtcaggtcagcagggtccttaaagctcttaccagcatgaccccttggttgatggagacagactcagtggaatgggtagggacactagacatttgtgcctctttccctgcccctcatacggatttgagccaaatgtgactctcagttctgagctcacatggcccaaggcctcgatctgcctttgggatgtaccacctagaagtgtggacgcaggcatcccatggctgtacatttacattcttagaagtcagaccccagtgacttggagaggctgctgggaagtcagctggctgaaagggggtcaagatccagggcttaaaacttgctgcagacaatccaccaaacaggccactaggaatcagctctggtggctcatcctcagaggtgtgtgctcaatagcccttgccccaggagcacaggggtgcagggagagaaggaggaaagaagggccattggtcttattttgatacccctctcctcttttaggtaacaaccagatggcttcactgaaacctgcttttgtaaattacttttttttactgttgctggaagtgtcccacctgctgctcataataaatgcagatgtatagca

SEQ ID NO: 12030 - DNA, 6927 bp, Homo sapiens
  SITE (2329): n equals a,t,g, or c
tcagatacaaagcagtatttatacatttatttatatatgtatatttacttcagaagaaacgaacatttcggggacaggaagcaagcaggcccggggctgcttccctcactgcccacctcagagtcagagttggcacatgacaaataccaagctcagggagaagaactgggagttaactgggaagtagggggcgctctatgcacacgcaggcttctaagggtgcacggtatgggcaggaggatttgcactgggaggccctatgtacagcttgaagctagggggagattagcgcagtgactacaggaacaaacgccaaaggagagagatgtagggtgggatgacctgctgaaccccagggcagggacagggccaagacactcacaccattgccagccgggcagtggcagcttccagcaggtggcccacttactttccgtgaagcctgtttaccacaggcttaaggcaactttggtccaaggttgaccccctcaagcagcttggatccccagcctgtccccaactcctgcactgaggaacccctccccaggcttggaaacagagccagctgctaacggttttggggctgtgctgtgtccagatgggctccatggggcagtggacggtcactttccagttaaggactgagggcccgcagtccaagaacatgaacccccattgaggaagcccaggaatcctattacatggagtggggctcggcagttttaaggcatagggaggattcccccagtgggagggagaacaaagtcatcataaggaaggctcagcccctgcatggtttgggaatcgtaaaattcctatgtcaacggaaccaaattggggagggggctgggagcaagctatccctgctattcctgcatccccgtgctcttccctatcctgaggacaagtgctttgagatcaatggcaaaagggggcctgcagttcataggcttcaaggaaaggcctccactatagaaaggcctcccattcaaagctgagaatgagtggtgggacaggggcaaggcctgcttcccaaagaggtggcagcataccacagggcaaggacagcaattccctttcccatttctggacccatggcagacatggctaaatgaatactacactccttccatgagcctggatgtagcctcggaatgcaccaggcaccactaagaaacttgaaggtggcacttaagatacaacttcttccctaacccagggtcttggtggttgggagtgggatgggtgtcggaggctccctgggagggatcagagtcagagccctgtctttgcaagtgtcacacccctgctctggcccactctgagctttctagctccatccttccattccttcctgccctggtttaagtgcatttagtaattacttcattaataacagcaaaagctatttgcatctgcccaccagccaagaccaggctgctgcttgagggattcctgctcctctgctcagagagaatgatgtggtcactgatcactgtgagctccagacgctcccaggaacgcaggcagtgaagctgcaataccatctgggggctcaaagggaatttcctcttcctggatattcctggttcaaggctctagggcttacctggcccactggcccctactggttcaggcctgtgaagggctgagggtggcttcaccaggcactgagtagacttaaggcacaaagtcagtttctccaacccaggcagggctggcctcggctgccctgggacttcttgggagccaagccctcccagggagaagaaacctcctgggccacacttaaagcttagaagtccgagtctggcgtaacaggcaaaccccagaaagtccactaccaagccatcccccagggaacagctttaagggggagagccgtctgccctccattgactcatgggggtccacccaagtctcttagggctggatccgagccccctgctgatctcaaaggtgggcaggtcctctctccaaaagggttggctccagtctcaaaaggggaggcaagggagaatgggttgtgaacaaatcagggccacaggcttccccttccttccagggcacctgaaccagccctccaaccaccatatttggaaagaggtaaactggtcctgtcctggcccctagggggtggcaggcaggaaggcccaagaagtctctggctctcaggttccttctgagccgtgaggggcgaccagctggaacagcaactccagtgtgaagacttccagtttcaccagtctcgggtagggccagtgaacagcagagctggcctgcagcgggctccagtgtaacaccattgcatccagtgttggggggtgcntgggcacccctggtccctggtgtggtgctgcctcaggagggcagctcagtcacacaggcggtagaagtggaagtggtagtctgtggctggctgggcgagagcctctgaactgcagttggcctgaccctgggtggaaggcagtgggaaggtgaggtggctctgggggtgcggggcagatggcactccctgctgacattgcttgacactgtgcccccagccctaccacatactgtgcaaaccccccattcctcaagccccacgtcgcagacaggggtgcccagacctccagggtaggtgggatgcccctgctcaccagcagtgccacccggaagtggtaggtgaattcacggaaggacaggatggttattggccaccggtgagaggtgccctggagagaagggagagaggggtcaggacagactgctgcccttatcccaaccagcatctctcaccacggccgtcgcagtcctggggtctgtggggagttttatgaaggaaaaaagcagagaactttgaagagataggaaggagcatgttctgctttggcagaaggagcaatggcagctactccatgcagaccgtgcccgggactggcaggtccacagccacctccacgtgggccctgcctccttcccagtcctgttgtggtgggttcctcacccactatgctctgggcacatcaaagtatttcattagccccatcctcagtacaatccagtgacacagtgctgctactagccccatcttctggatgaggaaactgagccacttcctaaaaatcacacagtgtggcaaaatcacacagctgggattcaaacccaggtctgtctggctgtctccctcacagggtggcatgcagcctggctgcaggcagcttgcccatctacctgaggctttggctgtgcgtctgtgatgtggtttcaggcccgagcaccatgtctgctgtgtgtctagctgggctctccctctgtcttggaccctgtctcttctgcagggcgacagggctcgggcctccctcagaagcacccccacctctgttgcaggtgctttctgcacgtcttttctccctcactatagagtacgttcttggaagtcaaaacctgtgtctactccacctctctcccctgcagctaggcccacccagcacagggcctgggacagatggggccccaatcaatattttctgagtaaacacatgaatgggcaagaaaaaataatcactacttcccttcatttgtcctgagcgtcttctcccatggcctcttaggctcaagaagaaactgggggtccatcagccccagggacagtcataacttccggttacctggccagggaggagctcaccatccagttctcccagaagaggtggccaaacatggaacctgaggggccctctgatgctgtacatctagctgtgccacttccccaacctgagcatgaggtcggctccttcctgcttctgcagacacctccagtgagccacagccctccccgccatgggctcccagacacctgcctgtttccatcattgcactcatccacattagcacctgtgatctgctgtcttccccacgtctccagcacggcagggctgggagatgctcagcagagtgcaatgaacaaacacgggcacgcgtgcccctccctgggacacagaggcccaggccccagagtgtcccttgtggagaaggctttactctataactcccagcttctgctccttgcccattttggggcccagttgtgccaggagagaagcagctcgggcctggccggcccgcagcttcccagtcccacctacctgggtgtcctggtgggtgtggagactctgtggaaggctcccctcctcacatggttcctcctttgacctcaggctgcacagcaccacagacacgggggaggaggagctgtagacaggcccagttagcagagaaatgaggttctagagtccctcaaccccagccccctcccagccagcctgccacacgcctctgaatctccacccagcctgaaacaccgcataataaccagggccctcgaacaaaacctttcccatcgaccatcccatgtggtcctcagcccatgaggccaggtcatttagccagttaaccacgaagtaggcaatgaagtcagcacttatcccaccatgcaggaaataccagagactctccggctgtcctcagactcggctgttctgaagctctgcgggagattctccctggctcctctcctgcctcccacttccccacaccggcactcactttatttgcagagtcaggctgaggtgcagtggggtgccactactgacagggatgtggtaggtgaagttcccaggcctgcaggggcaaaactggcaccttagcctgagggtaccgtgccaccccccacccccaccagggactcctcagcccccaatctgtactggagccctccagaagagacagtgtccaagggtagcctggaaaggggctacccttccttatgggggaggctcctccctgaaagggcaagttccgggtgatctgtaccacctgggctcatgtcacctgaggacctccctgggtgaggggagggagcccagcccacctgcaggcatcccctggagcacagtactgggaggtgatggacatcgaattctccagcacctggatggaggtcagggagggcactggctctgcaaggagagaggctgttggggcaggagtaaggtgacaaggcaggacacaaatgagaagctggcaagtctttccttgccagacttgaagcagtcactcacaccttagtatgaataagttccaggttatttttttccagacctccacaatggccagcatcacactacaccctttcctcagcagccctaggactacccagttcccatgagcctgacgtctgcctcctcaaaagaactggaacacccagaagtagggatgggtcttcacatcccctgccaggtgtgcaggagcccgctcgaggcctgtgttcctgactgcgggcatctctcccagttctgggttcagaaacatcagttacactggtagcttgaaatcagcagtgttgacagcatcacacaaatcaggctcccctctgccccgaggccgatgattacaccgctaccagcacgctgctcctcgcagcctccctgaacaaaccgactgcaggctggctggctgggtaggggtgggactgaagtgtgacaagtcagatgggggagacaggacttcttgctcatctagttcacatacagtcttgctgctgcctgactatccacccaggaagggggaagctggggccgctgaacatttgctggacctggtacgttttcagctctgaggcatgacccagggacccaaggaccccaacaggatccaggacaccctgtgtggtcaggacaggtatcagatacagacgagatggaaggtgcccttcccacatcccttctgggcaaattccaaaggtcctttaaagagtcagctcaaatgtcaccaactccagagaagttttccctgatcctccccaccttcgtccggattaagtgtcctccccagtcccaaagctacctgcatgtcccctcagagcctcatcacactgctgtgttttcatctctgtgaggtctttggggacaggggcgtgtccatcttcatcacccccagtcccctgtacagagccagccacagagtggcaggcagctcagtaaacaggtgcctggcaaacatctcccccatggggttcccccatcacattgaatttccatctctgtaagccacattttccaggctttctttttcttgaagccacaaaatccatcagatgaaagttggtgagagcagagctgcctggttgaagccaggaagcctcccagcctccccttcaacccccagggcagcccccagcgcagcccccagggtacctcagaggaacccagtttgaaaactacaataaaaggttctgtagctttgttaaaaccaaagatccaaggtttgggaaatagtaggggagacccagtatagcaccctcctggtgctggcatggcgaaggaggagccaggctcgggatcaaatacaagccctgcctcggaggggctgtataaccctgggcaggtcacttcaccttagtctccatcccatttcttcagctgaacaataggaacaacaattcctttcttgcaggagtgctgtgaggactaaatgggatgatctatgtaaggctgcaggcctgattcctgatccttattctgtgctcagcaaacgtctattgactgacaagtctgaacccagacagtcacatgactgggctgaggtgggccctggccagtgagccttgccaggctgggctgggtagtgtcaggggtgcagcaagtacctgactggccctgggcccaggtgggctcagcagggcccacgctggactggagggcccctcggcgggcccggccatggaaaccaaggctgggactgttcttggctttgccctgccccccagggaaggggactgcagggctggccagaggctccagactcttgtgatgcttggagtggccaatgccattgactgaaagaccccaggacttggctctgatgttggtgactggcagaagg

SEQ ID NO: 12031 - DNA, 4442 bp, Homo sapiens
acattttggttacttttagaattttattgacttttttcttcataactttaaaacaaaaacagcgcatgaaaaccagtgtcttattccaaagtctcaactcagctgattgccaggtgaacatcaccatcttactcctctgaataactagacacaaattacatagcaagttcgagtttctgcccacccaagacacagccagtaatcagtcacaaacacagacacagccaactccaggggctccagctttctgcccatcttctctcagcagttcctcccatctgctaagatgcgccttcctggtggctctctctcaaggtgggtcaaggctgaacaagacagaaaagcacagtctaggtccaccatcacctcccactggccaccagttggccagccaggaaatcatttctgtacatcttttgtctcccccttttatctccctctctcttctccaaaacttgttgctatctatcactttcatgtaacaatggacttagtgtccattaaactgcctgagaagtggtttgagcctgacatattttcctgagctaaaaaaggaaaagtacctctgtggccttcttgccattaagatcaagtaaaaaagggactagcactactgaaaagggtcacgctagaaaagccttagaatcctctctccaccccgtgaaggtttctctagctgtagctcttaagggtacaagacggcaaatattctggggtgaaggaggtataatggggaaacacatttattttccccttttaaacttccctgctgccccagtctttgccttcttcttagtggatcccttgggttctggctccttgcgcttagctgaagagagtgagccggtcaccttgaagaaatcatccaggcggccctgggtgctgccttggcggctcttactcagcctcttgaccccactgcggattcgctcctcagagaactgcttttcaccacacatgaacttgatcagctcttcttcatttggctcgctccacttcagctccacagactctgggtccagcacctcaggttccaagaagagctggtgagcctccttgtggagccaattttctggcacagggtacttgttggggtcaagtcgccgcacgatctcctcgatgctcttgtgcttctggatgaggtccacagcccgcttgggcccaataccccggatactctcacagtagtcactgcctagcaggatgcacagatccacaaactgttcctggttcaggcccagctcctgcagaatccggctcaggtggaattcctggattggcagctttttggcttcactggcagtcaggtgtcgcattagcacagggctgccgaaggtgaggcagtccatgtcctcggtagccgcagcatagactttgccagccttcaccagggcagcacagctggcctctgcctcactgggtgcatcaagataagggatgcccatgaggctcagcagatgtttgcactcatcattgtgctgcttagtgaccttcaccagccgcttagtgaatttttccacctcctgctcggccccagcagcctgagcctgctgcagctgcttctctgcctcagcccgccgctcactgcgtttggccagctcgcctgacttgagctgtggcggcttgccatcaaagacatacacgggcttgatgccgttctccatcatgcgaatggtgcggtagaacatgcccatcaggtggctggtggtctcaccctcctcattctgcagcacatccccaccctggcgaacagcaatcaggaactgataaatgctcatagaggcatcaatggccaccttacggccaaagtagctctgatgtcattctcccggatggcactgggggccacatcagcaattagtttggccaggccttgaattcccatggcaacacagaggagggatgactaaaaaggaaaggcaagtcagagacggaggaaaggagaaaggttataactggtgttatctcaccaacttcatgccttcaactaaattccacacaacaaaaaggacaccatgtcagcactgctaaagataaaaagatgaacaaggtccccattctcaaaaaactcagtctagcaggagaatttactcaatagtaaggctcaacgagtaccagaaattgaaccacgtgcttagagaaataagatactgttgatattctaaggtagcagcattatttattacacaaaaaaaacctgcaacataggtctccatcaaggaccacagaaggccaggatgcttggcctggcttgaggagtccagggaccataatggcagacctgaaagacaggcaaatacaccagctaaacaaacagatctgatttgttttgagtctctggagaaccctgactaataaggcagccttgaaaaaggattgcaaacatatctgaatggaggtgatgtggctttctcacaagcttctctaaactctcttcatcatcgcctcagcacataagagtttctacttttattataatgttgctagagtttcaagtctttccctttgcgttttctcgccaccactcagtctgaaatgttaactccatggctcctccccaggtcctgatttaggggtctggcatgctgtagtcactgggctcaaaagagtattgcacttcagagttcagtgtttcccagatagcagtgtttcccaaatcaccctcacgatttttgctacttccaactaaaacccgtactttcattcacttagaattttttttaaaaaactaaactggaaaactcataagcaataatatttgtgttctattagttatattttaatatgtattaaatgtataactattaaaaaggatttttagggggtgcaatttaaaatcatcttgccatcctggccaacacggtgaaaccctgtctctactaaaaatacaaaaaaaaaaaaaattagctgggtgtggtggtgtgcacctgtaatcccagctactcgggaggctgaggcaggagaatcgcttgaacccaggaggcagagaatgcagtgagccgagattgtgccgctgcactccagcctagcaagagagtgagactccgtctcaaaaaaataaaaaactcatcttgtgcccactgttggtatgtgtccaatactccaagaaatattctactggggccaggcacagaggctctgggcagtaatcccagcactttgggaggccgtggtgggaggatcacatgagcccaggagttccaggctacagtgagctatgattgtgccaccacactccagcctgggcaacagagcaagaccctgtcaagaaaagaaaagaagacaaaagaaaagagaaagaagaaacgaaagactccatcaggccttttcattgttcccactctttcttcacagggttctttctagagcatcaatgactgttcaattcttccttctaattcagtccaaacacttcagcatggcatcacgatctttcatgttctggttcccaacctaaccctacattctgggatctcaacagaaagctggaataaggcccgccttttcccacttttccttagctgtgccctcctctcgccatcctctcacgcgtccttccaggtccatccctggattattaatcaattaataattaattgacaatgaattattcatttgattaatatgaataattcccctgtgaactgcagcggcaaaagctctggccttgaatctaggcgcggcatttaccatccgtgtgacattaccaagccactgaggtttattttctcgtctacagaagaagaacgattaccatgcctgtctctcagggctgctgccagggttaactgagacaacagacagaaacctctaatgtcccctctccaggcctgttcaacccttcggctcttgcctcaagccggccgcgctgctggagtgtggactgaggaccagaccatgtagcccttgatcccctcacggcgtcccacagacaggtaggcaggaaaggggcctaaacaactcaagtgtcagaaatgtttctcgtccaaggtcttaggaaaaatacaacacgaccccataaggtggaacttattaccgcttttctacaatggaggaaagagaggctcggagcttacgcgactggcccaaggctcacagggggaaaagtggcgggacctcttgactgcgaatcccgcgcactccagaccccggctccccacggcccccagcgccaagcggacccgttcgctcccggaggcgcttcccatggggtctcacctggcctttgggacacgcggcctcggcggctaaagcttggttcggggttgccccgggcaggcggtcctaagctcgctctcccttctcagcttagcggcgggtggcctgacgttcagccgccttccaaagcccgcgctcccgtcacgtgacctgctcgccacgcacagcctcttggggcgcgtagtgcaggctgcgtcccctcagacggctgctctcatggcaac

SEQ ID NO: 12032 - DNA, 4443 bp, Homo sapiens; identical to SEQ ID NO: 9178

SEQ ID NO: 12033 - DNA, 6930 bp, Homo sapiens
tcagatacaaagcagtatttatacatttatttatatatgtatatttacttcagaagaaacgaacatttcggggacaggaagcaagcaggcccggggctgcttccctcactgcccacctcagagtcagagttggcacatgacaaataccaagctcagggagaagaactgggagttaactgggaagtagggggcgctctatgcacacgcaggcttctaagggtgcacggtatgggcaggaggatttgcactgggaggccctatgtacagcttgaagctagggggagattagcccagtgactacaggaacaaacgccaaaggagagagaagaagggagggatgacctgctggaccccagggcagggacagggccaagacactcacaccattgccagccgggcagctggcagcttccagcaggtggcccacttaccttccctgaagcccttttaccacaggcttaaggcaactttggtccaaggttgaccccctcaagcagcttggatccccagcctgtccccaactcctgcactgaggaacccctccccaggcttggaaacagagccagctgctaacggttttggggctgtgctgtgtccagatgggctccatggggcagtggacggtcactttccagttaaggactgagggcccgcagtccaagaacatgaacccccattgaggaagcccaggaatcctattacatggagtggggctcggcagttttaaggcatagggaggattcccccagtgggagggagaacaaagtcatcataaggaaggctcagcccctgcatggtttgggaatcgtaaaattcctatgtcaacggaaccaaattggggagggggctgggagcaagctatccctgctattcctgcatccccctgctcttccctatcctgaggacaagtgctttgagatcaatggcaaaagggggcctgcagttcataggcttcaaggaaaggcctccactatagaaaggcctcccattcaaagctgagaatgagtggtgggacaggggcaaggcctgcttcccaaagaggtggcagcataccacagggcaaggacagcaattccctttcccatttctggacccatggcagacatggctaaatgaatactacactccttccatgagcctggatgtagcctcggaatgcaccaggcaccactaagaaacttgaaggtggcacttaagatacaacttcttccctaacccagggtcttggtggttgggagtgggatgggtgtcggaggctccctgggagggatcagagtcagagccctgtctttgcaagtgtcacacccctgctctggcccactctgagctttctagctccatccttccattccttcctgccctggtttaagtgcatttagtaattacttcattaataacagcaaaagctatttgcatctgcccaccagccaagaccaggctgctgcttgagggattcctgctcctctgctcagagagaatgatgtggtcactgatcactgtgagctccagacgctcccaggaacgcaggcagtgaagctgcaataccatctgggggctcaaagggaatttcctcttcctggatattcctggttcaaggctctagggcttacctggcccactggcccctactggttcaggcctgtgaagggctgagggtggcttcaccaggcactgagtagacttaaggcacaaagtcagtttctccaacccaggcagggctggcctcggctgccctgggacttcttgggagccaagccctcccagggagaagaaacctcctgggccacacttaaagcttagaagtccgagtctggcgtaacaggcaaaccccagaaagtccactaccaagccatcccccagggaacagctttaagggggagagccgtctgccctccattgactcatgggggtccacccaagtctcttagggctggatccgagccccctgctgatctcaaaggtgggcaggtcctctctccaaaagggttggctccagtctcaaaaggggaggcaagggagaatgggctctgaacaaatcagggccacaggcttccccttccctccagggcacctgaaccagccctccaaccaccatatctggaaagaggtaaactggtcctgtcctggcccctagggggtggcaggcaggaaggcccaagaagtctctggctctcaggttccctctgtgccgtgaggggcgaccagctggaacagcaactccagtgtgaagacttccagtttcaccagtctcgggtagggccagtgaacagcagagctggcctgcagcgggctccagtgtaacaccattgcatccagtgttggggggtgcctgggcacccctggtccctggtgtggtgctgcctcaggagggcagctcagtcacacaggcggtagaagtggaagtggtagtctgtggctggctgggcgagagcctctgaactgcagttggcctgaccctgggtggaagggcagtgggaaggtgaggtggctctgggggtgcggggcagatggcactccctgctgacattgcttgacactgtgcccccagccctaccacatactgtgcaaaccccccattcctcaagccccacgtcgcagacaggggtgcccagacctccagggtaggtgggatgcccctgctcaccagcagtgccacccggaagtggtaggtgaattcacggaaggacaggatggttattggccaccggtgagaggtgccctggagagaagggagagaggggtcaggacagactgctgcccttatcccaaccagcatctctcaccacggccgtcgcagtcctggggtctgtggggagttttatgaaggaaaaaagcagagaactttgaagagataggaaggagcatgttctgctttggcagaaggagcaatggcagctactccatgcagaccgtgcccgggactggcaggtccacagccacctccacctggcccctgcctccttcccagtcctgttgtgctgggttccctcacccactatgctctgggcacatcaaagtatttcattagccccatcctcagtacaatccagtgacacagtgctgctactagccccatcttctggatgaggaaactgagccacttcctaaaaatcacacagtgtggcaaaatcacacagctgggattcaaacccaggtctgtctggctgtctccctcacagggtggcatgcagcctggctgcaggcagcttgcccatctacctgaggctttggctgtgcgtctgtgatgtggtttcaggcccgagcaccatgtctgctgtgtgtctagctgggctctccctctgtcttggaccctgtctcttctgcagggcgacagggctcgggcctccctcagaagcacccccacctctgttgcaggtgctttctgcacgtcttttctccctcactatagagtacgttcttggaagtcaaaacctgtgtctactccacctctctcccctgcagctaggcccacccagcacagggcctgggacagatggggccccaatcaatattttctgagtaaacacatgaatgggcaagaaaaaataatcactacttcccttcatttgtcctgagcgtcttctcccatggcctcttaggctcaagaagaaactgggggtccatcagccccagggacagtcataacttccggttacctggccagggaggagctcaccatccagttctcccagaagaggtggccaaacatggaacctgaggggccctctgatgctgtacatctagctgtgccacttccccaacctgagcatgaggtcggctccttcctgcttctgcagacacctccagtgagccacagccctccccgccatgggctcccagacacctgcctgtttccatcattgcactcatccacattagcacctgtgatctgctgtcttccccacgtctccagcacggcagggctgggagatgctcagcagagtgcaatgaacaaacacgggcacgcgtgcccctccctgggacacagaggcccaggccccagagtgtcccttgtggagaaggctttactctataactcccagcttctgctccttgcccattttggggcccagttgtgccaggagagaagcagctcgggcctggccggcccgcagcttcccagtcccacctacctgggtgtcctggtgggtgtggagactctgtggaaggctcccctcctcacatggttcctcctttgacctcaggctgcacagcaccacagacacgggggaggaggagctgtagacaggcccagttagcagagaaatgaggttctagagtccctcaaccccagccccctcccagccagcctgccacacgcctctgaatctccacccagcctgaaacaccgcataataaccagggccctcgaacaaaacctttcccatcgaccatcccatgtggtcctcagcccatgaggccaggtcatttagccagttaaccacgaagtaggcaatgaagtcagcacttatcccaccatgcaggaaataccagagactctccggctgtcctcagactcggctgttctgaggctctgcgggagattctccctggctcccctcctgcctcccacttccccacaccggcactcacttcatctgcagagtcaggctgaggtgcagtggggtgccactactgacagggatgtggtaggtgaagttcccaggcctgcaggggcaaaactggcaccttagcctgagggtaccctgccaccccccacccccaccagggactcctcagcccccaatctgtactggagccctccagaagagacagtgtccaagggtagcctggaaaggggctacccttccttatgggggaggctcctccctgaaagggcaagttccgggtgatctgtaccacctgggctcatgtcacctgaggacctccctgggtgaggggagggagcccagcccacctgcaggcatcccctggagcacagtactgggaggtgatggacatcgaattctccagcacctggatggaggtcagggagggcactggctctgcaaggagagaggctgttggggcaggagtaaggtgacaaggcaggacacaaatgagaagctggcaagtctttccttgccagacttgaagcagtcactcacaccttagtatgaataagttccaggttatttttttccagacctccacaatggccagcatcacactacaccctttcctcagcagccctaggactacccagttcccatgagcctgacgtctgcctcctcaaaagaactggaacacccagaagtagggatgggtcttcacatcccctgccaggtgtgcaggagcccgctcgaggcctgtgttcctgactgcgggcatctctcccagttctgggttcagaaacatcagttacactggtagcttgaaatcagcagtgttgacagcatcacacaaatcaggctcccctctgccccgaggccgatgattacaccgctaccagcacgctgctcctcgcagcctccctgaacaaaccgactgcaggctggctggctgggtaggggtgggactgaagtgtgacaagtcagatgggggagacaggacttcttgctcatctagttcacatacagtcttgctgctgcctgactatccacccaggaagggggaagctggggccgctgaacatttgctggacctggtacgttttcagctctgaggcatgacccagggacccaaggaccccaacaggatccaggacaccctgtgtggtcaggacaggtatcagatacagacgagatggaaggtgcccttcccacatcccttctgggcaaattccaaaggtcctttaaagagtcagctcaaatgtcaccaactccagagaagttttccctgatcctccccaccttcgtccggattaagtgtcctccccagtcccaaagctacctgcatgtcccctcagagcctcatcacactgctgtgttttcatctctgtgaggtctttggggacaggggcgtgtccatcttcatcacccccagtcccctgtacagagccagccacagagtggcaggcagctcagtaaacaggtgcctggcaaacatctcccccatggggttcccccatcacattgaatttccatctctgtaagccacattttccaggctttctttttcttgaagccacaaaatccatcagatgaaagttggtgagagcagagctgcctggttgaagccaggaagcctcccagcctccccttcaacccccagggcagcccccagcgcagcccccagggtacctcagaggaacccagtttgaaaactacaataaaaggttctgtagctttgttaaaaccaaagatccaaggtttgggaaatagtaggggagacccagtatagcaccctcctggtgctggcatggcgaaggaggagccaggctcgggatcaaatacaagccctgcctcggaggggctgtataaccctgggcaggtcacttcaccttagtctccatcccatttcttcagctgaacaataggaacaacaattcctttcttgcaggagtgctgtgaggactaaatgggatgatctatgtaaggctgcaggcctgattcctgatccttattctgtgctcagcaaacgtctattgactgacaagtctgaacccagacagtcacatgactgggctgaggtgggccctggccagtgagccttgccaggctgggctgggtagtgtcaggggtgcagcaagtacctgactggccctgggcccaggtgggctcagcagggcccacgctggactggagggcccctcggcgggcccggccatggaaaccaaggctgggactgttcttggctttgccctgccccccagggaaggggactgcagggctggccagaggctccagactcttgtgatgcttggagtggccaatgccattgactgaaagaccccaggacttggctctgatgttggtgactggcagaagg

SEQ ID NO: 12034 - DNA, 6930 bp, Homo sapiens
tcagatacaaagcagtatttatacatttatttatatatgtatatttacttcagaagaaacgaacatttcggggacaggaagcaagcaggcccggggctgcttccctcactgcccacctcagagtcagagttggcacatgacaaataccaagctcagggagaagaactgggagttaactgggaagtagggggcgctctatgcacacgcaggcttctaagggtgcacggtatgggcaggaggatttgcactgggaggccctatgtacagcttgaagctagggggagattagcccagtgactacaggaacaaacgccaaaggagagagaagaagggagggatgacctgctggaccccagggcagggacagggccaagacactcacaccattgccagccgggcagctggcagcttccagcaggtggcccacttaccttccctgaagcccttttaccacaggcttaaggcaactttggtccaaggttgaccccctcaagcagcttggatccccagcctgtccccaactcctgcactgaggaacccctccccaggcttggaaacagagccagctgctaacggttttggggctgtgctgtgtccagatgggctccatggggcagtggacggtcactttccagttaaggactgagggcccgcagtccaagaacatgaacccccattgaggaagcccaggaatcctattacatggagtggggctcggcagttttaaggcatagggaggattcccccagtgggagggagaacaaagtcatcataaggaaggctcagcccctgcatggtttgggaatcgtaaaattcctatgtcaacggaaccaaattggggagggggctgggagcaagctatccctgctattcctgcatccccctgctcttccctatcctgaggacaagtgctttgagatcaatggcaaaagggggcctgcagttcataggcttcaaggaaaggcctccactatagaaaggcctcccattcaaagctgagaatgagtggtgggacaggggcaaggcctgcttcccaaagaggtggcagcataccacagggcaaggacagcaattccctttcccatttctggacccatggcagacatggctaaatgaatactacactccttccatgagcctggatgtagcctcggaatgcaccaggcaccactaagaaacttgaaggtggcacttaagatacaacttcttccctaacccagggtcttggtggttgggagtgggatgggtgtcggaggctccctgggagggatcagagtcagagccctgtctttgcaagtgtcacacccctgctctggcccactctgagctttctagctccatccttccattccttcctgccctggtttaagtgcatttagtaattacttcattaataacagcaaaagctatttgcatctgcccaccagccaagaccaggctgctgcttgagggattcctgctcctctgctcagagagaatgatgtggtcactgatcactgtgagctccagacgctcccaggaacgcaggcagtgaagctgcaataccatctgggggctcaaagggaatttcctcttcctggatattcctggttcaaggctctagggcttacctggcccactggcccctactggttcaggcctgtgaagggctgagggtggcttcaccaggcactgagtagacttaaggcacaaagtcagtttctccaacccaggcagggctggcctcggctgccctgggacttcttgggagccaagccctcccagggagaagaaacctcctgggccacacttaaagcttagaagtccgagtctggcgtaacaggcaaaccccagaaagtccactaccaagccatcccccagggaacagctttaagggggagagccgtctgccctccattgactcatgggggtccacccaagtctcttagggctggatccgagccccctgctgatctcaaaggtgggcaggtcctctctccaaaagggttggctccagtctcaaaaggggaggcaagggagaatgggctctgaacaaatcagggccacaggcttccccttccctccagggcacctgaaccagccctccaaccaccatatctggaaagaggtaaactggtcctgtcctggcccctagggggtggcaggcaggaaggcccaagaagtctctggctctcaggttccctctgtgccgtgaggggcgaccagctggaacagcaactccagtgtgaagacttccagtttcaccagtctcgggtagggccagtgaacagcagagctggcctgcagcgggctccagtgtaacaccattgcatccagtgttggggggtgcctgggcacccctggtccctggtgtggtgctgcctcaggagggcagctcagtcacacaggcggtagaagtggaagtggtagtctgtggctggctgggcgagagcctctgaactgcagttggcctgaccctgggtggaagggcagtgggaaggtgaggtggctctgggggtgcggggcagatggcactccctgctgacattgcttgacactgtgcccccagccctaccacatactgtgcaaaccccccattcctcaagccccacgtcgcagacaggggtgcccagacctccagggtaggtgggatgcccctgctcaccagcagtgccacccggaagtggtaggtgaattcacggaaggacaggatggttattggccaccggtgagaggtgccctggagagaagggagagaggggtcaggacagactgctgcccttatcccaaccagcatctctcaccacggccgtcgcagtcctggggtctgtggggagttttatgaaggaaaaaagcagagaactttgaagagataggaaggagcatgttctgctttggcagaaggagcaatggcagctactccatgcagaccgtgcccgggactggcaggtccacagccacctccacctggcccctgcctccttcccagtcctgttgtgctgggttccctcacccactatgctctgggcacatcaaagtatttcattagccccatcctcagtacaatccagtgacacagtgctgctactagccccatcttctggatgaggaaactgagccacttcctaaaaatcacacagtgtggcaaaatcacacagctgggattcaaacccaggtctgtctggctgtctccctcacagggtggcatgcagcctggctgcaggcagcttgcccatctacctgaggctttggctgtgcgtctgtgatgtggtttcaggcccgagcaccatgtctgctgtgtgtctagctgggctctccctctgtcttggacactgtctcttctgcagggcgacagggctcgggcctccctcagaagcacccccacctctgttgcaggtgctttctgcacgtcttttctccctcactatagagtacgttcttggaagtcaaaacctgtgtctactccacctctctcccctgcagctaggcccacccagcacagggcctgggacagatggggccccaatcaatattttctgagtaaacacatgaatgggcaagaaaaaataatcactacttcccttcatttgtcctgagcgtcttctcccatggcctcttaggctcaagaagaaactgggggtccatcagccccagggacagtcataacttccggttacctggccagggaggagctcaccatccagttctcccagaagaggtggccaaacatggaacctgaggggccctctgatgctgtacatctagctgtgccacttccccaacctgagcatgaggtcggctccttcctgcttctgcagacacctccagtgagccacagccctccccgccatgggctcccagacacctgcctgtttccatcattgcactcatccacattagcacctgtgatctgctgtcttccccacgtctccagcacggcagggctgggagatgctcagcagagtgcaatgaacaaacacgggcacgcgtgcccctccctgggacacagaggcccaggccccagagtgtcccttgtggagaaggctttactctataactcccagcttctgctccttgcccatttgggggcccagttgtgccaggagagaagcagctcgggcctggccggcccgcagcttcccagtcccacctacctgggtgtcctggtgggtgtggagactctgtggaaggctcccctcctcacatggttcctcctttgacctcaggctgcacagcaccacagacacgggggaggaggagctgtagacaggcccagttagcagagaaatgaggttctagagtccctcaaccccagccccctcccagccagcctgccacacgcctctgaatctccacccagcctgaaacaccgcataataaccagggccctcgaacaaaacctttcccatcgaccatcccatgtggtcctcagcccatgaggccaggtcatttagccagttaaccacgaagtaggcaatgaagtcagcacttatcccaccatgcaggaaataccagagactctccggctgtcctcagactcggctgttctgaggctctgcgggagattctccctggctcccctcctgcctcccacttccccacaccggcactcacttcatctgcagagtcaggctgaggtgcagtggggtgccactgctgacagggatgtggtaggtgaagttcccaggcctgcaggggcaaaactggcaccttagcctgagggtaccctgccaccccccacccccaccagggactcctcagcccccaatctgtactggagccctccagaagagacagtgtccaagggtagcctggaaaggggctacccttccttatgggggaggctcctccctgaaagggcaagttccgggtgatctgtaccacctgggctcatgtcacctgaggacctccctgggtgaggggagggagcccagcccacctgcaggcatcccctggagcacagtactgggaggtgatggacatcgaattctccagcacctggatggaggtcagggagggcactggctctgcaaggagagaggctgttggggcaggagtaaggtgacaaggcaggacacaaatgagaagctggcaagtctttccttgccagacttgaagcagtcactcacaccttagtatgaataagttccaggttatttttttccagacctccacaatggccagcatcacactacaccctttcctcagcagccctaggactacccagttcccatgagcctgacgtctgcctcctcaaaagaactggaacacccagaagtagggatgggtcttcacatcccctgccaggtgtgcaggagcccgctcgaggcctgtgttcctgactgcgggcatctctcccagttctgggttcagaaacatcagttacactggtagcttgaaatcagcagtgttgacagcatcacacaaatcaggctcccctctgccccgaggccgatgattacaccgctaccagcacgctgctcctcgcagcctccctgaacaaaccgactgcaggctggctggctgggtaggggtgggactgaagtgtgacaagtcagatgggggagacaggacttcttgctcatctagttcacatacagtcttgctgctgcctgactatccacccaggaagggggaagctggggccgctgaacatttgctggacctggtacgttttcagctctgaggcatgacccagggacccaaggaccccaacaggatccaggacaccctgtgtggtcaggacaggtatcagatacagacgagatggaaggtgcccttcccacatcccttctgggcaaattccaaaggtcctttaaagagtcagctcaaatgtcaccaactccagagaagttttccctgatcctccccaccttcgtccggattaagtgtcctccccagtcccaaagctacctgcatgtcccctcagagcctcatcacactgctgtgttttcatctctgtgaggtctttggggacaggggcgtgtccatcttcatcacccccagtcccctgtacagagccagccacagagtggcaggcagctcagtaaacaggtgcctggcaaacatctcccccatggggttcccccatcacattgaatttccatctctgtaagccacattttccaggctttctttttcttgaagccacaaaatccatcagatgaaagttggtgagagcagagctgcctggttgaagccaggaagcctcccagcctccccttcaacccccagggcagcccccagcgcagcccccagggtacctcagaggaacccagtttgaaaactacaataaaaggttctgtagctttgttaaaaccaaagatccaaggtttgggaaatagtaggggagacccagtatagcaccctcctggtgctggcatggcgaaggaggagccaggctcgggatcaaatacaagccctgcctcggaggggctgtataaccctgggcaggtcacttcaccttagtctccatcccatttcttcagctgaacaataggaacaacaattcctttcttgcaggagtgctgtgaggactaaatgggatgatctacgtaaggctgcaggcctgattcctgatccttattctgtgctcagcaaacgtctattgactgacaagtctgaacccagacagtcacatgactgggctgaggtgggccctggccagtgagccttgccaggctgggctgggtagtgtcaggggtgcagcaagtacctgactggccctgggcccaggtgggctcagcagggcccacgctggactggagggcccctcggcgggcccggccatggaaaccaaggctgggactgttcttggctttgccctgccccccagggaaggggactgcagggctggccagaggctccagactcttgtgatgcttggagtggccaatgccattgactgaaagaccccaggacttggctctgatgttggtgactggcagaagg

SEQ ID NO: 12035 - DNA, 4443 bp, Homo sapiens
acattttggttacttttagaattttattgacttttttcttcataactttaaaacaaaaacagcgcatgaaaaccagtgtcttattccaaagtctcaactcagctgattgccaggtgaacatcaccatcttactcctctgaataactagacacaaattacatagcaagttcgagtttctgcccacccaagacacagccagtaatcagtcacaaacacagacacagccaactccaggggctccagctttctgcccatcttctctcagcagttcctcccatctgctaagatgcgccttcctggtggctctctctcaaggtgggtcaaggctgaacaagacagaaaagcacagtctaggtccaccatcacctcccactggccaccagttggccagccaggaaatcatttctgtacatcttttgtatcccccttttatctccctctctcttctccaaaacttgttgctatctatcactttcatgtaacaatggacttagtgtccattaaactgcctgagaagtggtttgagcctgacatattttcctgagctaaaaaaggaaaagtacctctgtggccttcttgccattaagatcaagtaaaaaagggactagcactactgaaaagggtcacgctagaaaagccttagaatcctctctccaccccgtgaaggtttctctagctgtagctcttaagggtacaagacggcaaatattctggggtgaaggaggtataatggggaaacacatttattttccccttttaaacttccctgctgccccagtctttgccttcttcttagtggatcccttgggttctggctccttgcgcttagctgaagagagtgagccggtcaccttgaagaaatcatccaggcggccctgggtgctgccttggcggctcttactcagcctcttgaccccactgcggattcgctcctcagagaactgcttttcaccacacatgaacttgatcagctcttcttcatttggctcgctccacttcagctccacagactctgggtccagcacctcaggttccaagaagagctggtgagcctccttgtggagccaattttctggcacagggtacttgttggggtcaagtcgccgcacgatctcctcgatgctcttgtgcttctggatgaggtccacagcccgcttgggcccaataccccggatactctcacagtagtcactgcctagcaggatgcacagatccacaaactgttcctggttcaggcccagctcctgcagaatccggctcaggtggaattcctggattggcagctttttggcttcactggcagtcaggtgtcgcattagcacagggctgccgaaggtgaggcagtccatgtcctcggtagccgcagcatagactttgccagccttcaccagggcagcacagctggcctctgcctcactgggtgcatcaagataagggatgcccatgaggctcagcagatgtttgcactcatcattgtgctgcttagtgaccttcaccagccgcttagtgaatttttccacctcctgctcggccccagcagcctgagcctgctgcagctgcttctctgcctcagcccgccgctcactgcgtttggccagctcgcctgacttgagctgtggcggcttgccatcaaagacatacacgggcttgatgccgttctccatcatgcgaatggtgcggtagaacatgcccatcaggtggctggtggtctcaccctcctcattctgcagcacatccccaccctggcgaacagcaatcaggaactgataaatgctcatagaggcatcaatggccaccttacggccaaagtagctcttgatgtcattctcccggatggcactgggggccacatcagcaattagtttggccaggccttgaattcccatggcaacacagaggagggatgactaaaaaagaaaggcaagtcagagacggaggaaaggagaaaggttataactggtgttatctcaccaacttcatgccttcaactaaattccacacaacaaaaaggacaccatgtcagcactgctaaagataaaaagatgaacaaggtccccattctcaaaaaactcagtctagcaggagaatttactcaatagtaaggctcaacgagtaccagaaattgaaccacgtgcttagagaaataagatactgttgatattctaaggtagcagcattatttattacacaaaaaaaacctgcaacataggtctccatcaaggaccacagaaggccaggatgcttggcctggcttgaggagtccagggaccataatggcagacctgaaagacaggcaaatacaccagctaaacaaacagatctgatttgttttgagtctctggagaaccctgactaataaggcagccttgaaaaaggattgcaaacatatctgaatggaggtgatgtggctttctcacaagcttctctaaactctcttcatcatcgcctcagcacataagagtttctacttttattataatgttgctagagtttcaagtctttccctttgcgttttctcgccaccactcagtctgaaatgttaactccatggctcctccccaggtcctgatttaggggtctggcatgctgtagtcactgggctcaaaagagtattgcacttcagagttcagtgtttcccagatagcagtgtttcccaaatcaccctcacgatttttgctacttccaactaaaacccgtactttcattcacttagaattttttttaaaaaactaaactggaaaactcataagcaataatatttgtgttctattagttatattttaatatgtattaaatgtataactattaagaaggatttttagggggtgcaatttaaaatcatcttgccatcctggccaacacggtgaaaccctgtctctactaaaaatacaaaaaaaaaaaaaattagctgggtgtggtggtgtgcacctgtaatcccagctactcgggaggctgaggcaggagaatcgcttgaacccaggaggcagagaatgcagtgagccgagattgtgccgctgcactccagcctagcaagagagtgagactccgtctcaaaaaaataaaaaactcatcttgtgcccactgttggtatgtgtccaatactccaagaaatattctactggggccaggcacagaggctctgggcagtaatcccagcactttgggaggccgtggtgggaggatcacatgagcccaggagttccaggctacagtgagctatgattgtgccaccacactccagcctgggcaacagagcaagaccctgtcaagaaaagaaaagaagacaaaagaaaagagaaagaagaaacgaaagactccatcaggccttttcattgttcccactctttcttcacagggttctttctagagcatcaatgactgttcaattcttccttctaattcagtccaaacacttcagcatggcatcacgatctttcatgttctggttcccaacctaaccctacattctgggatctcaacagaaagctggaataaggcccgccttttcccacttttccttagctgtgccctcctctcgccatcctctcacgcgtccttccaggtccatccctggattattaatcaattaataattaattgacaatgaattattcatttgattaatatgaataattcccctgtgaactgcagcggcaaaagctctggccttgaatctaggcgcggcatttaccatccgtgtgacattaccaagccactgaggtttattttctcgtctacagaagaagaacgattaccatgcctgtctctcagggctgctgccagggttaactgagacaacagacagaaacctctaatgtcccctctccaggcctgttcaacccttcggctcttgcctcaagccggccgcgctgctggagtgtggactgaggaccagaccatgtagcccttgatcccctcacggcgtcccacagacaggtaggcaggaaaggggcctaaacaactcaagtgtcagaaatgtttctcgtccaaggtcttaggaaaaatacaacacgaccccataaggtggaacttattaccgcttttctacaatggaggaaagagaggctcggagcttacgcgactggcccaaggctcacagggggaaaagtggcgggacctcttgactgcgaatcccgcgcactccagaccccggctccccacggcccccagcgccaagcggaccccgtcgctcccggaggcgcttcccatggggtctcacctggcctttgggacacgcggcctcggcggctaaagcttggttcggggttgccccgggcaggcggtcctaagctcgctctcccttctcagcttagcggcgggtggcctgacgttcagccgccttccaaagcccgcgctcccgtcacgtgacctgctcgccacgcacagcctcttggggcgcgtagtgcaggctgcgtcccctcagacggctgctctcatggcaac

SEQ ID NO: 12036 - DNA, 4356 bp, Homo sapiens
ttttggttacttttagaattttattgacttttttcttcataactttaaaacaaaaacagcgcatgaaaaccagtgtcttattccaaagtctcaactcagctgatttgcaggtgaacatcaccatcttactcctctgaataactagacacaaatacatagcaagttcgagtttctgcccacccaagacacagccagtaatcagtcacaaacacagacacagccaactccaggggctccagctttctgcccatcttctctcagcagttcctcccatctgctaagatgcgccttcctggtggctctctctcaaggtgggtcaaggctgaacaagacagaaaagcacagtctaggtccaccatcacctcccactggccaccagttggccagccaggaaatcatttctgtacatcttttgtctcccccttttatctccctctctcttctccaaaacttgttgctatctatcactttcatgtaacaatggacttagtgtccattaaactgcctgagaagtggtttgagcctgacatattttcctgagctaaaaaaggaaaagtacctctgtggccttcttgccattaagatcaagtaaaaaagggactagcactactgaaaagggtcacgctagaaaagccttagaatcctctctccaccccgtgaaggtttctctagctgtagctcttaagggtacaagacggcaaatattctggggtgaaggaggtataatggggaaacacatttattttccccttttaaacttccctgctgccccagtctttgccttcttcttagtggatcccttgggttctggctccttgcgcttagctgaagagagtgagccggtcaccttgaagaaatcatccaggcggccctgggtgctgccttggcggctcttactcagcctcttgaccccactgcggattcgctcctcagagaactgcttttcaccacacatgaacttgatcagctcttcttcatttggctcgctccacttcagctccacagactctgggtccagcacctcaggttccaagaagagctggtgagcctccttgtggagccaattttctggcacagggtacttgttggggtcaagtcgccgcacgatctcctcgatgctcttgtgcttctggatgaggtccacagcccgcttgggcccaataccccggatactctcacagtagtcactgcctagcaggatgcacagatccacaaactgttcctggttcaggcccagctcctgcagaatccggctcaggtggaattcctggattggcagctttttggcttcactggcagtcaggtgtcgcattagcacagggctgccgaaggtgaggcagtccatgtcctcggtagccgcagcatagactttgccagccttcaccagggcagcacagctggcctctgcctcactgggtgcatcaagataagggatgcccatgaggctcagcagatgtttgcactcatcattgtgctgcttagtgaccttcaccagccgcttagtgaatttttccacctcctgctcggccccagcagcctgagcctgctgcagctgcttctctgcctcagcccgccgctcactgcgtttggccagctcgcctgacttgagctgtggcggcttgccatcaaagacatacacgggcttgatgccgttctccatcatgcgaatggtgcggtagaacatgcccatcaggtggctggtggtctcaccctcctcattctgcagcacatccccaccctggcgaacagcaatcaggaactgataaatgctcatagaggcatcaatggccaccttacggccaaagtagctcttgatgtcattctcccggatggcactgggggccacatcagcaattagtttggccaggccttgaattcccatggcaacacagaggagggatgactaaaaaagaaaggcaagtcagagacggaggaaaggagaaaggttataactggtgttatctcaccaacttcatgccttcaactaaattccacacaacaaaaaggacaccatgtcagcactgctaaagataaaaagatgaacaaggtccccattctcaaaaaactcagtctagcaggagaatttactcaatagtaaggctcaacgagtaccagaaattgaaccacgtgcttagagaaataagatactgttgatattctaaggtagcagcattatttattacacaaaaaaaacctgcaacataggtctccatcaaggaccacagaaggccaggatgcttggcctggcttgaggagtccagggaccataatggcagacctgaaagacaggcaaatacaccagctaaacaaacagatctgatttgttttgagtctctggagaaccctgactaataaggcagccttgaaaaaggattgcaaacatatctgaatggaggtgatgtggctttctcacaagcttctctaaactctcttcatcatcgcctcagcacataagagtttctacttttattataatgttgctagagtttcaagtctttccctttgcgttttctcgccaccactcagtctgaaatgttaactccatggctcctccccaggtcctgatttaggggtctggcatgctgtagtcactgggctcaaaagagtattgcacttcagagttcagtgtttcccagatagcagtgtttcccaaatcaccctcacgatttttgctacttccaactaaaacccgtactttcattcacttagaattttttttaaaaaactaaactggaaaactcataagcaataatatttgtgttctattagttatattttaatatgtattaaatgtataactattaaaaaggatttttagggggtgcaatttaaaatcatcttgccatcctggccaacacggtgaaaccctgtctctactaaaaatacaaaaaaaaaaaaaattagctgggtgtggtggtgtgcacctgtaatcccagctactcgggaggctgaggcaggagaatcgcttgaacccaggaggcagagaatgcagtgagccgagattgtgccgctgcactccagcctagcaagagagtgagactccgtctcaaaaaaaataacaaactcatcttgtgcccactgttggtatgtgtccaatactccaagaaatattctactggggccaggcacagaggctctgggcagtaatcccagcactttgggaggccgtggtgggaggatcacatgagcccaggagttccaggctacagtgagctatgattgtgccaccacactccagcctgggcaacagagcaagaccctgtcaagaaaagaaaagaagacaaaagaaaagagaaagaagaaacgaaagactccatcaggccttttcattgttcccactctttcttcacagggttctttctagagcatcaatgactgttcaattcttccttctaattcagtccaaacacttcagcatggcatcacgatctttcatgttctggttcccaacctaaccctacattctgggatctcaacagaaagctggaataaggcccgccttttcccacttttccttagctgtgccctcctctcgccatcctctcacgcgtccttccaggtccatccctggattattaatcaattaataattaattgacaatgaattattcatttgattaatatgaataattcccctgtgaactgcagcggcaaaagctctggccttgaatctaggcgcggcatttaccatccgtgtgacattaccaagccactgaggtttattttctcgtctacagaagaagaacgattaccatgcctgtctctcagggctgctgccagggttaactgagacaacagacagaaacctctaatgtcccctctccaggcctgttcaacccttcggctcttgcctcaagccggccgcgctgctggagtgtggactgaggaccagaccatgtagcccttgatcccctcacggcgtcccacagacaggtaggcaggaaaggggcctaaacaactcaagtgtcagaaatgtttctcgtccaaggtcttaggaaaaatacaacacgaccccataaggtggaacttattaccgcttttctacaatggaggaaagagaggctcggagcttacgcgactggcccaaggctcacagggggaaaagtggcgggacctcttgactgcgaatcccgcgcactccagaccccggctccccacggcccccagcgccaagcggaccccgtcgctcccggaggcgcttcccatggggtctcacctggcctttgggacacgcggcctcggcggctaaagcttggttcggggttgccccgggcaggcggtcctaagctcgctctcccttctcagcttagcggcgggtggcctgacgttcagccgccttccaaagcccgcgctccc

SEQ ID NO: 12037 - DNA, 1572 bp, Homo sapiens
tacaaagcagtatttatacatttatttatatatgtatatttacttcagaagaaacgaacatttcggggacaggaagcaagcaggcccggggctgcttccctcactgcccacctcagagtcagagttggcacatgacaaataccaagctcagggagaagaactgggagttaactgggaagtagggggcgctctatgcacacgcaggcttctaagggtgcacggtatgggcaggaggatttgcactgggaggccctatgtacagcttgaagctagggggagattagcccagtgactacaggaacaaacgccaaaggagagagaagaagggagggatgacctgctggaccccagggcagggacagggccaagacactcacaccattgccagccgggcagctggcagcttccagcaggtggcccacttaccttccctgaagcccttttaccacaggcttaaggcaactttggtccaaggttgaccccctcaagcagcttggatccccagcctgtccccaactcctgcactgaggaacccctccccaggcttggaaacagagccagctgctaacggttttggggctgtgctgtgtccagatgggctccatggggcagtggacggtcactttccagttaaggactgagggcccgcagtccaagaacatgaacccccattgaggaagcccaggaatcctattacatggagtggggctcggcagttttaaggcatagggaggattcccccagtgggagggagaacaaagtcatcataaggaaggctcagcccctgcatggtttgggaatcgtaaaattcctatgtcaacggaaccaaattggggagggggctgggagcaagctatccctgctattcctgcatccccctgctcttccctatcctgaggacaagtgctttgagatcaatggcaaaagggggcctgcagttcataggcttcaaggaaaggcctccactatagaaaggcctcccattcaaagctgagaatgagtggtgggacaggggcaaggcctgcttcccaaagaggtggcagcataccacagggcaaggacagcaattccctttcccatttctggacccatggcagacatggctaaatgaatactacactccttccatgagcctggatgtagcctcggaatgcaccaggcaccactaagaaacttgaaggtggcacttaagatacaacttcttccctaacccagggtcttggtggttgggagtgggatgggtgtcggaggctccctgggagggatcagagtcagagccctgtctttgcaagtgtcacacccctgctctggcccactctgagctttctagctccatccttccattccttcctgccctggtttaagtgcatttagtaattacttcattaataacagcaaaagctatttgcatctgcccaccagccaagaccaggctgctgcttgagggattcctgctcctctgctcagagagaatgatgtggtcactgatcactgtgagctccagacgctcccaggaacgcaggcagtgaagctgcaataccatctgggggctcaaagggaatttcctcttcc

SEQ ID NO: 12038 - DNA, 1572 bp, Homo sapiens; identical to SEQ ID NO: 12037

SEQ ID NO: 12039 - DNA, 4355 bp, Homo sapiens
ttttggttacttttagaattttattgacttttttcttcataactttaaaacaaaaacagcgcatgaaaaccagtgtcttattccaaagtctcaactcagctgattgccaggtgaacatcaccatcttactcctctgaataactagacacaaattacatagcaagttcgagtttctgcccacccaagacacagccagtaatcagtcacaaacacagacacagccaactccaggggctccagctttctgcccatcttctctcagcagttcctcccatctgctaagatgcgccttcctggtggctctctctcaaggtgggtcaaggctgaacaagacagaaaagcacagtctaggtccaccatcacctcccactggccaccagttggccagccaggaaatcatttctgtacatcttttgtctcccccttttatctccctctctcttctccaaaacttgttgctatctatcactttcatgtaacaatggacttagtgtccattaaactgcctgagaagtggtttgagcctgacatattttcctgagctaaaaaaggaaaagtacctctgtggccttcttgccattaagatcaagtaaaaaagggactagcactactgaaaagggtcacgctagaaaagccttagaatcctctctccaccccgtgaaggtttctctagctgtagctcttaagggtacaagacggcaaatattctggggtgaaggaggtataatggggaaacacatttattttccccttttaaacttccctgctgccccagtctttgccttcttcttagtggatcccttgggttctggctccttgcgcttagctgaagagagtgagccggtcaccttgaagaaatcatccaggcggccctgggtgctgccttggcggctcttactcagcctcttgaccccactgcggattcgctcctcagagaactgcttttcaccacacatgaacttgatcagctcttcttcatttggctcgctccacttcagctccacagactctgggtccagcacctcaggttccaagaagagctggtgagcctccttgtggagccaattttctggcacagggtacttgttggggtcaagtcgccgcacgatctcctcgatgctcttgtgcttctggatgaggtccacagcccgcttgggcccaataccccggatactctcacagtagtcactgcctagcaggatgcacagatccacaaactgttcctggttcaggcccagctcctgcagaatccggctcaggtggaattcctggattggcagctttttggcttcactggcagtcaggtgtcgcattagcacagggctgccgaaggtgaggcagtccatgtcctcggtagccgcagcatagactttgccagccttcaccagggcagcacagctggcctctgcctcactgggtgcatcaagataagggatgcccatgaggctcagcagatgtttgcactcatcattgtgctgcttagtgaccttcaccagccgcttagtgaatttttccacctcctgctcggccccagcagcctgagcctgctgcagctgcttctctgcctcagcccgccgctcactgcgtttggccagctcgcctgacttgagctgtggcggcttgccatcaaagacatacacgggcttgatgccgttctccatcatgcgaatggtgcggtagaacatgcccatcaggtggctggtggtctcaccctcctcattctgcagcacatccccaccctggcgaacagcaatcaggaactgataaatgctcatagaggcatcaatggccaccttacggccaaagtagctcttgatgtcattctcccggatggcactgggggccacatcagcaattagtttggccaggccttgaattcccatggcaacacagaggagggatgactaaaaaagaaaggcaagtcagagacggaggaaaggagaaaggttataactggtgttatctcaccaacttcatgccttcaactaaattccacacaacaaaaaggacaccatgtcagcactgctaaagataaaaagatgaacaaggtccccattctcaaaaaactcagtctagcaggagaatttactcaatagtaaggctcaacgagtaccagaaattgaaccacgtgcttagagaaataagatactgttgatattctaaggtagcagcattatttattacacaaaaaaaacctgcaacataggtctccatcaaggaccacagaaggccaggatgcttggcctggcttgaggagtccagggaccataatggcagacctgaaagacaggcaaatacaccagctaaacaaacagatctgatttgttttgagtctctggagaaccctgactaataaggcagccttgaaaaaggattgcaaacatatctgaatggaggtgatgtggctttctcacaagcttctctaaactctcttcatcatcgcctcagcacataagagtttctacttttattataatgttgctagagtttcaagtctttccctttgcgttttctcgccaccactcagtctgaaatgttaactccatggctcctccccaggtcctgatttaggggtctggcatgctgtagtcactgggctcaaaagagtattgcacttcagagttcagtgtttcccagatagcagtgtttcccaaatcaccctcacgatttttgctacttccaactaaaacccgtactttcattcacttagaattttttttaaaaaactaaactggaaaactcataagcaataatatttgtgttctattagttatattttaatatgtattaaatgtataactattaaaaaggatttttagggggtgcaatttaaaatcatcttgccatcctggccaacacggtgaaaccctgtctctactaaaaatacaaaaaaaaaaaaaattagctgggtgtggtggtgtgcacctgtaatcccagctactcgggaggctgaggcaggagaatcgcttgaacccaggaggcagagaatgcagtgagccgagattgtgccgctgcactccagcctagcaagagagtgagactccgtctcaaaaaaataaaaaactcatcttgtgcccactgttggtatgtgtccaatactccaagaaatattctactggggccaggcacagaggctctgggcagtaatcccagcactttgggaggccgtggtgggaggatcacatgagcccaggagttccaggctacagtgagctatgattgtgccaccacactccagcctgggcaacagagcaagaccctgtcaagaaaagaaaagaagacaaaagaaaagagaaagaagaaacgaaagactccatcaggccttttcattgttcccactctttcttcacagggttctttctagagcatcaatgactgttcaattcttccttctaattcagtccaaacacttcagcatggcatcacgatctttcatgttctggttcccaacctaaccctacattctgggatctcaacagaaagctggaataaggcccgccttttcccacttttccttagctgtgccctcctctcgccatcctctcacgcgtccttccaggtccatcctggattattaatcaattaataattaattgacaatgaattattcatttgattaatatgaataattcccctgtgaactgcagcggcaaaagctctggccttgaatctaggcgcggcatttaccatccgtgtgacattaccaagccactgaggtttattttctcgtctacagaagaagaacgattaccatgcctgtctctcagggctgctgccagggttaactgagacaacagacagaaacctctaatgtcccctctccaggcctgttcaacccttcggctcttgcctcaagccggccgcgctgctggagtgtggactgaggaccagaccatgtagcccttgatcccctcacggcgtcccacagacaggtaggcaggaaaggggcctaaacaactcaagtgtcagaaatgtttctcgtccaaggtcttaggaaaaatacaacacgaccccataaggtggaacttattaccgcttttctacaatggaggaaagagaggctcggagcttacgcgactggcccaaggctcacagggggaaaagtggcgggacctcttgactgcgaatcccgcgcactccagaccccggctccccacggcccccagcgccaagcggaccccgtcgctcccggaggcgcttcccatggggtctcacctggcctttgggacacgcggcctcggcggctaaagcttggttcggggttgccccgggcaggcggtcctaagctcgctctcccttctcagcttagcggcgggtggcctgacgttcagccgccttccaaagcccgcgctccc

SEQ ID NO: 12040 - DNA, 30620 bp, Homo sapiens
acagtctccactgaaaggctaaatgggaggatcttcccccgtgacctcaaaaggtattttaaagctaatgaatgcctgtgttcattgaatgttctttcattaataaagccattaatgggtgtttttgtttggttgttctgtccatttagaaagctgacttgcctctaaacccttgttttttcttccactccccactccatgtcatttctccacctcagctattgtggatgctgatggaagaatttatattcggaactggcagggtggcatcctgtctgggggctttgagaagaacccgaaaccaattttcactgagggcaagaaccagctggagattcagaatctacaggaagactgggatcactttggtatgtgaactgcattataaccgtagtgccttatatttgtttaagatgttatatttttcaaagtattttgaagaatagttccttgtttaatgtttataacatcgccatgaggtacaacagtggttacagagggtgagtttgcctggtctgaggatggagttactaggtagcagattcaggggactaaaatcttagttaatagacatttgccttattcttttttaattttattcttagttttacttttttttttttatttcttgagacggagccttgctccgtgctcagactggagtgcagttgcacaattatagctcactgcagccccgaactcctggtctcatagctttttttttttcttctttttggtagagacatggtctcgccatgttgcccaggttgatctcgaactccaaggctcaagtgatccctttcaccttggcctcccaaagtgctaagattacagatgtgagccactgtacctagccctttgtgtgtgtttagtcatctctatcattttgtgtgtgtgtgagatggcgtcttgccctgtcacctaggctggagtgcagtggcatgatcatagctcactgtagcctcaaattcgtgagctcaagcaatcctgccacatcagcctcccaagtagctgggattacaggtgcttgccaccatgcctagctaatgtttaaattttttgttgagatggggtctcgctgtgttgcccaggctggtctcgaactcttgggctcagtcaatcctgcctcagcttcccaaagtgctgtgattacgggcatgagccatgatacccagctgctttttttttttttttttttttgagatgaagtctcgctctgttgcccaggctggagtgcagtggtgtgatctcggctcactgcaacctctgcctccccggttcaagtgattctcctgcctcagcctccagagtaggtggtaggtgggattacaagcgcctgccaccactcccgactaatttttgtgtttttagtagagacagggtttcaccatgttgatcaggctggtcttgaactcctgacctcaggtgatccgcctgcctcagcctcccaaagtgctgggattacaggcatgagccactgcgtctggcctttttttttttttgagataagagtcttgctctgtcgcccagactggagtgcagtggcacaatctcggctcactccaacctccacctcctaggttcaagtgattctcatgcctcagcctcctgagtagctgggattacaggcatgcatcaacatgtccagctagtttatgtatttttagtagagacaggattttaccacgttggccaggctggtcttgaaatcctggcctcaagtgatctgcctgccttggtctcccaaagtgctgggagtaaaggtgtgagccactgtgcccagctctgcttcttttttttgtttttttgtttttttttgagatggagtttcactcttgttgcccaggctcaagtgcaatggtgcgatctcggctcaccgcaacgtctgcctcccgggttcaagtgattctcctgcctcagcctcctgagtagctgggattacagacatgcgccaccacgcctggctaattttgtatttttagtagagacagggtttctccatgttggtcaggctggtttcgaactcctgacctcaggagatctgcccgccttggcctcccaaagtgctgggattacagacgtgagccaccatgcccggcccctgcttattctttattcacctaaaattattgctcagattttaggttttaggaggagacttctttcagtaggacttcatataaaattgaagagttctttagaaaacagaattgttttgttttgttttgtttttcagaattgttttgttagtgtagtattttattaaattttaaaataattttatttatttatgtatccattcattcattttgagatggagtcttgctctgttgcccaggctggagtgcagtggtgcgatcttagctcactgcatcctccgcctcctggattcaagcaattctcctgcctcagcctcccaggtagctggaattacaggcgcccaccacaacgcagagccagtttttgtgtttttagtagagatggggtttcactatttggccaggctggtcttgaactcctgacctcaagcgatccacccgcctcggcctcccaaagtgctgggattaccggtatgagccaccgcacctggcctttaaggcctgtaatcccagcactttgggaggccaaggcgggcagatcgcctgaggtcaggagttcaagaccagcctggccaacatggcaaaaacccgtctaaatataaaaattagctggatgtggtggcgcacacctgtaacgccagctacgtgggaggctgaggcaggagaattgctggaacccgggaggcagaggctgcagtgggctgagatcgcaccactgcactccagcctgggtgacagagcgagactccatctcaaaaaaaaaaaaaataataataataatatagttacctagttccaaatttaaaaagatgaaagagtctctaatgaagaatttccctctgacccttgatgggctttctttttttaataaattcttacggaaaatttcaaacttttaaaagtggatagaagctgggcacagtggcttacacctgtaattccatcattttgggaggccaagatgggaggatcactggagcccaggaagtgaagaccagcctgggcaacatggcgagactggagactatgtgtctactaaacaaacctggcgagagtagtatgatgagcccccatgtacccattatccagctctggtctggtttcatctttttctgctgtccactggattatgtcctgatggtagatttcctttaaagcagggtgaaagtctgtcttttgcagctattccaatgcagaacattgcctttttttttttttttcctgagatggagtttcactctattgcccaggctggagtgcagtgtcacgatctctgctcacttcaacctccgcctctcagattcaagcgatttttctgcctcagcctcccgagtagctggggttacaggcttccaccatcacgactggctaatttttgtatttttagtagagacgaggcttcgccattttggccataatgctcttgaactcctgacctcaggtgatccgcccaccttggcctcccaaagtgccggggttacaaatgcaagccaccatgcccagctcagaacatcaccttttattaaaatctctgtggccgccatttaagagcttttccactcacactggtcccttcaagattattatctgtagatacgttttacttgctgttctctgctgctttcctttctaaccaatatcttttttcctcagtctttataccaagtattttgcagctatatcctgtaattctaccaaggtttctgctttgtgataaatggcccagttggctcgtctttaaaaaaatctcttccagccggacgcagtggttcacacctataatcctagcactttgggaggccgaggcaggcagatcacttgaggtcaagagttcgaaactagtgtggccatcatggtgaaaccccatctctactaaaaatacaaaaaattagctgggcatggtggtgcacgcctgtaatccgagctaattggcaggctgaggtgagagagtagcttgaacctgggaggcagaggttgcagtgagccgagatcgtgccaccacactccagccggggcgacagagtgagactccatctcaaaaaaaaaaaaaaaaaaaatcaagaggttttctgaaaggggagagtgtaaaaaagtagaggggttgaaagtggtttaattccttaaaggtgagaactctatttggttttgttgtcattgctcagagcctctgttgagttcccttctgaggaggatgccagaattagagactctggagatcatgaagttggtgaactgcccagagaccttcacaccagacatgaggtgcatcatgggcgagtctcctgcagtgcagggctactttgtcctggcaggaatgaactctgctggcctttcatttggtggaggagccggaaagtaagtctttctcactcaaagtcagctgtgaacataagtcaacttgctgggtctcttcccttctagaattacttgttattaacatggcgtgtggtatatttaatctagtatgttaagactaataagaagatacatgtaattttggagttgtccccttctaagtatgagaggctccccatgttccagaaatgtcatcgggcaaaatgtttttgcaactcatcttttggagttagccacagatcctgtgggatattcttttatattttttcagttataacaaatattggtcatttgagtgtgtatttgagtttggtagccaagtatgttgattgaggtaggtatttgaactaggtaatacacggtttgtttgtttttttagacagtcttgctctgtcacccaggctggaatgcagtgacatgatctcaggtcactgcaacctccacctcctgggttcaggctattctcctacctcagcctcccgagtagctgggattagaggtgtgtgccaagacatctggctaatttttctatttttagtagagacagggtttcaccatgttagccaggctggtcttgaactcctgacttcaagtgatccacccaccttggcctcccaaagtgctaggattacaggatgagccactgtgcccggccacaagtttttatttaaaaattagacactaggccgggcgcagtggctcacgcttgtaatcccagcactttgggaggccgaggtgggcggatcacaaggtcatgagatcgagaccactctggctaacacagtgaaaccccatctctactaaaaatacacaaacaaaattagccgggcgttgtggcgggtgcttgtggtcccagctactcgggaggctgagacaggagaatggcgtgaacccaggaggcagagcttgcagtgagccgagattgcgccactgcactccagcctgggcaacagagcgagactctatctcaataaaaataataataataaaataaaataagacactaatgaacattaaataagccagtcacaaaaggacaaataccgtgtggttccacttatatgaagttgctagagttgtcacatcatagagacagaaagtacaatggtggttgccagaggcgggggaggggagctattcttgaatgagcacagagttccagaaatgcaagaggaaaagagttctaggatggatggtggtgaaggttacaccgcagtgtgaatgtacccactgccactgaactgaatacttacaaatgggtaagatggtagccacgatgaaaagtttattttaaatttatgagaccagttctcttgagtgatttgtagaatggctctgaaaacagttacagaagaggagttagaaaaatgtttggagcaaaggagatgtggtcacgtaactgtataatctttaggtgacagaaaaaaacccattggatatttagagtatatttgtatgtgttttagtcttatttcttcatagatgaggcttataacttttttgaaacaagatcttactctcacccaggctggagtgcagtggcaccatcatagctcactgcagccgcaagttcctgggctcaagggatcatcccgcatcagactccagaagagctagaactaactgcaggcgtgtgccaccatacccagctcttttttttttttttttttttgaaacgaagttttgctcttgttgcccaggctggagtgcaatggcacaatctcggctcaccacaacctctgcctcccgggttcaggtgattctcctgcctcagcctcccgagtagctgggattacaggcatgtgccaccacgccggctaattttttttttttttttttttttttttttgagttggggtttcgctcttgttgcccaggctggagtgcaatggcgtgatctaggcttactgcaacctctgcctcccaggttcaagcaattctccttcctcagcctccgtagtagctgggattacaggcgtgtgccaccacactggctaattttgtatttttaatagagacagggtttctccacattggtcaggcttgtttcgaactcctgacctcaagtgatccgtctgcctcggcctcccaaagtgctgggattacaggtgtgagccacctggctcactttgaaacttttttttttctgtagagacggggtcttactatgttgcccaggctggtctcaaactcctgacttcaagcaatctcctgcctcagcctcccaaagttctgggattacaggcatcagccaatgtgtctggctggcttctatgttaaatacctcctagggaatcttatcatctggggtaaaatcctcatagtagtcttttgagagcagtacacagacccatgttcgtttcttccagaaaagttaaggaaagtgcccaaaactattcagctggtctatggcaatttaggatcttttgattctgtttgttctcgatttgtagaatattaattttctcaaatctcacacctgagccccaacacgtgccctctgtctatataggtaccttgccgaatggatggtacatggttatccctcagaaaacgtttgggaattggacctgaaacgttttggagccctccagagcagccgcacctttctgcgccaccgggtcatggaagtcatgcgtaagtgaagctttatcgcagttgctcctagttgcaggtatcttctcggtggcccgtgttgtcattcagaaggagcaaagttttcctcagttctttaacaagtgctttgagttgggcatttgatttgactgtttcaggcctgagttaaggggctttatgctcctcatgatatatacgtaacattttctttagtgcatcggaccttgtttcattctgagaacaagaaaatagaataggagttacagttggtacatagcagcttcataaatattctaagcaatgccttcttcccggtctgccttgagagaccgtatgtcgaagtgcgtgctttctgcagtctgccttgagagaccctgtgtcgaagtgaatgctttctcactcccacttagtttttgagaaaatgctttctcactccccacttagttttttctttccaagtcagagaatttgccgagttattctcagagcttcaggcttccgtgagtgactttcaccattaatccaccctacagcagcaagattgggagccacttcccatataaatacaaaacatacattcctgctctcactcccgtgttctcgccctgcttcaactttgaaggattggccacttcatcttaatttgttattctaccttgatctctgatttattttctaggaagcccttagaaagcttttgtatcaggaattgaaccaaaccacgtgggttcaagttgtaatttcattttcctgtactgaggagctgttctcagactttgccaaatggtatctaaatattttgggcatacttatgctcaggactaagtttctgtgttggctctgaccaccattcttggttgcaagtaaactgttagtttggtagttgaacaacattgttggtgaggactctggatggcctttaatgcctgagtgctcacttttggcctgggaagaggatgtacatccatggagatgaaggacctaacagcaatatgtttaactgctaaggttctttaattttagcaaatattttggttaaaatgttgaacttggctgggtgtggtggctcatgcctgtaatcccagcactttgggacgttgagggaggtaggtcacttgaggtcaggagtttgagaccagcctaggcaacgtagcgaaaccctgtctctactaaaaccaaaaccaaaaaattagccatgcctagtggcacacacctgaagtcccagctacttgggaggctgaggtaggcgaatcacctgagctggggaagttgaggctgcagtgagccatgatggtgccactgtgtactccagcctgggcagtgggactgagaccctgtctcaaaaaaataaaatacaaaatcaaagttttttgttttaaagttgaactattataagcctaaatttccctacccatagttactttggaacctgtacaaatcataattgagcttgagcttctgcttggtgatatgacacttttggtagccaattctcatgaaatagaagtggcaggcacatagaaaatggggaaggcgccaggcgcagtggctcaagcctgtaatcccagcatgttgggaggctgaggcaggcggatcacttgaggtcaggaggtctggcctgaccaacatggcgaaaccctgtctctactaaaaatacaaaaatttagccagatgtggtggtacgtgcctgtgatcccagctacttggcaggctgaggcaggacaatcacttgaacccgggagatggaggttgcagtgagccaagatctcaccactgcactctagcctgggtgatagagagggattccatctcaacaaaaaataaaaaaaaaatagaaaagaaaatgggggaggggatgatagaaccgaaagtactaggagatggagagattgtcaccatgcagagaaccccacctggcttccttctcctgtctcccaacctccccaagccttgatgtgccttttgtttgggatggtgtgagatcagggaccacagatcacactcttctggctttttttacttattgctgttgaagattagaccttaagggaaatgaattttttttttttccgagacagtcttgctctattgcccaggctggagtgccgtggcgtgatttcggctcactgcaacctctgcctcctgggttcaaacaattctcctgcctcagcctcccgagtagctgggattacaggcgcctgccaccatgcctggctaatttatgtatttttagtagagacagggtttcaccacattggtcaggctgatcttgaactcctgacctcgtgatccgcccacctcgacctctcagtgctgggtttacagacgtgagccaccacacccggcctaagagaaatgaattctgaccctagctttgttgtgtgaataatgtcattggtacaatacaatataacttctcagatttcagagccacctaatcaagctgcaatatgtaccctttcacttcagaagtgagttaattatcagggaggaaatgtctgtaacaggtctgagatcctaacacaggcacaatgaagaatcgaatgccattttttcacattttgttaccacctgtgtcccacttagtaaccttcttctctgctatgaagcttggtaaggtttaggaccctgacctttctgccatcatttctacctactaatgtggaatgctgaatgtgaatacaggccgagtcatgccgtgacacgtagctccagggagggacgatagcagcttggcaggattgtcttttccttctggagcatgcctgatacactgggtaattttgaaaattagactacattagcctggaaattgggccgggcagagtggctcacgcctgtaatcccagcacttcgggaggctggggcgggcagatcacctgaggtcaggagtttgagaccagcctgaccaacatggagaaaccctgtctctactaaaaatacaaaaattagtgtggcacggtgacacgtgcctgtaatcccagctactcgggaggctgaggcaggagaatcgcttaaacccaggaggcagaggttgcagtaagccgagattgtgccactgcactccagcctggacaacaagagcaaaactccgtcttaaaaaaaaaaaaaaactacgttagcctggaaagctcttttgaatagaaacaactccagagtctagtggacatgggctactcaggtctagaatctgtgtcttgggctttgatagactactcgtgtcttttctagctttgatgtatgatctgaaggttccccgctgggacttccagaccggtaggcagttacgcacctctcctctctacgaccggctggatgcacagggagccaggtggatggagaaacatggatttgagaggccaaagtactttgttccccccgacaagggtaagaagtcacattctcatttttgcttcttttttttttttttgtcctgggaattaataaaacatattttcaaatgcataggctagaatgtgttcacagaagaaaaagaaccacgtggactacactaaactctacagggccttgtgatttttccattccgtagacctcctggcattggagcagagcaagactttctataagccagattggtttgacatcgtggagtctgaagtcaagtgctgtaaggaagctgtgtgtgtcattgacatgtcctctttcacaaagtttgagataacagtaagtatttgggaaccaaaaagtaatagattaggaaactttacatatttattgaatgccttttgtttttcatcttcaaaactgattcctgactgggtgcagtgggtcatgcctgtattcccagcactttgggaggccaagggggcgtggatcacctgaggtcagagttccagaccagcctggccaagatggtgaaaccccgtttctactaaaaatacaaaaattaaggccaggagtggtggctcatgcctgtaatcccagcagtttgggaggccgagacgggtggatcacctgagatcaggagttcaagaccagcctggccaacatggcgaaaccgtctctaccaaaaatacaaaaaattaaccaggcatggtggcgggcacttgtaatcccagctactcgggaggcaggagaatcgcgtgaactcatgaggtggaggttgcagtgagctgagattgcgccactgcactcagcctgggcaacagagtgagactccatctcaaaaaaaaaaacaaaaaacaaaaacaaaacactgatttcttaagaattctggtatattttagtgtttcatctgtattgtaacatttttctgaaattttagctccttgtttcaggtttttaatttgctagagaggcctgtttatcataagaatcaatagctagcgttccctggagcttcttgcagtggagtaggtctgcaaatgttgtcacatgggaattggctgattgaattttctcaatgaggttcattgctggtggggccatgtggcccagccaggtgctctcacgctcactctctctgtttcattccctaaccctgcagtccactggggatcaggcattagaagttctacagtacctcttctccaatgacctggatgtgcctgtgggccacattgtgcatactggcatgctcaacgagggtggagggtatgaaaatgactgcagcatagcacgactgaacaagcgcaggtgagatgagctgccgtcccgctctgctccctccaacatgttgattccttaggggtgctgtagcagaggctctcaggcgcttctccgggaaccataaatcccagagtctaagaatcattacatgaaatcaaagccagtttattagcagtcctaaacaaaagaaatcaccaggaggaaaagaaaaaaaagcccaccagattatgtaccctactgggagaagatgccttgtcttttttcttttttttttttttgagacagggtctcactttgttacccaggctggagtgcagtgatgcgatcatggatccctgcagcctggacctcctgggctcaagtgatcctcccacctcagctttccaggtagctgggaccacaggtacacgccaccacacccagccagtttttgtatattttgtagagatagggttttgccacattgcccaggctgatcttgaacacctgagctcaagcaatctgcccaccttggcctccaaagtgctgggattacaggtgtgagccactgtgcccagccgatgtcttaacgttagtaaatctgtataatttcttggcattaacaggaagccagaattttgttttgttgttaggtggtgtatcctagaatggtgctactggccttctgtgaaagctaagaaatcatttcctagtatttgcctcattgctttgaaaccaaataagatttgattgcttcctgatccttttgctgctacctggttttgattattttggggtctcacttttcagtttcttcatgatctctccaaccgaccagcaggtccactgttgggcctggcttaagaaacacatgccgaaagacagcaacctgctcctggaggacgtcacctggaagtacacaggtacgggggttcgggctctgccacgtcgaaaaggccagcagatgcagatgtgtccacgtttgccttctttacatttgactctcaaaaatgaacattagagttagcataaaagaggctctctggtcatagaaaattgatctctaggggatgcggtggctgacacctgtaatcccagcacttttggaggccgaggttggaggatcactaggtcaggagttcgagaccaacctggactatatggtgaaaccccgtctctactagaaatacaaaaattagctgggcgtggtggcacacacctgtaatcccagctacttgggaggctgaggcaggagaatcacttgaacccaggaggcagaggttgcagtgagccccagattgcaccactgcactccagcctaggcgagtgagactccatctcaaaaaaaaaaagaaaattgagggctggacacagtggcttacacctgtaatcccagcactttgggaggctgaggcgggcggatcatgaggtcaggaatttgagaccagcctggccaacatggtgaaaccccatctctactaaaaatacaaaaattagctggacatggtggtgcatgcctgtagtcccagctactcatgaggctgaagcaggagaatcgcttgaatctgggaggcagaggttgcagtgagccaagatcatgccattgcacctccacctcccgggttcaagcgattcttctgcctcagcctcccaagtagctgggattataggcgcccgccaccacgccgggctaatttctgtatttttagtagagatggggtttcaccatgttggccaggctggtcttgaactcttgacctcgtgatccacctgcttcggcctcccaaagtgctgggattacaggcatgagccaccacgcccagtcccagagagtacctaatttttaaggatgacttggttccctgattttctcactctcagcagtctcggcttaacccctcccaccttcccacctaactgatcttgccccttggccccaccagcgtttgctctcccaggctctcattctcaattccttgtagtagcaaatatgatatacgtcctgctcctggattgggatactacagaatgttactgaacaaaagtcatgttctagcctgtcttaggatggatgacatgtaattagcacaagctgatgtcacaaacactggtgtccagaataatgctttccttatctagtaagcattaggatatgtttgaagtggatttagcttctctgaatttaaagtctgtatactttttggttgggcagatctccaccgggtactgatttggggttggggcttcttccatcacatagccttgctgggaaaaggaggagaacgggaattgtgtggggtggttatggccagccctgctgcgttcagcaggccctgttggcagaggtgtattcgccagaatcggggtgcttagcatccatccttggagtgtctaagcaaagggacatattcctggtctctgcacccaggcctggctatagctgagcaagtctacagtagacctttcccattggctcagctgttcagaaggagagctggacatctcttgttcttttccatttagccctcaatctgattggccctcgagctgtggatgtgctgtctgagttgtcctatgcccctatgactccagaccacttcccaagcctcttttgcaaggtaagtgctgataaagttctgtttcttaaatgggcagagaatgtgtctttcatagcggtggcaggtacatattcttactatggtgttagcacccacaaagagtgtcttggctgggtgaggtggcacatgcctgtaatcctagcactttgggaggccgaggcaggtggatcacccaaagtcaggagtttgagaccagcctggccaacatggtgagaccctgtctctgttaaaaatacaaaaattagctgggtatggtctcacgcacctataatcccagctacttgggaggctgaggcacaggaatcgcttgaactctggaggcagaggtcgcagtgagccgagaacacgccactgcactccacctgggtgacagagtgagactctgtctcaaataaaagagtgtgctggccaggtgcagtggctcacgcctataatcccagcactttgggattacatcttatatttataaataaatataaaaatacaaaaattagccgggtgtggtggcgcatgcctgtggtcccagctactcgggaggctgaggcaggagaatgacttgaacctgggaggcagatgttgcagtgagccgagattgcgccattgcactccaggctggcaacagagcaagactgtctcaaaaaaaaaaaaaaaaatgtgctgcccttcattagcaaagaagtgactaagtatatttatttatttatttatttatttatttattttgagacagagtttcactcttgttgcacaggctggcgtgcaatggtgcgatctcggctcactgcaacctccacttcccgggttcaggcgattctcctgtttcagcctcccgagtagctgggattacaagcgcccgccaccatgcccagctaactttttgtatttttagtagagacagggtttcaccatgtttgccaggctggtcttgaactcctgacctcaggtgaaccacccacctcagcctcccaaagtgctgggattacaggtgtgagccactgcgcccggccttatttgtttattttttacactccaagcttgctttatttaataagcattaggatatctttgaagtggatttagcttctctaaatgtaaagtctttatgctttttggtttctgtagcactggattaaaatttgaagttacaggattatgacacacacaaaaatgcctttcgaagttaggtcccttctctccatgcagtgtggcctcttttctgtacacagagtaacttctgtgtctgtggcatcttcagggaagaaatggcgtaggtgaatctctgaacttcctacataattttctttcctataagtggcaaccacagctgagtgaaacaaactgtaaccgaatgaaagcaatgacaacggaatcctccccaggaagctgctgattagagagggccaaacggacagacatcttggccacctgtaacgagcaacttccaggtggttactgatggagactctttgaagttcacccaaagtgggatccacctacaaattgtttcacagttttccttcttctccgaggcaaagtgaaagcaacagaaaactctccactgttagctatcagtggacccctcccagcgtttgctctgctgcttggaggagtgacccatacgctcaacacctggcgagtgctgcatcctgtcagcctcctgtggaagcggttcacttcggtgctgtccaggactttccactttcctttataggaacggtgattgcgtcagtggccgctgttagggaactgagctgctatgtaacgtgttctgagaatcagaagcccatctttgaccccaggatagcagattaattatgtctgtgggcatcgggcatcatcttttgtatggcaggcggccagggtttgtctgctgattcccccagagaagacactcgccttgtcctcattgtgcctgctaccctcgactaacacaaggacctggcaaagaggaatattttgtgcttgtcaaggactttcctccactctctaccatcagcttggctaaaactcctgagatggtaacagtagcaagcagagatgtcacataggcagtgctccattctctgtgcctcaggacctggaagttaaccactttcgggatgaaattcttgccttgacgtctgtctccctcaacagtaaacagagggtgcagcactaatgaaaggtttccccaggcgtccctcccttgacaagtaatgtgagtgcccaggctgactgctgcctttgtccctgcaggagatgagtgtgggctatgcaaatgggatccgggtgatgagcatgacgcacacaggagagccaggattcatgctctacatccccatagaggtgagagggcacccttcccttcccttcccttcacttcccttcccttcccttcccttcccttcccacaaccactgtggggtgccagtgctcccagcagcgcgttcaccagcactggcaggtttggagagctgtatctgattgggccttgggagctgaggtaggctgcattgaagagatttgaccatttttaactaagttatataagtttttttgaataggtgatacatttaaaaagtatttggcgccgtctgatctgttctcaccaactgtcaccaataatattagtattacttttatatgtcatttcagatttgtatgcatattgcaagcaaattcataattaatttttttttttttttgagacagggtctcactcttttgcccagggtggagtgcaatggcatgaccgtggctcactgcagcctcgacctcttgggctcaagccaccctcccacctccgcctcccgagtagctgggactgtaggcatgtgccaccatgcctggctaatttttgtatttttttgtagagacaggttttgccatgtcgctcaagctggtctcaaactcctgacctcaggtgatacacccaccttgtcctcccaaagtgctgggattataggtgtgagccaccatacccagccaagccccctttttaaaaacagaaatggaagcatactgctattcttcatcctgtttttttttttttcacttcacaattttttttttaattgaggcagagtctcactctgtcacctagggtggaatgtagtggcataatctcagttcactgcaaccttcgcctcccaggttcaagtgattgtcctgcttcagcctcccgagtagctgggattacaggtgcacgccaccacgcctggctaatttttgtatttttagtacagacggggcttcaccatgttgcccaggcttgtttccaactcctgacctcaagtggtccacacacctcagcctcccaaagtgctgggattacaggcatgagctaccatgcccggcctcacttcacaatttctcttagagctctttctttgttggtacctaaagcaaaagagcttccttgttctttttttctttattttttaacagtggcgtagcattccattgtggtacatcattccgatactaatagacatttatgttatttctagtcttttgctgttataaaaaggtctgcaggctgagttcagtctaatcatatgcaaatagtaatagtttcttccttctccagaaccttttttttgagacggagtctcactctgtcgcccaggctggagtgcagtggcgcaatctcggctcactgcaagctccgcctcccgggttcacgccattctcctgcctcagcctcctgagtagctgggactacaggcgcctgccaccacgcccggctaattttttgtatttttcatagagacggggtttcaccgggttaaccagaatggtctcgatctcctacctcgtgatctgccagccttggcctcccaaagtgctgggattagaagcgtgagccaccgcacccggccggcttttttttttttttttcttttttttttttgagatgaagtctcacacttgtcccccaggctggagtgcgatgacatgatctaggctcaccgcaacctctgcctcccgggttcaagtgattctcctgcctcagcctcccgagtagctgggattacaggcgcctgccaccacacccgactaatttttgtatttttagtagagacaggatttcaccatgttggccagcttggtctcgaactcctgaccttaggtgatccacccacctcggcctcccaaagtgctggaattacaggcgtgagccaccgcacccgggcccatagtctttcttcctataatttccttcctttgttctattgtgacaggtagcaatcaatgattgtaggcatgcttgttttcttcttgatgttagtcatactacttgtagtgataggttttctcttaattttttttttttttgtgagacagggcattgctctgtcacccaggctggcttactgcagcttgacctccgaggctgaagtgatccccctgcctcagcctcctgaatagctgggactacaagcatgtgccaacatccccagctaattttttaattttatttttgtagaggcagggtcttgctatgttgcctaggctggtctcagactcctggactctagtgatcctctcacgtcagcctcccaaagtattgggattacatgtgtgagccactaccccgaccttatttattactattttttagtgcagtgggatgatcatagctcactgtagccttgaacttctgggcttaagcagtcatcccacttcagcttcctgagtagataggaccacagatgcccagctatcttttatttttttgtttttagacggagcctcccactgtcgcccaggctggagtgtagtggcatgatctcggctcactgcaagccccacctcctgggttcaagcgattctcctgcctcagcctcctgagtagctgggactacaggcacacgccaccacactcggctaattttttgtatttttcatagagacagggtttcaccgtgttggccaggatggtctcaatcgcctgacctcgtgagccgcctgcctcagcctcccaaagtgctgggattacaggcatgagccaccgcacccggcctatttttttattttttgtagctttgagagtctcaatatgttgcccaggctggactctaactccagcctcaaatgatcctctcatctcagcctcccaaagtgttgggattaccggcgtgagccactgtgtctggccctgttttaactatttgagccactgtgcccaaccctttttaaatgattaaagcacagataatatcagcgcatgaaatttcatctgcttttccacactcagaagtattacaacaatatgaagatgaagagattgttcaagacttgggaagaatttaaacagatgcagctgccatggttggcctgtgcaggcaggttgattctgaagtgccacccagtggttcaggtgttgtcacctgggtgcttgtggtcaaacctcatcaggaaggggaggctctgtggctctagcagcttcatccttgcttggaggccttggtttcagctttctgatttccctgggctgttcccattcttatgatttttcaagagtctaagagattatttgtgccacgcttgggttctttataagctggcttttgtccaggaagcttatgtttgtctctctgagaagaggtcttccaaaacatgggggcagatggcagattctcgttttgttcacactaaatctctggtattttgtgagaaaaacgagtaaatggtggggaactactctttgagtaaatggtggggacccactcttctctttgattttcccagcattagtcacgtagttggatctggcccaacactagtcacctggttacatcgttcttccttggtcatcctcttacctaaaggaccgggcattgagcttgaggtgggagagtaccacattccctggagatgccagctgtgtattctcctcgtcctgccgcattctgtgggtctcctgcacccaccttggctgattcaggtgtttcccttacacacataccacaggcgagtgttgcatgcaatagcttggattccttttttccacatttaaagttgtcttcccggcacggtggctcatgtctgtaatcccagcaatttgggaggccaaggtgagtgaatcatctgaggtcaggagttcgagagcagcctggtcaacatggcgaaacctcgtctctactaaaaatacaaaaattagctgggtgtggcggcagccacctatagtaccagctactcgggaggctgaggcaggagattcacttgaacccgggagtggagatggcagtgagccgagatcgcgccacttcactctagcctgggcaaaagagcaaaactctgtctcaaaaataaataagtaaataaagttgtcttgatcatagtggtctgtttggtagatgcctgttcagctacagtggtgcagttcatagaaacatactgtgctaggataaagaactgcagtaccactgaagctggttctttgctacgtcttgctttggatttcattttacagttttaaaagcaaacagtgtagtctcatttttgttggactttaaacttaacagcgtatgttcagacagggattgaatatttgctttcagtttggaaaaccttctgttcactgatctgataacgtacatgtttctgaaaccaagaaaagagcagcttgagagcctgaatgctgtgggacatgagcaggcgagccctgccttcctggctcccccgccgtcatccgatgtgtgcacacgtctcgagtaacgtgtgagagctgggcctcacagcttgggccagtacgtgagggagtaacagtggttgggaaattggagcaaaagaacaaagccagaatcagatgaagaccatggagggttggtgggctgttttagaaatgatgatgagattggccatttaccaaatggtgagagagcttctataaattattatttaagaattgctgtaagctagaatcaccacacaagacattttagagaggtgaaaagacatggatcctgttgtcatggagcttaagtccaggctggggtgaccccagctcatcactcctgggctgtgccctgagcgtgtcaaggatgagacatcctgggagttttatacgcctcctctcttgtccatgttaatagtgtgagccatcagcgcttccagacatgctccatgcttaattctgaaggtctgctgcttatgaactttctgtctcttcctatagtacgccctgcatgtatacaatgaagtgatgagtgttggccagaaatacggaatccggaatgctgggtattacgctcttcgcagtctccgaattgagaagttttttgccttctggggtcaggatataaataacctcaccacgcccctggaatgtggacgagagtctcgggtgaaattagagaaggtactgtgtttacccagactccactttcactcagcatcccgagtagtgaatctgcactagactaggaagaagaactgatgtgacaggaaaagggggaaaagattgaggccttgatgttagcatcaggtaaatgaggacaagagtgccctgagaatgaaaactttataggataaaatatcttcaaatgaaaacataataatggtggctcacgcctgaatcccagcactttgggaggctgaggcgggtggatcacctgaggtcaggagttcgagaccagcctggccaacatggcaaaacccgtctctactaaaaatacaaaaagtaggccgggcacggtggctcacacctgtaatcccaacactttgggaggccaaggcgggcggatcacaagttcaggagatcgagatcatcctagctaacacagtgaaaccccgtctctactaaaaatacaaaaaattagccgggtgtggttgcgggcgcctatagtcaggagaatggcgtgaacccaggaggcagaggttgcagtgagccgagatcacgccactgcactccagcctgggcgacagagcgagactccgtctcaaaaaaaaaaaaatttacaaaaagtagctgggcgtggtggccagcacctgtagttccagctactcgggaggctgaggcaggagaatcacttgaacctaacaggcagaggttgcagtgagccaaaatcgcaccactgcactccagcctgtgtgacagggcaagactccgtctcagaaaaaagaaaacatagtaaatagatgacacttggtcaggtgcggtggctcacaactgtaatcctagcactttgggaggccaaggcaggaggatcacttgagctcagcctgggcaatacagcaagaccttgtctctgaattacaattgaaaaacaaacaaaaaaacccacttatttctagtgttctgctgtctaaaagactgagtgctttctgggaagctattctgagttaattatggtgatgcattaacatgccacgaatatttgtacaaactagtcgtcctatagtcagctgcctaatttttgtggtttttttcttttgtttttgattttgaggtggggtctcattctgtcacccaggttggagtgcagtggcgcgatgttggctcactgcaatgccctctcatgctcaagtgatcctcccacttcagcctcccaagtggctgggaccacagatgcacaaccatgcccagctaatttttttgtattttggtaaagacagagtttcaccacattggccagggtggtctcgaactcctgagctcaggtgatccgccctcctcggcctcccagagtgctgggattacaggcgtgagacagcacacccggcctaatttttttggtttttttgttttgggcggatcacctgagttcacaagttcgagaccagcccggccaacatggtgaaaccccgtatctgctaaaaatataaaaattagctgggcatggtggcaggcacctgtaatcccagctactcggtaggctgaggcaggagaattgcctgaacctgggaggcagaggttgcagtgagccgagatcataccattgtactcccacctgggtgacagagcaaggctccatctccaaaaaaaaaaaaggtaataacccattttggaaaatataaagaaggaaattaaaatcacccatattttgtctatttaatggtagtaactattttttttttctttcttgagacggagtttcgttcttgttgtccaggctggagtgcagtggcgcgatctcagctcactgcaatctctgcctcctggcttcaagcgattctcctgcctcagtctcccgagtagctgtaagccatccagctaattttgtattttttgtctttaccaaaatacaaaaaattaggtgggtgtggtggcgcatctgtgggcccagctacttgggaggctgaagtgggagaatcacttgagcatgagaaggcatttttgtattttttctttttttagtagagatggggtttctccaggttggtcaggctggtctcgaactcctgacctcaggagatccccccgccttagcctcccaaagtgctgggattacaggcgtgagccaccgtgcctggccataatcaccgttaatagtttattctagtcttatttgttgtacatatgtgtatatatgtgtgtatgcattgaatatagatgtgcatggtcttgttgggattatataaaaaagtctttttttttttttttttgagacagagttttgctgtgtcaaccgaggctggactgcagtggtgcaatcttggctcactgcagcctctgccacccaggttcaaacgattttcctgtctcagtctccctagaattataggcacactccaccagaatcttggctcactgcagcctctgcctcccaggttcaagtgattttcctgtctcagcctcccaagtagctagaactataggcacactccaccacacccagcttatttttgtatttttagtagagatgaggtttgcctcatctctgttcaaggcgtgagccaccacgactggccaatataaaaacatttttctaaagtactggactgataaggtattttattaagtgagtgagttttcttcctaaacgtttttgttctatctggtcttgtgactttatgtttataaaataggaaacaaaatgcgtacctctgttgttacaaaaattaccgcggcgtcttttatatttcacatgcagtttttcacatggtagaaatcgcacagtttcccaaaagctggcagggttgtgggaggaggcggctgtgccccattgcagtgacaccaggggacccttcccacggtgctgctctctgtgccgagggtctgagtgtcgctggatgactcggcgtttcctttctttcttagggcatggatttcattggtcgcgacgccctcctgcagcagaagcagaatggagtgtataaacgcctcaccatgttcatcctggacgaccatgattcagacctagacctttggccttggtggggagagcccatttaccggaatgggcagtatgttggcaagaccaccagcagtgcctacagctacagcctggagcgccacgtttgcctgggctttgtgcacaatttttctgaggacacgggggaagagcaagtggtgacagcagatttcatcaaccggggagagtatgagattgacatcgcgggataccgcttccaggccaaggccaagctctaccctgtcgcctccctcttcacccagaagcgccgaaaggatgacatggagctgagtgacttacatgggaagtgatgccaccagggcagcctcacctcctccccatcatcttgtcctagagtgggcgtcaccttggagcttctcttccttccgcctctgttcctcttctggagcctttgcctcccatctcttatctccttgatataattttgaacttgacctactttaaacttttttgctctgcagccttccttgcccttccacctcctcctcctaatattcactctgggctcttcttcccttcccacccctcactcagcttctcgtggtggcaggaggtatgtctgacaggacagaagcaagctccactgtggacatgagtgatggtgacagctgctttcaaattctgcatctcaaggcagggcaagccggggtggtgcaggtctcagggcacgagtccctctcccttgggttccattttcttggagcagcctattagttctggtggggttgccgtgtgtcggatgcagccctgaggggcagctcgtgcctgcagcccggcagctcgttctcctgttctgctgtgctgtgggctggcactcgatacctctggcaagaggatgattatctacctcactgataagaggcatcgcatggacgttctctggtctgtagtggagacaagcagttaacctagcaccatcctcatcctccctgcagaagccattagcagacctttgggccagggcagcctccctataattttcttcatctcttgctaatctctataataaggttgctttttctttcttagttgagtaaacaagtaagccacagtgtttgaaagggaaaaaccatattgccttgtgtgttgcttttcccagtcaaaagggtctgaccttagaaagtccccaccagtgatgctgagtgttctgctatggaaacaatgctgcttttctctcagctgtccaaagttcagccgttcctccttccccttctcccagtgcgtttgactttgtcaggtcagcctcacttgtccctttcacagttggcccataaagtcatgtttctctccctttagaatagggaggggaagggatcaggtgtgttgtcctgggcctttcaaccttgcgggctgtgctgagttccagagagctgccggaattccaggtttgactctccagcacagagcagagctacacagaggtgacccacgttagtccactgagagttctgagtccaaagggtgtacgttgcataaggctagagaccgcttttcctcctttccccccaggctctttgtttccctccacccacccttccatatcctctggagcaggagacaatgtgggtgcccagaagtgccctgcgctttcaggcagtgtctctgttttcccaaggtgaaacttagatatcatggactgttgtccagcctcaatgcttcattttccccttgcatatcaactgccctaatctgactttttttaagtgcaaataaactgctataagacattttggttagtaaaactctagcctttggcgtgttggtatcttggaagcattagctctgataggtctataagtgtattaagggacatccttccatttcattagagcagcttaaaatgctcaggtgtctgccttctctggtgtttctttgggatctctgtttacccacttacgctggctccttctagacatttcttgccacttccccaactagaccactcctagtgattactgactttagtgcctaaacctttttggaaggttctggttggcttgttagaggagcatatgattagaattctgtttgggggtctagttgtcttggagcaagtatgtacttaactagccgagagatgctgcctctaggcagagaggaggagaggtgttgccggctggagggccaaccagtgaacaccagctgtgaaggccttgggagaggaggaacaggcccttgggcagatgcaggcattaccagcagggagcagacttacctccgaagatggagacaggtgactgagagctgcaggcctcctctgctcttccaaacacgtagcatttgcacccctccaaagccatctttgtaaaggaaaacgtatttgtaattgaatccagaagaatttagttacacatagacataactcttcaaccttaactatggcaatacatttgtgctttaactgttacatagcagtatcaccacttaccaggatccaaatcgaaataataaaagctgtctccatagtttaaaatcgaatagtgccatcatcacagtatattagtcaaatagaagcttcatcagaaatgtatcccacatagagttttaagacttggattctcttctgcccttgttaatctccaactaattactacagattgacacgtttttaattagctgtcctttgtaagaagtcaggaaatctgatgctgtgtccaaaattatgcactgtttgttgaagtagaaccagaaatcctgacctcctgttaaatgacatcagtttccccctctgagcaacagactgcttgtcttgctaggagaggaggatggggggctgagcactcaggctgtccattgaaaccccttgtccatgaatagggtcatactcctaagactgatggggtgttgatcttctaggacatcacttgtttattcagtgccccaaacacagatttctcttctagcactttagagttgatccttgaagtctctcctggttcattcaaatacaagctgtgtgagtctggtggttttctgtgattggtctaatgtgagctctttgaacagacagatctgacagtgaatgactctcccctgcttctggcataactgctttgcctctgtctagtgtccaagcatcttagctgttcaagaggagagggcagcataacttcctgaccaccggtgtcagatatcagagcattctggactcctgagaggcagtggcctcttgagtgaacaggggaggccagtagatgccccagatccagagccgtggctgcaaatccagcaggaataaggagggacaaccacagcctcctcatccatgtgtcatttccaagggtttgccttgtgtctcagctcattctgggcagcacgtttgtcttctgtccctagagatttgaaggattttggactcttgtgaatgggtgactggacttggctttacagagttgggtgcttttttctctctgcaattacctgtcatagcattttgtgctcaccacgaaggatggtctctgccttctcttgtcggtgtatgccatctgaacctaggaacacaaagtatattggcctcaaacggagacccagggttgccagttttccgtgggccttcccctcccttgaaatgtctttaattacctccccttcatcgtcaggccacgtgtgacttctgttcttagcactgccagggtcattgacttccatctaagcttgcatcaggaagatgttccttctgtgatcattggtactgaagccagaaaagctctcattcaggaactctgaagagcaaaaagggacaaacactaactgctgagctgggccatttgatctcctttcaccttgcattgctgtcacagcaccttgtatgatggcaggacaggctccagcagagagaactgcacagtgaccactgtatttttcacgctcttccagggatccctgtcccccgacattgaagagatctcattcaggccagagacacagagaccacatagcccagtgattaaaccccggtttcactctggccccaggagtggagcctggccactcctgtttggttctcactgggaggcccactggccttggatcatctcctcatgcacacccggagttttacctgcttgcttgctttcctggactgctgtttgcaagaaagtaactaaaacatgaaaagtaaacctccagcttccacagtatattacctgccgttgcatgcatttgaaagttagcctcctcccttgccaccgtcttggtggcagtagcgatgcaagaatgatgggagctttccgagagcgttcagtgtttcactgaagacaggacccatagccttcatttctggctctgtgtctcctctggcatatggacacatttcctggcatttgcctgagtctacaccactttttgagaacctgaaatagaagggaatcttctgtggcccacagtctccatattggcactagaagactggcctggcggaggaatttgcgttggcttgctttcaggggttagctacaagattcagctttatatctctgttgcttcttggccagtgtagtcaataagggtcttctttaacatctaagatagaggtttggttggccgggcgtggtcgcttactcctgtaatcccagcactttgggaggcccagtgaggtgggagaattgcttgaacccaggaggcagaggttgcagtgagctgagattgcaccactgcactccagcctgggtaacagagtgagactcttgtctcaaaaaaaaaaaaaaaaaaatctaagatagaggtttggtcaacagtgcttaataataaataagaacctcctgccattctaattttcctgctgcaccccatcccccacacacccctcacgaacattgatataagcagtattaacacagtataaagaatgttcaccttgcatatgtcatttcaggcacatggattcaggagaagcacagttgagtggaagaaatggtagacttgtgaggcttgccccaggccttgtgtacacgcaataagtggtgagccatgggtctctccgtcagcgcctccctccccgccaccacttcaggccaacaatttaaggtgctgagttgtaaggctcctccattgtcagtacagggctcgcctttgtagccctgatcactaccagtacacttttcaagacaactgagtatttttgtatgcctttgccttccctttgtccatgaaacatgaagagttgtttatggttcttgacttctctgagcagagtgtctgcatctcttggagagttacacatttcttcatgagccatttttctcattcttagatgcacctgtttttatcctttgcagaccatcttctgccttcttattttcctgtctgtcaaagacagaaattacaggagatagggagggttttttagcatctctttcaaaagatgtatgtcagaatttcctttgcacaccaagaactggagcttagagccccactattctctaagccaggttctagtgccttacactccagaatgtcagatggtgggtgcagattggaagaaagagaaaagttcatctcggtgtgtgggttcccatccgccccacatagcctctccttcttcggaacaatgggcgtggggtagaaagctctttcagtgaagggtgttctagcagctcagttaacactttactctccagtcaacacttgggacatataaaaatgccattgtaactactgtagagtcctgtgactcatcgtttgtgtttgtcaatttgcagttcagcttagcccttccctgttcctgtgtagttacaatctggccctgaagacatccgaggcacttcagtaagtgggatcttttctagagatcctgggtgactttgggtgcacagggtgaccgagcatttctgcccctgtgaatgtggcactaacactgtgcactgtctccaccaagcaaggtttccactgagtttcttctcatgttactgggtttgtaaatgaataaacacattttaactactcttgcacggctgcttgtgaaa

SEQ ID NO: 12041 - DNA, 595 bp, Homo sapiens
ctgagcccaggcgttttatcaaaaggacctcctttggttcccatgagctcctttgactagctggtaaatatctcttcctttgatctcaaagtaatttttatgtcttaaaaaatgtagtattgctccccatccaaataattgaactaaagcaggctgacttcccacacctgacactgtagcaagagcacacataagccacttggaattaatctcaagaggctgaacttgctcatttttatttctgttcctcttcccacccacaaatcaacctgtccatttgtagtgggcatacgagctgggtctgtccaacgaggagccggttagtatcccgctacatgcctgcgaacacttctacctcctgactcgccccttggagacccctctgcagagcagcacaccaagtgaggacttgcacttttttaaaaaatcttgtttctttgccagtatcctgtcctctgaaaaggaaaactttctgctaaggacagcctgtgtctgaaagagtctttcatttctagagcatgttacagggaggtggacccaattctgacttttctttattaactctttatgaaaggatggccaaaatttccattaa

SEQ ID NO: 12042 - DNA, 1366 bp, Homo sapiens
gttccatactatagaaaaatgtaaagttttaaaattatttatccagtggttgcaaaattgaaatcaaaaggggattaagggaagaaaacagatagatacacaaataatataggcattcattctgttaatattgagtaattactgtttgtcagacactgttttaggtatgaggaaatgacagtgagcaatacaaaggccacattctcatggagtaaaattccagaggtggagacatgtaattaatacttaaatataaaacagtagattttctaaacgcagaaaacggaagagtaacaagaaactaaatcaaggagcattatatagcctagactgcagagactcaatataataaagttggcgattcttcctaattatcaaatttactgcaattccagccaaaatgtttcagtggttttttttgtttgttgtttttgtttttgttttgccctttagcttcacaggtttgttctgaaatttatgaggtataaattcttaagagcagcaagaaaaatttcgaatctatttgtagaaactgcatatgatgatggttcataccagtagagagaaagattggatttgggggtattactagtagtaaggggattcactagtagtaagggaaatgcaaaataaaatcacattgaactagttcaaaatcatcacattggcaaaagcattagagtgccaattactggaaagatgtggagcaataggaacactcatacggtgctataggaagtagttgtgtttagcataatttggcaatgtctagtaaagttgaagatgtgaataatctttgacccagcaattccatgtttaaacctctacatagtctctcctcgtgtttcaaggagatacatatgatggtccattgcagaactgtgagaatgagaagttgaaagcaatctaaccattaggttaaatacaagatagaatgcaaactaaaatgaataactagagatatttctgtcaacatgggtaaacctcaaaaatagtattaatgaaattgaactacagactattttatataatacagtataacgtacaatttcaaaacatgcaaattagtgttatgtatttttgtcatggctaaatactatataaaaaggatctaaaagaattaataaaataatcatcagattcagaacagtggtgacctgcagggagaaagacaactgagattggggaaaggatgcaaatgaaaatacctttaattattcatttcttttaaaaataagcaaatactgtatagccaattcttaaaatttgataaagctggctgtgagtatatgagtcagttcttactctctgtatctttctgtataaactatttcataatgcaaaaaaataaagaatatttaaatga

SEQ ID NO: 12043 - DNA, 1366 bp, Homo sapiens; identical to SEQ ID NO: 12042

SEQ ID NO: 12044 - DNA, 397 bp, Homo sapiens
atgagaaatttgcatgtaaaatacttcatatagtctgtcaaatatagcagatattcaataaatgataatagctaacatgtattgagtgcccactacacatcaggcactgtcttacatactctacatatattaactcatctactcctcacaaaacaagattccttattggacaaagtggagcattcctgcaaaacaccagttcagaatttggaaaatctaaaaatgttagaacataaatggcagtctttgtactgtagcttagtagttgttatgaagtcaggtagtggaactataacactgacagccagttttaggaagtttctacagataatgaattggataagccaattaagaaaaatagaattcactgggaagaatgcagaacctacatttaaat

SEQ ID NO: 12045 - DNA, 397 bp, Homo sapiens; identical to SEQ ID NO: 12044

SEQ ID NO: 12046 - DNA, 5983 bp, Homo sapiens
cctacgccttccagcccaagtgcacctacgtcgtgagtgctgccctcctacctcggtgtccccagccccccgccctcctcacccttctctggactcgtggatgtggcccacagagccctgcccttaagcatctcctcatcacctctctctctgtccttagaacatgctcaccttcactttggagcatggagagtttgaagatgggaagggcaagtgtccctatgacccagctaagggccatgctggccttcttgtgggtgagtggctgccccccatgcaggctgggtgagtccttggggcttggttccacttgggtctgtgttggccggatgtgtccatacctcatgtgtggcctagctgacctctgtctcccatagatggtgagctgtactcggccacactcaacaacttcctgggcacggaacccattatcctgcgtaacatggggccccaccactccatgaagacagagtacctggccttttggctcaacggtgagccaccggggggcctgtgggagccatgggtgggaggtcccccggggcccagcccctccctgctgacctcctccccttcccacagaacctcactttgtaggctctgcctatgtacctgagagtgtgggcagcttcacgggggacgacgacaaggtctacttcttcttcagggagcgggcagtggagtccgactgctatgccgagcaggtggtggctcgtgtggcccgtgtctgcaaggtaccgagtctcacagcggtgggccctgggagccctgctggcccagcggggctgaccggcagtgtccccttgccgtctgccagggcgatatggggggcgcacggaccctgcagaggaagtggaccacgttcctgaaggcgcggctggcatgctctgccccgaactggcagctctacttcaaccagctgcaggcgatgcacaccctgcaggacacctcctggcacaacaccaccttctttggggtttttcaagcacagtggtgagttggccagggctcccacagagtggggaggagctggggttcaggtcagggacggtgcatgggtgggagcctggaccaggcctcagaggcagtcccggaagccaggtgtccagaagccaaggagaatgctggcacctgcccctttcagagctgcctgtgaaggggcagggccccatgccaggtggcacttgagctgccagggcattctggtacccatggccagtttgtgccaggccctgccttcctgctgcttgcccttagctgggggtgggaagagataaggtgggtacctgaccctgggctccctctcgctgtgacaggggtgacatgtacctgtcggccatctgtgagtaccagttggaagagatccagcgggtgtttgagggcccctataaggagtaccatgaggaagcccagaagtgggaccgctacactgaccctgtacccagccctcggcctggctcggtgagtgctagggcagggatgcatctccccacccagctgcggtgccatcccaccctgctgatggcctgccccccacaccctgcccccagtgcattaacaactggcatcggcgccacggctacaccagctccctggagctacccgacaacatcctcaacttcgtcaagaagcacccgctgatggaggagcaggtggggcctcggtggagccgccccctgctcgtgaagaagggcaccaacttcacccacctggtggccgaccgggttacaggacttgatggagccacctatacagtgctgttcattggcacaggtgggtgcatgggtatgcaggcatggctgctcaaggctgggcagaagcccgtgtgcccagggcagggagatttggagctgccccacggccttgtgccctctcatttacaccttctcctctgcaccccccaggagacggctggctgctcaaggctgtgagcctggggccctgggttcacctgattgaggagctgcagctgtttgaccaggagcccatgagaagcctggtgctatctcagagcaaggtagtaagttgggccctatctgccactgtccccagcactatcccatctcactctctccatctggctgcttctcccagttgggcctatgtgcttggccagtgcagagttaggaacacacacacatgtggatgcacaccttgcctaacttggggtgggttcctggaaacgagaatgaaaacagaatggaatctgcactgcacagggccattatatatagccaggtcacggggctgcgctcccagcatcaagccttggcaactgctcccatgtttctttcagaccctccaagctgtgctgtggttctggctctggcctcttccctgaccatgcccctgtgaccagacctcccaggctgtgagatgtttatgatgccctcaccatggtggttttccttccagcccccatttccgtgactgtttccctgaagtgcttgcattatacccttgtgcaatactctttttggtttttttttgagatggagtctcactctgtcacccaggctagagtgcagtgacgcgatctcagctcactgcaacctccacctcccaggttgaagctattcttatgcctcagcctcctgagtagctgggattacaggtgcctgccactatgcccagctaaaggttttttgtttttgtttttgttttctttgagatggagtctcactctgtcgcccaggctggagtgcggtggcatgatctctgctcactgcaacctccacctcccgggttcaagcaattctgcctcggcctcccaagtaactgggactacaggcacgtgccaccatgcccagctaatttttttttttttttttttttttgagatggagtctcgctctgtcacccaggctggagtgcagtggcgcaatctcggctcactgcaagctctgcctcccaggttcacaccattctcctgcctcagccttccatgtagctgggactacaggctcccatcaccacgcctggctaattttttgtatttttagtagagacggggtttcaccgtgttagccaggatggtctcgatctcctgaccttgcgatccgcccgactcagcctcccaaagtgctgggattacaggcgtgagccactgcgcctggccagccggctaatttttgtatttttagtagagacaaggttttaccatgttggccaggctggtcttgaactcctaacctcaagtgatttgcccacctcagcctcccaaagtgctgggattccaggcatgacctgctgttcctagttgccttgtgcaatactcttgtggcatgtttgctacacctcctgaactttgatttgtttgccttttaccagctattatgactcaaaattgtcccctagaacatggaataatggcagaaagaaagtgtgtggttgaataaacacacagattggcatccaccgttgaaacaggaaaacatcttatgttatgctgctgctgttgtgagggctgatgggccttgaaatgtatttcctgcactatgtgtgtgtgagtgtgtgtgattatactttttggcctcacagccccatcatccctttctaataacgtcacgtcgataaggggcttaggattgcatctggcctgtgtaagccctctgagttctgcggttcttagagttcccttttcagcactatagctctgccttgttcccttgttcctccttctggcgccccgtgctgtgccccctgcaggagtccaagctgtccccatgctgcgttctggtccggccgcccctcccgtggtgtggccctggccgacccccctcctgcgccccgcttttctcgcagaagctgctctttgccggctcccgctctcagctggtgcagctgcccgtggccgactgcatgaagtatcgctcctgtgcagactgtgtcctcgcccgggacccctattgcgcctggagcgtcaacaccagccgctgtgtggccgtgggtggccactctgggtgagttgggctctacataggccaggacctccagggactcagggtggttggagccaggctgctgatgtaccctacatcccctaccagatctctactgatccagcatgtgatgacctcggacacttcaggcatctgcaacctccgtggcagtaagaaaggtgagctttttcattcccgtcgcatcgggctgagccctggaccagagctggagtttctgttctcctcttccccagccctgctttcctgcactaacatgcactctgttttctctgccactacagtcaggcccactcccaaaaacatcacggtggtggcgggcacagacctggtgctgccctgccacctctcctccaacttggcccatgcccgctggacctttgggggccgggacctgcctgcggaacagcccgggtccttcctctacgatgcccggctccaggccctggttgtgatggctgcccagccccgccatgccggggcctaccactgcttttcagaggagcagggggcgcggctggctgctgaaggctaccttgtggctgtcgtggcaggcccgtcggtgaccttggaggcccgggcccccctggaaaacctggggctggtgtggctggcggtggtggccctgggggctgtgtgcctggtgctgctgctgctggtgctgtcattgcgccggcggctgcgggaagagctggagaaaggggccaaggctactgagaggaccttggtgtaccccctggagctgcccaaggagcccaccagtccccccttccggccctgtcctgaaccagatgagaaactttgggatcctgtcggttactactattcagatggctcccttaagatagtacctgggcatgcccggtgccagcccggtggggggcccccttcgccacctccaggcatcccaggccagcctctgccttctccaactcggcttcacctggggggtgggcggaactcaaatgccaatggttacgtgcgcttacaactaggaggggaggaccggggagggctcgggcaccccctgcctgagctcgcggatgaactgagacgcaaactgcagcaacgccagccactgcccgactccaaccccgaggagtcatcagtatgaggggaacccccaccgcgtcggcgggaagcgtgggaggtgtagctcctacttttgcacaggcaccagctacctcagggacatggcacgggcacctgctctgtctgggacagatactgcccagcacccacccggccatgaggacctgctctgctcagcacgggcactgccacttggtgtggctcaccagggcaccagcctcgcagaaggcatcttcctcctctctgtgaatcacagacacgcgggaccccagccgccaaaacttttcaaggcagaagtttcaagatgtgtgtttgtctgtatttgcacatgtgtttgtgtgtgtgtgtatgtgtgtgtgcacgcgcgtgcgcgcttgtggcatagccttcctgtttctgtcaagtcttcccttggcctgggtcctcctggtgagtcattggagctatgaaggggaaggggtcgtatcactttgtctctcctacccccactgccccgagtgtcgggcagcgatgtacatatggaggtggggtggacagggtgctgtgccccttcagagggagtgcagggcttggggtgggcctagtcctgctcctagggctgtgaatgttttcagggtggggggagggagatggagcctcctgtgtgtttggggggaagggtgggtggggcctcccacttggccccggggttcagtggtattttatacttgccttcttcctgtacagggctgggaaaggctgtgtgaggggagagaagggagagggtgggcctgctgtggacaatggcatactctcttccagccctaggaggagggctcctaacagtgtaacttattgtgtccccgcgtatttatttgttgtaaatatttgagtatttttatattgacaaataaaatggagaaaatgaaacgattgctctgatggggctaaga

SEQ ID NO: 12047 - DNA, 486 bp, Homo sapiens
aaaccgtggagcgcgccccggcccgatggctcacgcctgtaatcccagcactttgggaggccaaggtgagcggatcacgaggtcaagagatcgagaccatcctggcgaaaccccgtctctactaaaaaatacaaaaaattagccgggcgtggtggcgggcgcctgtagtcccagctactcaggagtctgacgcaggagaatcgcttgaacccgggaggcggaggttgcagtgagccgagatcgcgccactgcacacaagtctgggtgacagcgagactccgtctcaaaaaaaaaaaaaaaaaaaaaaaagaccgcggagcgcgtggcgcctccctgccctagggactaggggcggtaaagagaggaggctgcgaggtcgctggacggctgggtcatggcgaaggtaacgggaaagctcccgaccggacccagctgcctcatccccacaccctgcaaggccaggcggcccggcggccctccagcggc

SEQ ID NO: 12048 - DNA, 2718 bp, Homo sapiens
atctgcaagggggaaacaggattttggcagcaatcctttcattactaaagcttcctttcttttcgggtacagtgaaaagagccaaggctgtgtgaccccctcatcacttagccaggcgtatggtcctggtttctgaggctgccagaaagcatcttagcaatttgtgtttggatggtccatgcctgactattctaggctggaggttcctaaagagtaacaagaggaagagaaacaagaatctctgacacttgttgagaatagagcacagtcccatttgtttgaaaagagacaccaggcagccatgtttatgtgccagaaatgcattccacctcaaggaggacttaatttatggacccgtgtgtgccaggctgagctgggcaagatctttctcaggacaaactctgccatgcagctaaaagcctggaaactaaaggatttcatgtagtaaactatcttccaacccctgtagacatcagaccacaggatgaggtttcagaaggtcataaggcagaatagttaagcctacagggcttacagtctgacagacctgggttcagttcttgggtcttcatcactagttttgtgacttcgggaagatgactcccggagcctcagtgagcctcagttacttcatatgtaaatgaagtaatactatctacttcacaaggctgttgaaaggattaaatggagaatgggtgtaaaacccttagtgcagtgccgtgcacacacagtagatgccgaacgtgtgatgttggcactacacaatgtgtaatcccaatcaggcagagctaggcaggcaaatctaatccaggatctttgtaaggggactgagaaccagagactggagaaagccagtgtaaacaccatgagcaaaggagcaagagaaggggcattgtgtaagtaggagatggagcttgaacttactaagtggatcagggtagaagaatccagtcaggaccaagggaggagagtccaggaaaatgccatgagcagctctgtagcatgaccttgttgggctgggttaaagtagggtctgccaccagtcatgtgacagaaaggtacctcatgcacttcctccttcccccagaaatcagcctccaggagtgaggaatgagcccagaatgagagtttagagtgctccagagcctttgttagaggtgccctccgacattcagaaaaccaggattccagagacctgggtttgagtcctgactttgcagcatactaactgtgtgatcttgaaccaacatattttcacctaatgaggctgacaatcttccctacttcacaaaatagttatgagagtcaaataaaagtacattttagaaagtgaaatgctgtggacatttaaggtggagccactgtgagagtctagggggatagatggtattcgtctcagaatgaaacgaatacacccctctcagagccctttccaaggatcccctccttctttcagctccttccctccacctcaatacacactcctgtcccaggaacctaacctcatctagaaataccagggccagcatgccttacacctagaggtttggttggcttcagagaaacttctggaggctaaaagcagccaagaagaatcagccactacatgctgggcctggatgaacagagcagtgagctgtgatggggctggggctggggcccaggaggagcaggcaggagagtttgtatgcaccgtgattcaaatattataacaaaaatcatcgatcatgtgttaggcactttacagttcccaaagcactttcccatccatgccctgatgatctttgacacaacactgtgatgtgggttttattatttccagtacagatgaggaagactgaggcctgcatcagtgaagcaacctatccaagactacatagagaaggcagtaaatggcagggttagtctcagaacaggggagggtctgttccccccgcagtgggcagtcctaattctgaacttcacctatctgggggtgatagaggggaacaagaggaagcctgctgaagagaaaacctaaacatctgttttgtctacgtatgacttcctctgcttgtgggagagaaggaaggaaaggaacacattgttgtcagccccacaaccccaacagaattaaaccctggagcaggttgaacagcagaggcttccctcagatcaaggagccaggagcagatgatctatctctgtggccacacagagagatgtcaccttatgcaatttgcatatcatattcaattcccccaactgctctttctaatttattcaactggggaccaggctggtctcatgccaacctaggagatgtaccatagcagtatgagcagaattcctcaggaggaacaattagcaaaaactgcagttgcctctcgataggcctgagcagagagaggaacaatagctctcaggtctctcctcatcagattctaactaagcagatgttctcatgcttttttcttcttcctatgttctgtatactgacacctcttctcagtggcatatgaaatatgaaatgtcatgtgttgtgagtttgtataaatataaaggaatatatatacacagtagcaaaagagaagatctcatttacaaatatctatggtgtttccttgttctgtgttgatctgttttattgatacaaactgaattttcttaatgtatcttctatctctattatagtggcaatgatggtatatgcattaaagttcttctgaattgtgtatc

SEQ ID NO: 12049 - DNA, 101 bp, Homo sapiens
gcttgaacccaggaggcagaggttgcagtgagccgagatcgctccactgcactccagcctgggtgacagagtgatactctgtctcaaaaaaaaaaaaaaaa

SEQ ID NO: 12050 - DNA, 7712 bp, Homo sapiens
ttttttttttttatataaagatggagtcttgctctgttgcccaggctggagtgcagtggtgtgatttcggcccactgcaacctccacctcccaggttctaaagattctcctgcctcagcctcccgagtagctgggactactggtgcatgccaccatgcccggctaattttatgtatttttagtagagacagggtttcaccatgttagccaggatgctcttgatctcctgacctcgtgatctgcccaccttggcctcccaaagtgctgggattacaggtgtgagccaccacacccggccacatatgaatatctttaagattaaatgattctttgactttatgaggtcactatcaagatacgtgaagaaataaaatattttatttttcaggatgttatttctgacctagtatgtttctgtgtttaagcattcatatttatatctctatggcacttttttttttttgacacaggagctggactgagcatcaaacatgtctgtgagctggcaatgagtcacctaagtacttttttgtatcaaatctatgatgccatcattcttaagatgcacctttattttatgaaatagtaagaaacaaaaaacactatgggacaccatcaaaatatctgatttcagagaagttacaataataaaaaatgtgtatcttggaatcaatgaaatgtggcgattccagttatctgaaagtcttacagatataattacactgagctcttattacgtatcaagtaccatgctaagtgtttttacatgtattatctcatttattcttcatagaaatgccatgaggtagatgctgtcttcattttcattttgtacagggaaacaaggtacagaaaggttcataaccaaacaactagtaagtagaaaagacaagatttgaacaaagtagtctgacttcccagtacatcctcttaatttatccttattgcctgagaaaaagcttattagtcccttcagaacagaaaaagtggtccctggcactaaattcttaaggaaatctatcaagtaggaggatacagagtgtccttattgccagataaagtccagtgttgtgctatatgtaatggagagtcaccagagggtttttagcaagggagagacacaattggatttccaagggtctaatctgatccaacaacagaatttgtaatatctgaaaaaaatgaatagatcacacattccttagctagtctttcctaaatttcatttcacttatcattaactttcgtgtgatgtctgaatgcatttgaagtatctttgaaaggaacatgccacatattttggccaaccccacatcttaccctcgtgtagttcgtgctgttactataagttgcaaagctttggcctgcagcctcatgtgatgtataatcaccacctgcttattctccacaccactgtacatgaattccattttgtaggtctcttccataatctataaaggaaagataattaacaatcaataaaaatatcatagtcttacttgagagcagcatagaattctactgttaaatgaccttaggtgaaactcttaactgagattttacatccttatgcttttaagtgttgaaagaaattagtatagtatgccttgtaaaaagagaataaattattttgcctacttaaaaagaagactgacctggtaataaaatcatcttagttgatgatgtgaagataagaaagtttaatcactaagcaaactgcaaagcactgaaagcactgcttcttaccctaaatgaagcccactctgctgtgggaacaaattaatatatattatgtatggaaacccaatccccacaaagtcctcaagaattaagcatcaggaactattaaccatatgttagttatcctgacagactgttccatgggcctggtctgagggagtttgggacagaaataagtgcaagaaaacatttgtctatgaccccagatcaagtccccgatcttgctcggttctatccaaataagcgattttcatcaaaatgatgcttctcttttccttctgtgcttgcctcccagtgaacactctagggtcacggaaatgactccagactctcttacaattggcaataagacaagttaaattacatgagtgtctcaatccctttctgtaaacagggaagaaacagtaccaatatcatgaagtttcaagtatcaaatggagcatgcaatgtgtttatcacagtatctggtatacagcaatggtaattcctttcctcttttccttccaaattattgctccctggtcccatccttccaatgtggctcaattatcgggttctagtcattaaattctactcttctacaataagccacataccaggtctgagaaagagtctggatcagacaagagttcagcactgtagtagaaaacagattctgggtatcagaggatctggtctcaagtcctgactgtattacctatagctctatgaatttaaccttgctgagccttaactgcctcatctctaaaacagacttaatacttattcctatctaatgggattattatgagggttaattaagctaatagacttgaaatcatttagtgaactgtaatgtaacaataacagtcaccatcattagcttcctcctgggtcatttacagactccctatctggaagacttgacctgcaagagatcaccaagtctcaatactcaggtgcaaaggggaatgactcaaagctaaaaagaaataaactagagacaaataaaattaaagcctacttaatgaactacccaggaccttttaacgttgaagagatggtacaggctaaagatataaacaaccttaactgagttgggctacattttcagatgaaagattcatgatagtagagacagcgtttcaccatgttggccaggccggtctcaaactcctaaccttaagtgatgtgcccatctcagcctcccaaagtgctgggattacaggtgtgagccaccgcgcccggcccaactgccacattttatagaagagaaaaaatccagggaatttaagtaacttgctcaatatcactcagcaaatcagaggaagacctgggactaggacccaggtcccctgagtccaaagtgagtgctgtgtctcctagttatgctccttctcatatcactaacttctgtcatagcctgaaattagggaggccacagcagaggtatagagctacaggaaggcctctggctccgccttggaccagacaattcctggacagagacctatttgaagggaaggtctgaataagcttacctgtgttgctgctgctgaggccaaatcactctgcttcaaatacaaaggggcagctacatgccacaacttttcctgcaaggcctacacagacagagctataggaaggcctctggctctgtcttggaccagacaattactggacagagacctatttgaagggaaggtctgaataagcttacctgtttcgctgctgctgaggccaaatcactctgcttcaaatacaaaggggcagctacattccacaacttttcctgcaaggcctacgcagacaaatcaggagggaacagaataccgaggtcacaaagactggcctatcatttgggatttacatttttgttttcctttgaaagtctcccatgaacatgacttctcaattgatcttattcttttaacccaataagctgtatctattatggagaaagatgagaccaatggtttgggctaaatgaattcccacccatttgatccaattcttggcccaaaggctctgtgtcccagatcagtgcttctggaagcagaggacaggaaccacgaaagcttcaccagaatgcgcaggcaagccagcttccgggctctaggcactccttgttcccagagctactggactaacccaagccacctagatacttcttccttaactgtggttcttttttcttttcccctatgctcattatgttgtaagccccaaccactttatcaacatattcaactagaaatcaagcagctttcctagatttctccctctttcaatctttctacattcaaaaccaccactaagagccatgattttaccttccatctctctcctcacctatccatccacatgacctcatcccttgcacaaacttctgtgacagcctcttattttctcagtccttctgaattacagatgtaatcaaatgacattacagaaaacctagactaacactgtccaatagaaatataacatgagctatatataattttaaatattctcgtagccacggtttttaaattacaaagatgtaagttaattttaagatacaaagactaagttaattttttaaaaaagtttatttaacccagtatatccaagatattaacatttcaccatgcagtattttttaaattattaattagtttacattttctcttcatactaagtctgagaaatccagtgtgtattttgcacttaataacacatctcagtttggactaacaactttttgagtgctcaagagtcccatgtatctggtggctatcaaattaaacagtggtaggtctaaactgtagataaaaactataggaatttctggaatatttacttctaatcatttcttgtatgcatgttttttgacagttgtagtcagaaagcagaattaagtttggggattagatcataatcccaaaacatacaatcccaaatgttgaaatcctcacatccaaattctggggaagtgattagcgtgttttgggttgtatgcaggatagttgcatcatgttagttgtatcatgttaggcacaactattaccatgttattgtctttatttggaaattaaatatggcttaaggagatgcgtatgagtgccaagctgacaaggggtggacttgtggacctaattttagatatcagcttgactagattaaggaatatcagaaacctggtaaaagattattttgttttacacattgagggtgtgtctatgagagtgtttccagaagagattagtgtataaatctgagtgtactaagtggagactatctgccctcaatgttggcgggcaccatccaatcagccagtggccaggagagaacaaatacttaagacgaaatgggctgggagtggtggctcatgcctgtaatcctagcactttggaaggccgaggtgggtggatgacctgaggtcaggagatggagaccagcctgaccaacatggcaaaaccctgtctctactaaaaatacaaaaattagccaggcgtggtggtgcacacctgtaatcccagctacttgggagactgagacaggagaattgcttgaacccaagaggcagaggttgcagcagtgagccgagatcacgccactgtattcagcctggatgataagctgagactctgtctcaaaaaaaaaaaaatggcatattagcaaaacggactctctgggttctgctgcttggatatcagaaatctgactccatgaaagtgcatcatcacaatactgactttgtgtataagcattgagtgtgtacacaaaatgttgaaacttcctcgataaatgagatatccttttcgtacatctgcatttgtgaaagataaaatttcttgagatctcagctctttgggtgactgcatatgcagtggtgacccagcacagtttccatcaatctcgtcaaaagacttgaggttgttgggcacagtatttcagatgaccacagttaaaaagctgggtatacacaattaacaaccaaagtgatatgcatttatacctttccctttatgaccaatttctttataaatatggctcatctgctcataactgttagacccacccaactgtcattagtaacctgagtgtttatgcttgcaaaaatgtatgttgttattgtctgttttattatattaagtgatgtataaagtattctgttgtgtttttatgtttctcaaataaattcccctttaaaaaataaatatctttaaattttttaaattatttcttccataattatattttggggattttgatattttctgggctgtggtttttgggattttagaccttagggattttagtcttttggaatttaaacagtttaggactatgatgttctggactatcttttgggattatgattggctccccttcttttgggtacataacattacaccctaaatattttgtcatgttgttgtataattcttcataaagaattactgactacagaatatactgctaggtagctgtaccaaaatttatttagcttttttcctgttattaaacacacttgccttgggttctggctctgggcccctcacctacactgtcaccccttgtcattgaataaccaacaattatgtgttctttttaggagtaatcacttctctttcctcacccatattttgctactatagaaaagtggattcttctccatggcctccttgaattcctggggtttcacagaggcttggaaaagccaaacaaccttgcaaaggggcaggaaggaacttcttggagtgatgaaaatgttctacgacttgcctatggtggtgattacacagatatatacattagaaagaacatatctagcctaacaaggaccatttaagtgccaagtatacatacgcacctttacatgtataggcacacctgcacaactgtaaatataacatttagcacaagttcacacagtagaaaataacttttgactccctgatttactctgactttagccaaacatcattaatcactttgaaaacaaagaacactttgaactagggccaagataaaagttcgtcaagtgagaagggctctcctaaattctgtgccaaaatttatagtaaaattctgctacagaagctgaaagatactgaactcatttaattgttttttaactcagcaaaactaaatagattcttgggtaccaattctgtgtatagctgactactgagtaagaaacgccagcaagctggtctttttaaaagcaatgaaatcaaccttttaactttgatgaagtgcagtgagtttttttgtttgtttgtttgtttgttttctttaaagacaggatcttggtctgtcatccaggctggagtgcaatctcactgcagccttgacctcctaggctcaagcagtcctcccaactccagccgagtagctggatatacaggaatgcaccaccacacctgcctactttaaattttcttgtagagatgaggtgtcgctatgttgcccaggctggtctcaaactcttgagctcaagcgatcctcctgccttggcctgccaaagtgctaagattacaggtgtgagccaccgcacctggccttcaaatgagcattttaagaagatagtctaaaacttcatacaattcctttgctaatcaaattatacaaaacatttacaaccttgggattctaactaaaatgattatccaatctgctctaattatattatgataaaagaattctccccaaatttacaaattcctatgagttaatatttcgttaattagagacaaatgtaatcacactgcagagtacatatttctccattgtcaagtggttgcattaagaccataagttttataacttatggcctcacacactgctggatccacaaagatgcatttttagcaacacaatcataaatggaatggatgcaaaccaaccttgatgagaagtagttgacagcgaagataggtggcagagaaatcagctactcctgccaattcagattgaagttctccaagtctttgcagatccct

SEQ ID NO: 12051 - DNA, 4403 bp, Homo sapiens
  SITE (2735): n equals a,t,g, or c
  SITE (2755): n equals a,t,g, or c
tccctatgcttttaagtgtggaaagaaattagtatagtatgccttgtaaaaagagaataaattattttgcctatttaaaaagaagactgacctggtaataaaatcatcttagttgatgatgtgaagataagaaagtttaatcactaagcaaactgcaaagcactgaaagcactgcttcttaccctaaatgaagcccactctgctgtgggaacaaattaatatatattatgtatggaaacccaatccccacaaagtcctcaagaattaagcatcaggaactattaaccatatgttagttatcctgacagactgttccatgggcctggtctgagggagtttgggatggaaataagtgcaagaaaacattgtctatgaccccagatcaagtccccgatcttgcttagttccatccaaataagcgattttcatcaaaatgatgcttctctttttcttctgtgcttgcctcccagtgaacactctagggtcacggaaacgactccagactctcttacaattggcaataagacaagttaaattacatgagtgtctcaatccctttctgtaaacagggaagaaacagtaccaatatcatgaagtttcaagtatcaaatggagcatgcaatgtgtttatcacagtatctggtatacagcaatggtaattcctttcctcttttccttccaaattattgctccctgatcccatccttccaatgtggctcaattatcgggttctagtcattaaatgctactcttctacaataagccacataccaggtctgagaaagagtctggatcagacaagagttcagcactgtagtagaaaacagattctgggtatcagaggatctggtctcaagtcctgactgtattacctatagctctatgaatttaaccttgctgagccttaactgcctcatctctaaaatagacttaatacttattcctatctaatgggattgttatgagggttaattaagctaatagacttgaaatcatttagtgaactgtaatgtaacaataacaatcaccatcattagcttcctcctgggtcatttacagactccctatctggaagacttgacctgccagagatcaccaagtctcaatacttaggtgcaaaggggaacggctcaaagctaaaaagaaataaactagagacaaataaaattaaagcctacttaatgaactacccaggaccttttaacgttgaagagatggtacaggctaaagatataaacaaccttaactgagttgggctacattttcagatgaaagattcatgacagtagcgacagcgtttcaccatgttggccaggctggtctcaaactcctaaccttaagtgatgcgcccatctcagcctcccaaagtgctgggattacaggtgtgagccaccacacccggcccaactgccacattttatagaagagaaaaaatccagggaatttaagtaacttgctcaatatcactcagcatatcagaggaagacctgggactaggacccaggtcccctgagtccacagtgagtgctgcgtcccctagttatgctccttctcatatcactaacttctgtcatagcctaaaattagggaggccacagcagaggtacagagctacaggaaggccgtctgccgccttggaccagacaattcctggacagagacctatttgaagggaaggtctgaataagcttacctgtgttgctgctgctgaggccaaatcactctgcttcaaatacaaaggggcagctacatgccacaacttttcctgcaaggcctacagagacagagctataggaagcgctctgctctgccttggaccagacaattcctggacagagacctgtttgaagggaaggtctgaataagcttacctgttttgctgctgctgaggccaaatcactctgcttcaaatacgaaggggcagctacattccacgacttttcctgcaaggcctacacagacaaatcaggagggaacagaataccgacgtcacaaagactggcatatcatttggaatttacatttttgttttcctttgaaagtctaccatgaacaggacttctcaattaatcttattcttttaacccaataagctgtatctattatggagaaagatgagactaatggtttgggctaaatgaattcccatccatttgatccaattcttggcccaaaggctctgtgtcccagatcagtgcttctggaagcagaggacaggaaccatgaaaccttcaccagaatgcgcaggcaagccagcttccgggctctaggcactccttgttcccagagccactggactaacccaagccacctagatacttcttccttgactgtggttcttttttcttttcccctatgctcattatgttataagccccaaccactttaccaacatattcaactagaaatcaagcagctttcctagatttctccctctttcaatcttctacattcaaaaccaccactaagagccacgattttaccttccatctctctcctcacctatccatccacatgacctcatctcttgcacaaacttctgtgacagcctcttattttctcagtccttctgaattacagatgtaatcaaatgacattacagaaaacctagactaacactgtccaatagaaatataacatgagctatatattaatttaaatattctcatagccacagttttaaattacaaagatgtaagttaattttgaagatacaaagaactaagttaatttcnttaaaaagtttatttaaccnagtatatccaagaatataacagtacaccacgcagtatcgtttaaattattaattagatagtttacattttcttttcatactaagtctgagaaatccagtgtgtattttgcacttaataacacatctcagtttagactaacaacttttcaagtgctcaagagtcccatgtatctggtggctatcaaacagtggtaggtctaaactacagataaactataggaatttctggaatatttacttctaatcatttcttgtatgcatgttttttgacagttgtagtcagaaagcagaattaagtttggggattagatcataatcccaaaacatacaatcacaaatgttgaaatcctgacatccaaattctggggaagtgattagtgtgttttgggttgcatgcaggatagttgcatcatgtcagttgtatcatgttaggcacaactattaccatgttattgtctttatttggaaattaaatatggcttaaggagatgcgtatgagtgccaagctgacaaggggtggacttgtggacctaattttaggtatcagcttgaccagattaaggaatatcagaaacctggtaaaacattattttgttttacacattgagggtgtgtctatgagagtgtttccagaagagattagtgtataaatctgagtgtactaggtggagactatctgccctcaatgttggcgggcaccatccaatcagccagtggccaggagagaacaaatacttaagacaaaatgggctgggatcggtggctcatgcctgtaatcctagcactttggaaggtcgaggtgggtggatgacctgaggtcaggagttcgagaccagcctgaccaacatggcaaaaccctgtctctgctaaaaatacaaaaattagccaggcgtggtggtgcacacctgtaatcccagctacttgggaggctgagacaggagaattgcttgaacccaagaggcagaggtcgcagcagtgagccgagatcacgccactgtattcagcctgggtgataagctgagactctgtctcaaaaaaaaaaaaaaaaacaaaaaaaaacaaaaaacaaaaaaacgcaaaatagcaaaacggactctctgggttctgctgcttggatatcagaaatctgactccatgaaagtgcattatcacaatactgactttgtgtataagcattgagtgtgtacataaaatgttgaaacttcctcgataaatgagatatccttttcgtacatctgcatttgtgaaagataaaatttcttgagatctcagctctttgggtgactgcatatgcagtggtgacccagcacagtttccatcaatctcatcaaaagacttgaggttgttgggcacagtatttcagatgaccagagttaaaaagctgggtatacacaattaacaaccaaagtgatatgcatttatacctttccctttatgaccaatttctttataaatatggctcatctgctcataactgttagacccacccaaatgttattagtaacctgagtgtttatgcttgcaaaaatgtatgttattattgtctgttttattatattaagtggtgtataaagtattctgttgtgtttttatgtttctcaaataagttcccctttaaaaaataaatatctttaagtttttaaaacta

SEQ ID NO: 12052 - DNA, 7713 bp, Homo sapiens
ttttttttttttttggagacagattctcgttctatcgcccaggctggagtgcagtggtgtgatttcggcccactgcaacctccacctcccaggttctaaagattctcctgcctcagcctcccgagtagctgggactactggtgcatgccaccatgcccggctaattttatgtatttttagtagagacagggtttcaccatgttagccaggatgctcttgatctcctgacctcgtgatctgcccaccttggcctcccaaagtgctgggattacaggtgtgagccaccacacccggccacatatgaatatctttaagattaaatgattctttgactttatgaggtcactatcaagatacgtgaagaaataaaatattttatttttcaggatgttatttctgacctagtatgtttctgtgtttaagcattcatatttatatctctatggcactttttttttttggacacaggagctggactgagcatcaaacatgtctgtgagctggcaatgagtcacctaagtacttttttgtatcaaatctatgatgccatcattcttaagatgcacctttattttatgaaatagtaagaaacaaaaaacactatgggacaccatcaaaatatctgatttcagagaagttacaataataaaaaatgtgtatcttggaatcaatgaaatgtggcaattccagttatctgaaagtcttacagatataattacactgagctcttattacgtatcaagtaccatgctaagtgtttttacatgtattatctcatttattcttcatagaaatgccatgaggtagatgctgtcttcattttcattttgtacagggaaacaaggtacagaaaggttcataaccaaacaactagtaagtagaaaagacaagatttgaacaaagtagtctgacttcccagtacatcctcttaatttatccttattgcctgagaaaaagcttattagtcccttcagaacagaaaaagtggtccctggcactaaattcttaaggaaatctatcaagtaggaggatacagagtgtccttattgccagataaagtccagtgttgtgctatatgtaatggagagtcaccagagggtttttagcaagggagagacacaattggatttccaagggtctaatctgatccaacaacagaatttgtaatatctgaaaaaaatgaatagatcacacattccttagctagtctttcctaaatttcatttcacttatcattaactttcgtgtgatgtctgaatgcatttgaagtatctttgaaaggaacatgccacatattttggccaaccccacatcttaccctcgtgtagttcgtgctgttactataagttgcaaagctttggcctgcagcctcatgtgatgtataatcaccacctgcttattctccacaccactgtacatgaattccattttgtaggtctcttccataatctataaaggaaagataattaacgatcaataagaatatcatagtcttacttgagagcagcatagaattctactgttaaatgaccttaggtgaaactcttaactgagattttacatccttagtgcttttaagtgttgaaagaaattagtatagtatgccttgtaaaaagagaataaattattttgcctatttaaaaagaagactgacctggtaataaaatcatcttagttgatgatgtgaagataagaaagtttaatcactaagcaaactgcaaagcactgaaagcactgcttcttaccctaaatgaagcccactctgctgtgggaacaaattaatatatattatgtatggaaacccaatccccacaaagtcctcaagaattaagcatcaggaactattaaccatatgttagttatcctgacagactgttccatgggcctggtctgagggagtttgggacagaaataagtgcaagaaaacatttgtctatgaccccagatcaagtccccgatcttgctcggttctatccaaataagcgattttcatcaaaatgatgcttctcttttccttctgtgcttgcctcccagtgaacactctagggtcacggaaatgactccagactctcttacaattggcaataagacaagttaaattacatgagtgtctcaatccctttctgtaaacagggaagaaacagtaccaatatcatgaagtttcaagtatcaaatggagcatgcaatgtgtttatcacagtatctggtatacagcaatggtaattcctttcctcttttccttccaaattattgctccctggtcccatccttccaatgtggctcaattatcgggttctagtcattaaattctactcttctacaataagccacataccaggtctgagaaagagtctggatcagacaagagttcagcactgtagtagaaaacagattctgggtatcagaggatctggtctcaagtcctgactgtattacctatagctctatgaatttaaccttgctgagccttaactgcctcatctctaaaacagacttaatacttattcctatctaatgggattattatgagggttaattaagctaatagacttgaaatcatttagtgaactgtaatgtaacaataacagtcaccatcattagcttcctcctgggtcatttacagactccctatctggaagacttgacctgcaagagatcaccaagtctcaatactcaggtgcaaaggggaatgactcaaagctaaaaagaaataaactagagacaaataaaattaaagcctacttaatgaactacccaggaccttttaacgttgaagagatggtacaggctaaagatataaacaaccttaactgagttgggctacattttcagatgaaagattcatgatagtagagacagcgtttcaccatgttggccaggccggtctcaaactcctaaccttaagtgatgtgcccatctcagcctcccaaagtgctgggattacaggtgtgagccaccgcgcccggcccaactgccacattttatagaagagaaaaaatccagggaatttaagtaacttgctcaatatcactcagcaaatcagaggaagacctgggactaggacccaggtcccctgagtccaaagtgagtgctgtgtctcctagttatgctccttctcatatcactaacttctgtcatagcctgaaattagggaggccacagcagaggtatagagctacaggaaggcctctggctccgccttggaccagacaattcctggacagagacctatttgaagggaaggtctgaataagcttacctgtgttgctgctgctgaggccaaatcactctgcttcaaatacaaaggggcagctacatgccacaacttttcctgcaaggcctacacagacagagctataggaaggcctctggctctgtcttggaccagacaattactggacagagacctatttgaagggaaggtctgaataagcttacctgtttcgctgctgctgaggccaaatcactctgcttcaaatacaaaggggcagctacattccacaacttttcctgcaaggcctacgcagacaaatcaggagggaacagaataccgaggtcacaaagactggcctatcatttgggatttacatttttgttttcctttgaaagtctcccatgaacaggacttctcaattgatcttattcttttaacccaataagctgtatctattatggagaaagatgagaccaatggtttgggctaaatgaattcccacccatttgatccaattcttggcccaaaggctctgtgtcccagatcagtgcttctggaagcagaggacaggaaccacgaaagcttcaccagaatgcgcaggcaagccagcttccgggctctaggcactccttgttcccagagctactggactaacccaagccacctagatacttcttccttaactgtggttcttttttcttttcccctatgctcattatgttgtaagccccaaccactttatcaacatattcaactagaaatcaagcagctttcctagatttctccctctttcaatctttctacattcaaaaccaccactaagagccatgattttaccttccatctctctcctcacctatccatccacatgacctcatcccttgcacaaacttctgtgacagcctcttattttctcagtccttctgaattacagatgtaatcaaatgacattacagaaaacctagactaacactgtccaatagaaatataacatgagctatatataattttaaatattctcgtagccacggtttttaaattacaaagatgtaagttaattttaagatacaaagactaagttaattttttaaaaaagtttatttaacccagtatatccaagatattaacatttcaccatgcagtattttttaaattattaattagtttacattttctcttcatactaagtctgagaaatccagtgtgtattttgcacttaataacacatctcagtttggactaacaacttttcgagtgctcaagagtcccatgtatctggtggctatcaaattaaacagtggtaggtctaaactgtagataaaaactataggaatttctggaatatttacttctaatcatttcttgtatgcatgttttttgacagttgtagtcagaaagcagaattaagtttggggattagatcataatcccaaaacatacaatcccaaatgttgaaatcctcacatccaaattctggggaagtgattagcgtgttttgggttgtatgcaggatagttgcatcatgttagttgtatcatgttaggcacaactattaccatgttattgtctttatttggaaattaaatatggcttaaggagatgcgtatgagtgccaagctgacaaggggtggacttgtggacctaattttagatatcagcttgactagattaaggaatatcagaaacctggtaaaagattattttgttttacacattgagggtgtgtctatgagagtgtttccagaagagattagtgtataaatctgagtgtactaagtggagactatctgccctcaatgttggcgggcaccatccaatcagccagtggccaggagagaacaaatacttaagacgaaatgggctgggagtggtggctcatgcctgtaatcctagcactttggaaggccgaggtgggtggatgacctgaggtcaggagatggagaccagcctgaccaacatggcaaaaccctgtctctactaaaaatacaaaaattagccaggcgtggtggtgcacacctgtaatcccagctacttgggagactgagacaggagaattgcttgaaccccaagaggcagaggttgcagcagtgagccgagatcacgccactgtattcagcctggatgataaacggagactttttttccaaaaaaaaaaaaaggcaatatagcaaaacggactctctgggttctgctgcttggatatcagaaatctgactccatgaaagtgcatcatcacaatactgactttgtgtataagcattgagtgtgtacacaaaatgttgaaacttcctcgataaatgagatatccttttcgtacatctgcatttgtgaaagataaaatttcttgagatctcaggctctttgggtgactgcatatgcagtggtgacccagcacagtttccatcaatctcgtcaaaagacttgaggttgttgggcacagtatttcagatgaccacagttaaaaagctgggtatacacaattaacaaccaaagtgatatgcatttatacctttccctttatgaccaatttctttataaatatggctcatctgctcataactgttagacccacccaactgtcattagtaacctgagtgtttatgcttgcaaaaatgtatgttgttattgtctgttttattatattaagtgatgtataaagtattctgttgtgtttttatgtttctcaaataaattcccctttaaaaaataaatatctttaaattttttaaattatttcttccataattatattttggggattttgatattttctgggctgtggtttttgggattttagaccttagggattttagtcttttggaatttaaacagtttaggactatgatgttctggactatcttttgggattatgattggctccccttcttttgggtacataacattacaccctaaatattttgtcatgttgttgtataattcttcataaagaattactgactacagaatatactgctaggtagctgtaccaaaatttatttagcttttttcctgttattaaacacacttgccttgggttctggctctgggcccctcacctacactgtcaccccttgtcattgaataaccaacaattatgtgttctttttaggagtaatcacttctctttcctcacccatattttgctactatagaaaagtggattcttctccatggcctccttgaattcctggggtttcacagaggcttggaaaagccaaacaaccttgcaaaggggcaggaaggaacttcttggagtgatgaaaatgttctacgacttgcctatggtggtgattacacagatatatacattagaaagaacatatctagcctaacaaggaccatttaagtgccaagtatacatacgcacctttacatgtataggcacacctgcacaactgtaaatataacatttagcacaagttcacacagtagaaaataacttttgactccctgatttactctgactttagccaaacatcattaatcactttgaaaacaaagaacactttgaactagggccaagataaaagttcgtcaagtgagaagggctctcctaaattctgtgccaaaatttatagtaaaattctgctgcagaagctgaaagatactgaactcatttaattgttttttaactcagcaaaactaaatagattcttgggtaccaattctgtgtatagctgactactgagtaagaaacgccagcaagttggtctttttaaaagcaatgaaatcaaccttttaactttgatgaagtgcagtgagtttttttgtttgtttgtttgtttgttttctttaaagacaggatcttggtctgtcatccaggctggagtgcaatctcactgcagccttgacctcctaggctcaagcagtcctcccaactccagccgagtagctggatatacaggaatgcaccaccacacctgcctactttaaattttcttgtagagatgaggtgtcgctatgttgcccaggctggtctcaaactcttgagctcaagcgatcctcctgccttggcctgccaaagtgctaagattacaggtgtgagccaccgcacctggccttcaaatgagcattttaagaaaatagtctaaaacttcatacaattcctttgctaatcaaattatacaaaacatttacaaccttgggattctaactaaaatgattatccaatctgctctaattatattatgataaaagaattctccccaaatttacaaattcctatgagttaatatttcgttaattagagacaaatgtaatcacactgcagagtacatatttctccattgtcaagtggttgcattaagaccataagttttataacttatggcctcacacactgctggatccacaaagatgcatttttagcaacacaatcataaatggaatggatgcaaaccaaccttgatgagaagtagttgacagcgaagataggtggcagagaaatcagctactcctgccaattcagattgaagttctccaagtctttgcagatccct

SEQ ID NO: 12053 - DNA, 1495 bp, Homo sapiens
tttttttttttataaagatggagtcttgctctgttgcccaggctggagtgcagtgatgtgatttcggctcactgcaacctccgtctcccgggttctagagattctcctgcctcagcctcccgagtagctgggactactggtgcatgccaccacgcccagctaattttatgtatttttagtagagacagggtttcaccatgttagctaggatgctcttgatctcctgacctcgtgatctgcccaccttggcctcccaaagtgctgggattacaggtgtgagccaccgcacccggccacatatgaatatctttacgattaaatgattctttgactttatgaggtcactatcaagataagtgaagaaataaaatattttatttttcaggatgttatttctgacctagtatgtttctgtgtttaaacattcatatttatatctctatgccacttttttttttgacacagcagctgaactgagcatcaaacatgtctgtgagctggcaatgagtcacctaagtacttttttgtatcaaatctatgatgccatcattcttaagatgcacctttattttatgaaatagtaagaaacaaaaaacactataggacaccatcaaaatatctgatttcagagaagttacaataataaaaaatgtgtatcttggaatcaatgaaatgtggcaattccagttatctgaaagtcttacagctataattacactgagctcttattacgtatcaagtaccatgctaagtgtttttatattgtattatctcatttattcttcatagaaatgccatgaggtagatgctgtcttcattttcattttgtacagggaaacaaggtacagaaaggttcataaccaaacaactagtaagtagaaaagacaagatttgaacaaagtagtctgacttcccagtacatcctcttaatttatccttattgcctgagaaaaagcttattagtcccttcagaacagaaaaagtggtccctggcactaaactcttgaggaaatctatcaagtaggaggatacagaatgtccttattgccagataaagtccagtgttgtgctatatgtaatggagagtcaccagagggtttttagcaagggagacgcacagttggatttccaagggtctaatctgatccaacaacagaatttgtaatatctgaaaaaaatgaatagatcacacattccttagctagtctatcctaaatttcattttacttatcattaactttcgtgtgatgtctgaatgcatttgaagtatctttgaaaggaacatgccacatattttggccaaccccacatcttaccctcatgtagttcgtgctgttattataagttgcaaagctttggcctgcagcctcatgtgatgtataatcaccacctgcttattctccacaccactctacatgaattccattttgtaggtctcttccataatcgataaagaaaagataattaacaatcaataaaaatatcatagtcttac

SEQ ID NO: 12054 - DNA, 952 bp, Homo sapiens
ttttttttctttttccttttttttgagacagagtttcgctcttgttgcccaggctggagtgtagtggcacaatctcagctcactgcaacctccacttcctgggttcaagtgattctcctgcctcagcctcctgagtagctggaattacaggcgcatgtcaccacacccggctaatttttgtatttttagtagagacaaagtttcaccaccttagccaggctggtcttgaactcctgacctcaggtaatcctccctccttggcctcccaaagtgctgggattacaggcatgagccactgtgcccggcccccatgcctttcataaatatataaatttcattcctatctccataacgtctcatcttcctgaactggaaaacgcttctttctctcgcccatttgttatctctttgataatttcaacagctcttttcctataccatctctaccattagaaggtaccccttctacaaccactgcattcaaggcctattcattttcatacttcgagacccagttaaaacagcatgtcttccatgacagtttcccacttgggtttattcactctgtcttctgagatcctcaactccatttcttctcatcctactacaaatatttgcacattttcactaaccttacctgaatgaaactccatggaacatttggttcatctcagtattgctactgcttagaaatactgagacttggcacagagttaagttctcagtaaatgctggatgaatgaatgaaaggatagaggtatatgggtcaggaaaggaatgctttgtctttgggagcttcagtgctaaaagcattgtccttgtgcagaaacataacaggtggagcccagtaggttgggctggtagttcccaaactctaactcccatatcccctttgctgacacagaggtagttcaagaagctaccatcctttaatgctcaattcatctttgtt

SEQ ID NO: 12055 - DNA, 1531 bp, Homo sapiens
tggatacttgctgctctactgctagactctcctcctctacaggagtcaggaatgaattcctggccattgcattaatccctttagacccaagcatgaattagctgacctgtggttatttccccttgccctggctgccaggctgctggcaaagtgaccatttgcccacttacatcctcattatgggaggtagagccctcccgatgcctgtgctgattccctccgtgtaagaaggatgcgtagttgttggtagtcccacgaggcaaatagctacactcctttgcctggctctctggattctgcctcttttgtttttaccctctctgtgcttatggctctacccttctccaccttccatttcgctcagtttggtttccttactctctctagaccatgtctttttcatttccatgtacttaccattagtcatgtgtgcctcttacctaaaagtgtgtccgtctttcatttccttcgtaaatttaggcaactatatgagtattcctgggttgttttggattgagtgagccttaagatatgacagctctagcacacagtaggtactcagaaaatgttagcctctgtgctggactgatttcatattttaccccaagtggttcatgtaactagggggagttttgcttcacactattaaatccactttaaagaattagtattcatgaagcacttagaactgtgcttggcacatagtaagcactatgtgtttgtaaaataaaacttctaccttatttgactttttaaaaattgtaatttatttttatgagaataatgcagctctggttttgttacctatctcaaaaacttacttataaatgggtacagtaataatttataaaaaagaaaatgactttacatgttgttcatatgtgtactttccaataaagtcttggaatatggtgacaatttagaaatatgtggggttctttttttaaaggttgtactgatgaactctcattaaaaggaactgctatattttgttgtttattgtagaatggaagctacaaaagtattcatgcaatggccaaagatatagatctcctcgcaaaaaatgccaaaacttataatgagcctggctctcaagtattcaaggttagttttgttgttgttgttgttgttgttttccttggtaatagtagataatttaaggtcagtaatttttataaaacaactttattgagatataattcacataccatggactttacccattaaaagtgtttaatttaggctgggcgcagtggctcacgcctgtaatcccggcactttgtgaagcctaggtgggtggatcacgaggtcaggcgttccagaccagcctggccaacatagtgaaaccccatctttactaaaaatacaaaaattagctgggcgtggtggcaggcgcctgtaatcccagccaatcgggaggctgaggtaggagagtcggttgaatccgggaggcagaggttgcagtgagctgagattgcactccagcccgggcgacagtgcaagactctgtctcaaaaagaaaaaaaaaaaa

SEQ ID NO: 12056 - DNA, 195 bp, Homo sapiens
ctggatattatacccttatcatgtaaatggtttgcaaatattttctcccattctcttgtcttttcacttttgtgattgtgtctgttgacacacagaagtttttcattttgaagttcactttatctatttttttctttggttgctaatgcttaagtgtcatatcaaataaatcattccctaatccaaaatcacaaa

SEQ ID NO: 12057 - DNA, 1967 bp, Homo sapiens
tttggacttgcattaccctatgctccacctctgtattcagcagaagtgtggttgccatctttttcactttatgtaaaggagtgttgccctcgggcccttggcagattgccaccccagcacctaggttgaagcacctggtttataggccctatctttccctacccctaaagtcagtccctaaggacaatttcccagctgatggggctacacagtagttccaatacagagagttctggctaagattttgtttgcttgtgtctggatgttgaaaaagactgcccgtatctcttactccttccttctctgtgagtattgtaaaaatggctgttgtgatcactcagctcagcttttgttattggtacctcctaaagggaaaagtgcaatattcttgcatcttcagtagtggggaacaggatgtattgttccggaaacactgaaatacacagcaacatgtgagatgttttaagtagatcacttaggagacagtggttctactacatgttgcattattacaaaatacatttgctacaggagatataaatcttatggttgtaattcagagtttaaaaatgttataaattaggttcttgggtcgtgatatgaattgttactaatctttgtgactatttaatcttcaaatattgtgcttaaccccagcaatccgcacgtatcctgcaccccaccccaaaagagtcatctgtattttaatgccactggtcttatcggtccttttgtctgttgagaccagtcatgacagcattcaagattatgaaagtgttacaatgccgcttcaagtctgcaaaacctcaaacgtagccaacttgacaaatatttaagtgttacggcagatttaaaatccatctggcacaccgtggtaggtatttgtacagttcttttaattacacatagctttaaaccatcaacctgatgagtttaaagcttttgcacccatgccttcacttcagaatgaacaccttcattgtgatcttatgttaacctgagaattgatttaaaggaagattgataatcctatactttataacgtaaaaatacaggggctacaggagggtacctaattagacagttctccaaacacagaacacacactggaaaattttccggccaattttgctacctcccaacttgatggattagaggtagcgcaaatgctggtgctcccatctaccttgtagacacttagccatcaagaatcaaggcacaagaagtgcactctctcattaacagtaaatgtttgcaagatattcagtttaactttcagcatcatgaatgttcttatccagattttgaatccgaaaaactataatccttttatgttatacaaaattactatgattttttacagttctgagcatattaaaattctactggatttcaaaaagagactaatacccaactgactaactaaacaaatatcaacttgtaatactcaatgaatttttttgccatttacatttgaccgttggctttagtgaatgtccatatttaattttttaaggcaccattacacagtttatcctacatttatcacatttcttaaagtgttaagattctatggctcatttctatgtatttttcttactttacaaaataacctgaaacagtatagattttgtaacacttaatttgagcagcttttttattacattgaattatacaaagtgcatgttaccttagaaaaattaatatttgctgctttactcttttgcaaaacatttgctgtaatgaatggatttgtatttccaatatgtatcttgactgcattttgtaatatttactgctttattcctaattctgctttaaagtactgaactgggcatgaaacattaaaatattaatccagaaactgtataaactggatgttgcttaaaatctgtatcactgccatgttgaaaactcagactgcttttgtgatgtttcaaatgaataaaactatcctcccctcgtta

SEQ ID NO: 12058 - DNA, 3201 bp, Homo sapiens
tcagaattaaatcattttatttttgccacaagaagctctaagaactaatatcaggccatggttaatgaaaagtagaacttaaagtcatgacagggaagattgtacaagtgtgaacattacagtactcggaggaatgaacaaggtttcatatagttgaccagccagaaagccagtgctgttaagttagcatttaattctttagaatatgcatgccttgacaatacaaaataccttgatcagtgtttaccatttttttatctttttggtacaatgggggaaaaatgcggcattatttcttcatagtggttgtgtgtgggggatcgttaccaccaaaatcataataatcatttaaagtatattttaaagttagtctcgcaagattgttatggcatttttaaatttctgtagtttaagcattttcattttgtcatatcttttaacaaattactatttcaagtagttcctatccagaatatttacaggtaatttagcataggagcaaatttgaagctaacttcaaacaagaaaaggaagttcaatagccagagagctaagtataagataaaaaaacaatatggtaattttaaacagcatcttgctacagatttccaatccaataaataccaggaatgaaggacttttgccccaaagaagtatttcacatgaattctgaactttggatatggaaacttatagaaaaactgaagaccctgagacacatgcaagtaagagtcttctggcaaaaatacaatttaattttccagtttctctcctcccaaaaactccagaagatacctttagtaggcacagagtttaaatgtcatattcagaatttacagagcacagcagcagcagcaaataattacatacctattattcagaatggatagttttccattatagaattagttcctggtttgtcataatagacttgtagaatctgccaagttttattatgacaaactaattgacctagcagttgagtctgaaagatctggaagctctgccggcatccgtatcattcacatcggtagaagtaattatgtctaactggtgaaatagcattaatgaaactcaaaacaaattttcactgagtacatttcagagtgcacactatagtcaaagagtaatgttattaatatctacacaaaaaagaaacatatggtgattccagagatcacagagtcttaagttatcaggtaatttcaaatttcccaggggttagtttacaaatggtttgaaggtctagacttacagaacagaaaacagataaatgcacatcactctacctcttggcaagcaaaggattttttttcttgtattattgcatgaactgatgcctgataccctcagctaccaacttaagaaacactgaaaccactaccttcaaatccagcttaccatcagaagaacgatgtatacatgagaaattatgattaaagctttaagttcaaagtcaagaaatagactatattttaaaatacatggtcaggagaaagaaaatatctatgttggactaagaaatacttaagcaaggttacaaatgactaataactatgcacaacaatcttttccagtatcaattttttcctttgcaaaaaaaaaaaaaatcatttacagacgttcaacaattctgttataaatgctaggctatatgtatgttccaacctgttttcttttagtactagcacagtttagtactagcacttcagtaagtgttaactttattttctaagtgtttaaatatgtgtcatttttaaaagtggtatttattgttgtcaagaaaaatgggaactgacaagcctatataacattccttatgtagtttctgattactataatattgcagcaatttgcagatggaataaaacttattttagaaggggtaaaaacctaacaaatcttgccgaaaggaaaatactagatcactgattcaactatttcaaataaagacttcctagtggagattctacgcaatatgaacatttaaaaatatatgccagtagcctcccacccaaaatatgtaaagtctcacccatggaatctatcatttacaaggatttatacataaagatacatttggtggctttcagattcaaaatttgaaaattttcatgttcatgggaatatttttaaccttaagaagccaaaaggaaatcttcattccattctctactatgtggtagccagagaattaaaaatccatgcaacagaacttttcatctcctcctatctgccattacagagattgttttcattagttttttgcccccagagaccacactgcgaaggtataaagtggtctagccaccaaagtcttttacagactatggcaatgaaagccaggattaattctaattagctaaatctaatttgttcttcagatgagagacttgtctgcatggctattttcatagagggagggtagcaggaggttgctgttcgcttggactagcagattacacaacccaagtactgacttattctgacattttccagaacaactctaaaacttatttactctttatgccatatacaagacaaaacacacatttattgtctcaatgttaagaaaattgagaattcagcagtaaagtgctaacatggaaggggaaagctgtaagatgtactagggtatgctaataactccagttattttcaaagaacattcagactgcttcaaattctattcaggaaactatctctccaagcttttaatttttgcctcttttaaatgagctgaaaactaactatataaacagatacttggggagggggtctcacctctactcaaaactttcaggaaaatttgcttctaaaaattatcaacaaaaatcccactacacttccttcagataatgtggcagatcaaattaacttgttcgcaccttaatttgttttacagatcttctgaaacccctgccccatcatccaaaacaaaactttctagtatttcaaaggagtttagtaagactctggtattataaattcaaactcagtactgccatctgttacattttgtttaaaaattgaatcattttcctgctgaataaaaatatcttcccaggtcattggcttgttctgagtagatgtagtggtccctactggaggttcttttccagtgtcaaccttatacccaataccatcatccttcattgcaggaatagtgcttgatctatcggaaagatatgcatattgtct

SEQ ID NO: 12059 - DNA, 8835 bp, Homo sapiens
gaaaacctttttatatttctgtacaaacttttcattttaatattgtgacaccaccatgcaagttctcacacaatatccgtgtcttgtagagtagtgaagtgtttgttaagtagaaaaacacaccagtgtggtacccagtgaaaggtggtgtctggagagtcagtggtttctggaactctggactgtcaaccaggaagtgttgaagtgactgaaaaattaaagcacatgggtaatagcatgggcagagcagagactgagacgatctatgtccatgccaaaggaagcatcctagtaagtttctggctatggcaagatgacaaaactcggtgtacgttttatctggatcacttttggagcactaaagcagataaccaactttgtgctaacatacatgtgctcaggagagcctgattttaagactgacttcaccccattgctcttgtgttccagaaccttcaaggaacatcacctaccagatccaagctttgccagcttagctttcctcatgatcagctcctatctatctatcaatcaatcagctgtcagttccacccatgtgcccaagtgctcttcacaccttcacacctgcaatgctttcctgtgcagcctaccttggaggtcccactcaatgctccacttcccttccagctcctttgaagactcagtcacacatgaaatttggcatttaactttagtaatatactcacaagtgtgttactagtgcctacctcaccttcaccagcctggagaaaaggctattttcagggtaccactgttgtgcagctgagccaagtcttcctgctctcaatcaatcaccctgctgctcttggctgccctgcatcacagccctctggatgatatgctcattgagggaggggccaactatatacaaaaaaatacacgtttgctgaaattactcctagatttctagatgagtatgtaaatttttctgctcccaaagctctggcatctagtttgagtcaatctgagctctataacaggtgaagacatcatattagtttgcagactagactatcaataggagaaataggacgaaagcagcactttaaaaatggatattaaactaccacgatcttgagcaaacatctttatttaagaaatcaaatagggtaaaaattatgcaatttcacacaaggatacaagacaaagcttagaattacttgctcaaaagttactcagaatggaacaaaattgttcaagtgctcccaattagcacaggctgtattacttgcttttcaatggacatttactattttacattaagatctacttataggaacaaagagacaattcccagccccctctggtgtatcacctaaaagactgaatacaaatgttaatgtaatccaagcttttctttgacaacaatactaaaaattgccttacaattttttacaagtacgagtatcaacagtttactgtctgagggaaaggaaatataagaatataaagtgacagaagcaacacacttcactgtggcctgcaactgctcccagcgtcctattttataaacatgatttgggttctcacattatagcaggatcactattcctagcctctggtggaagcagacatgtgacacttagcactgcacaagtgtttctttggcttcttgagtagtgctgtgtatactgcctatacatttttataacatctctaaatgcataatgtcaacgtatgtgctatcacatttcactcccaactgcagaatattttaattttaaatttatctaccaaatcttgactatgacatttatttttgggttgttacattaagatcaacctatctgggccgggcacggtggctcacacctgtaatcccagcactttgggaggctgaggcaggagaattgcttgaagtcaggaggcagaggttacggtgaaacaactgccattgcactccagcctggacaacagagcgaaactccatctcaaaaaaaaaaaaaaaaccccaaagatcaacctatctgaattgggtaagtcaaaagcttattcctggccgggcacggtggttcatgcctgtaatcctagcactttgggaggctgaggcgggtggatcaactgaggtcaggagtttgaaaccagcccggccaaaatagcgaaaccccgtctctactaaaaacacaaaaattagccaggtgtggtggtgcatgcctgtaatcccagctactcgggaggctgaagaaggagaattgcttgaacccaggaggtggaggttgcagtgagccaagactgtgccactgcactccagcctgcacaacaggagcaagactccatctcaaaaaaacaaaaaacaaaaaacaaaaacaaaaacccacaaaaaaccaaaaagcttattcccaatttttaagtaaaaatatttcatggccgggcgtggtggctcacacgcctgtaatcccagcacttcctgaggtgggtggatcacgaggtcaggagttcaagaccagcctgaccaatatggtgaaaccctgtctctactaaaaatacaaaaattagccaggtgtggtggtgcacgcctataatctcagctactcgggaggctgaagaaggagaattgcttgaacccgggaggtggaggttgcagtgagccaagatcgtgccactgcactacagcctgcacaacaggagcaagactccatctcaaaaaaaaaaaaagcgagcttattcccaatttttaagtaaaaatatttcatggttgggcacggtggctcacgcctgtaatcccagtactttgggaggccaaggcgggcagatcacgaggtcaggagttcaagaccagcctgaccaatatggtgaaaccctgtctctactaaaaatacaaaaattagccgggcgtggtggcacgcgcctgtagtcccagctacttggaggctgaggcaggagaatcgcctgaacctgggaggcggaggttgcagtgagccaagattgcgccactgcactccagcctggcaacagagtgagactctgtatcagaaaaaaaaaaaaaaaaaaaacatgattattgataatgaactctttataaataacactgttcacaaggaaataccaattgatctattgatacgtgacatgagacagaatgtactatttttaaatataaaaggaatttcattaggtttagataagctgagaatacacaaaagttttccaggctatttaatcaagtaacttacaatgtacacattcctgagtatacaccattgtggtgacatcatttattttggaattttctgcattcagcttaaaaggtgtttcttcccaagaaactgaacttttctgtcaaatgcacttgatcgaataggagaattgggttcataaaatggattcattgaaaactaggaaagaagaaagtattagtgaagcaaaaaagctgacaaatcttaagtttctgaaaggaaatcattttaaagttttaaattaaaaaccaaagacattccaaagtctaaagaccacatttttaagttttattgaaaatgctgcattgttaataacatcctcttaaggaaatttttattttggtgttttggttttgagaagtatctgtggcaaaactaatggcagtatgataaatgttgcctgtgtcagttaactttcagaatttaccgtgtgtgtgaaatactcatattcattataaataaatggattaatctctatggccctttggctacataaaacaaaaaaatctgccatgtgctcagagttcagaaaaagctattcttgtgtggtaatcttttaacaatcaggtttttaatactctcctttaacacaagactgctaaatgatcagcttctcaaattagtgtatcataacgcatgacagaaaatcattaaatggaatcactaatgaggaaaggcattgctgatttttataccttaatcacttgacattgttcatctttataagagggctaaatattacttactacctctgactaggaatactgttaaattgtattactgtgctgatatgcaagaaattctgtccaaatacagaacttatttaaattattaaaaacatatgggccaggcatggtggctcacgcctgtaatcccagcactttgggaggccaaggcgggtggatcacttgaggtcaggagtttgagaccagcctggccaacatggcaaaacctcgtctctactgaaaatacaaaaattagctgggtgtggtggtgcacacttgtggtcccagctacttgggaggctgaggcaggagaatcgcttgaacctggaaggcagaggttgcagtgagctgagatcacgccactgcactccagcctgggtgacagagcaagactgtctccaaaacaaaacatactattgttatcactgcagtgtaaccatgacgtcctattattattttatttttcaaaatcaagaaatgcaagtggcgccattcttcttgagtggctatttgatcatataaaaatcacttcctgccagtttatgatctctattgcactgtaacttatttgtaaagtagatggaaacattttagattaaattatgaagtaattttcccttatataggctgctttcttgctgtctttagggatccctaataaaatcagctatgaggacaacaaggtgaagaatgaaaccaatttaccttcacaatcatctaaaggtaactaccatgaagttgtgttcctaaatacatattcacctggctgtgaagacttacctgcggagggagttgccagagatagttctgatgggggaaagctagtctgaaaggtaaactgcagcctaagggagttacttcaataggccagtttcctgacaaaggtcgaatcctttctcatcagaatttaaaaattatagaacataccatacctttatatataaatcataaacatcagtaaagaagttctttattccatcttcttgtcttatgtcatgaagcataataaacctcatatgtgaaataattaaggcataatctttcttagaaatgaaaaacaaaaagcaaccagttcgttgatacagtattcttcaaattagtcacatgcagtgtatttgtgatggaaaagttgaatatataaactgggtttaaaattagcttagttttatcataaagagaacataagctttcaaagttagaaaataactgtaaaataaagtaaaatcacccttgatagggtccagataaactctttttgtgtatgagacttagttttaaaattagctattaaacaaaatgtttttcccccctaaaaaaagaaaagtagccccataaatggaaacttacattttcacctgactgtgaagtctacagactcagagcctggcatctatgttccatgttcttctggtttgtgagcccaaactttagttagttacctttactaagaaggtaaggatatgccccgcagtgacaaatgccgacacaaaccactcgttgaacttgtccacagttttcaagtacatgttgttcgatagccacatgttctcatctacgaggtcgagagcagcatgagctatgaactggttcagatgacgatggtcgtcctagatgacagtgtgagcaaccacagattaacatttgcatatggcatcgagaatgctgacatttcattctgtaaattctatagatggttttcttgtggggaaaaaacagtttgcttttatactttgttattgtcatgagacttataaaagatctgttttcatattatattctatttttaaatttgatatctacatctcaacagaaacagccaattaataaatgaaatgtgtatatagaggatttatacaaaatcatttattgaaaatctttttcatataaattttttttcatgtttcaagaaggaagttaccgaattctgtaaccatctaaacatgtaaaaaaaggatactatgttaaaaaaaaaaaaaaaaaaaaaaaaaaaaaacaagatcctgtggagaagaggtgccattcacactaggcctcaaggtctgggaggaaactgagagggcggggcttcctgcacagtggcaccaggtaagcagtagagacagttgaaatggcgcttataacggcctgccagaggcctctttccagtgcatggagcttacatgacagcgggacctaggagtagtgggaggtgatgctcagccccagctgtgagcagtcgcctgtgtcaatagcaggacacagtcctgtcagagctgggagtgtccttttcctgggctgaaatggcttaagtgaacagaaggtgggactgtctgaccataatgtgaagacggaattcagaacttggaatgcagtcttactccaatgtagttctttgaaaatacattttttggccaggcgcggtggcttatgcttgtaatcctagcactttgggaggctgaggcaggtggatcacctgaggtcaggagttcaagaccagcctgtccaatatggtgaaatcccatctctactaatacaaaaattggccggctgtggtggtgcatgcctgtaatcccagctactcgggaggctgaggcaggagaattgcttgaacctgggaggcggaggctgcagtgagccgagatcacgccattgcactccagcctgggggacaagagcaaaactccgtctcaaaaaaacccaagccatttttcaaagaatacctgttatgggttgaagtgtttcctctctaaaattcctttgttgaagtcctaagcaacagtacctcagaatgtggccttatatggaaagagggttgttgcagatgtggttagctaagatgaggtcacactggagtagggtgggcccctaatccaatggactggtgtatttagaaaaagggaacatttagagatgcacacagggagaaaaatgccacatgaagactggagttatgctgccacaagccaaggaactcccagaagctgggagagaggcctggacagacccttgtctttgtgccttcatagggagcatggccccactgacaccttgatttcagatggtggccctcagaactgagacaataaatttctgctgtcccaagccactcagtttttcgtactttgttacaacagccataggaaactgagacggcttccttgccaaggaggctgttctcatgcctgggctggaggagggcggcccgttgccgtggaatcccatgcatagttaaagcatgttttacttcactcatgttgccatgacaaagctaagtgaatccttagagaaatggatgtttttgtgtctggctcacagcagtgttttcttttacaatgatgatcaatcctgaagaattaggagcaaactgaaaacgctttaagaaagtgagtggtagcaggagaaagaactaaaatcaagttatgcaacaaagtatttttatgtgtgctttgtccaacacaagggcagtggagtgcacagaaattacatacaagtagctgcatcccacaaagcagtactggtacagagatacctcaaaaacaagttttaatgagtagtgttctcataatatgagaaaataatgtcacaactccacctcatagagaatcccgtaaacaaatgcctatcttattttggtggcaaggcctgaatagttgaaaaataccatatattatgcattacaattaacttaaaacatcaattccttaaaggacattaaagccaatttttggaggttgggagaaacatagcaaacttgtcagcaatttattagaaacagaaattggaaagaactgggctcttctcgtgtcaaaactctacaggtctgggccaggtgtagtggctcatgtctgcaatcccagcactttgggaggccgagggcaggcagaccacctgaggtcaggagttcgagaccagcctgggcaacatggcgaaaccctgtctctactaaaaatacaaaaattagcctggcacagtggtgcgcacctataatcccagctacctgggaggctaatacaggagaattgcttgaacccaggaggcagaagttgcagtgagctgagatcgtgtcactgcactccagtctgggcgacagagcaagactctgtctcaaaaagaataaataaataagatccaaatggttttattttaagcatttgggatggtaatctttcttaaaatatatggtccatttccttgtctcaaaaaaaaaaaatactctatgggtctgaatggcaatatgtcctcgagctaagcttggtttttggaaccattcttgacaagcaagttgggtggtatcacctctggtgctgcttttgagcttcctgtgtatggccaaggtgtcactggggaggggagcatacaggctcaacccagccaggaagtgctgcagaaggcccctgaagtgaggtgctgcagacccagtggcagcaggaagacagggaagtaagggtcttttctaacccagtaggtcctgatgaaaaacatgattcatgaaaacagcctggactttcatggtatttcaaggcggcaatccactacaggtgaactatgtctttatgtgcttaagcaacagcaattcatggtgggtgacatagtgaactgagtatgatgggaatgccagagcgtcatgctagtctgtgctgaactaaaggatgaataaacatctccaaggacataccctggctggcttctatcagtctgtgggctcctgagcaagcctcatttaattgtggtggatttcagttaccttatctgtccagatcttccagttctaaaatcatattataccatatcattacaatagcataaaaattcttacgtactttggattctgccttcccagctggcaaaaactccatttcaaaaactggattatcatggtggccaacaattacaaagtagaagctcccagacatggtcttcaatatatggctcct

SEQ ID NO: 12060 - DNA, 492 bp, Homo sapiens
caaattgtggtcttttgtggatgaagttcatatgctgtgtggttggtgactatctgattctatggaggctaaccaaagcctagactgagtgtggatgagaccctcaactggggagtgatggggatatcaaaggacatgctgggtgagaggagctgactgtcatgtagggagtgaaccactgcccccagcagagatacagttcggttttaagaaaaaaggcaaggccaggcgcggtggctcacgcctgcaatcccaacacttttggaggtcaagaggtcgacaccatccttgacaacatggtgaacccggtctctactaaaaatacaaaaattagttgggcatcgtgcctgtagtcccagcttctcggaaggctgacgcaggagaatcacttgaacccggaaggtggaggttgcagtgagccgagatcacatcactgcactccagcctggtgacagtgagactccacctcaaaaaaaaaaaaaaaaaaaaaaa

SEQ ID NO: 12061 - DNA, 4787 bp, Homo sapiens
ggttatggtttaactcagcagaatttgttgaacaactacgacatgctggggatcatggtatgtttagagacacaaaagtgaattcaaaatcttctcttcaattattttatcatacgttccctttgtttctttgctatttgccaagccctctatttgtgtttccaccttaatgccttcacatgtgctctttcttatgcctggaacacttcctgcaaatatagatatgtctctttcactttcttcattgaggtttttgtttaaatgtcatcttgtataaaagcctctcccttatcaccacatataaaaatgagtcactgccaccctccatcccaaaactttctaatatttttaccttcccatatgtttttattcatagcacttatcattattggtatcattcattgtttacttcctgattattcttcccaagagagtataaattgttagagattaggaactttgatttattcactgctgttatctcccgtgcctgaaattatattcagcacatagttgaaaggtattcaaaaaatttgttaaaataatacattaatgacatatatatatgtgtgtatgctttccttactgatgtaacctactttctatagttcaccattcaagtgtttttcattattattatgttctgcacagttttgtcattagtcacagtctagtgtttaatccttatattttctctctcttctttaggcatggaatgcaacttgcaaaaactggctggcagcagaggctgccctggaaaagtactacctttccattttttatgggattgagttcgttgtgggagtccttggaaataccattgttgtttacggctacatcttctctctgaagaactggaacagcagtaatatttatctctttaacctctctgtctctgacttagcttttctgtgcaccctccccatgctgataaggagttatgccaatggaaactggatatatggagacgtgctctgcataagcaaccgatatgtgcttcatgccaacctctataccagcattctctttctcacttttatcagcatagatcgatacttgataattaagtatcctttccgagaacaccttctgcaaaagaaagagtttgctattttaatctccttggccatttgggttttagtaaccttagagttactacccatacttccccttataaatcctgttataactgacaatggcaccacctgtaatgattttgcaagttctggagaccccaactacaacctcatttacagcatgtgtctaacactgttggggttccttattcctctttttgtgatgtgtttcttttattacaagattgctctcttcctaaagcagaggaataggcaggttgctactgctctgccccttgaaaagcctctcaacttggtcatcatggcagtggtaatcttctctgtgctttttacaccctatcacgtcatgcggaatgtgaggatcgcttcacgcctggggagttggaagcagtatcagtgcactcaggtcgtcatcaactccttttacattgtgacacggcctttggcctttctgaacagtgtcatcaaccctgtcttctattttcttttgggagatcacttcagggacatgctgatgaatcaactgagacacaacttcaaatcccttacatcctttagcagatgggctcatgaactcctactttcattcagagaaaagtgaggggcttgtgaaacagattgttctacagatgaatctgtaagccagttacagtttgccttaactcatagacatcaatcagagagtgtcacagatttaaccttgatctaaagacaagttgtacccagagtatgtgaaaagaatgggacgacaagaatgtactggtttcttcctctaagaattgaaaggagttgaactgccttatgtttgggcatgtaactccaaaatactaggtagtataaggctttctcaatcagtgcaaaaatggaagatatataaagcaacaagttgtctgcatttgatcactggtcagattgtaaaaaaaaaaaaaattgttttggcaacattctctatgttattcttattcacatgatcctagaactttatgtgagaactgaatagcagaagatatattattaaatagtttttggaagttgtgctgttaagcaaatgtaaagtcaacagtaacaatgattaagaaaggaatataatgagttcaaagatatctatctgatatattttttatattcatcatgaatcggggtagtcttgtaatttatctaacctttttgttgtatgggtttatagtggaaagaatcttaatttaaataaaaagaacctgaagagataattcaacaaaagtagagaatatgtttgagcttgtcagagaatttaagtatcaaaatactagagagatacaccaaggatatttgaataaaaaaaaaatttgtagaacacaaaatgcctatcaggaaacccaaagcaaaacagaacaaaaagtgaatacatcgttttaaatgatgattttgccatctggtattttattatcataatttgaccaccagtgcatgaaaatatattaaagttcattagccttctgctcttgatttaatagtgaactttaaaatatattaatatcataaaccagcaaataaggagaaataaactgataatactagattcattgggatagttttcccttttggagggaaagtcacaatttttctccatgatcccccattttttgtaaacactggaataatttacaaggataactttattgtagcgagagcaaatcacatctggagtgagccttgttttcatgcaacattaccataagaccattggagtaaatgtttcaaacaaaatgtacttcatgaaattatagaacataaaaatatttatgtgcatattaacctgtattatcccaggagggttaatgaggccccatttcctgcacaaaacaaatgtaggggaaaaaatgggtgctgcattagctttttaaagtcaaacaactatcacataataattccttgatatgcaacataaagtacctatggccacatatctaagttcctttccttgatgtcattagctataaggagtgagtaatgtgaaggacaaaataagcattatgaatacagagacataaaattccactgtcccttccttttctgaaatactctgggaggtattctgatatttttaaatcccccaattttcccagttgatatctctagacttcaagcaactgaaatattataaaaatgcattagtcacaaaagatttattttcttacatcacaccaggctttaagatattttctgccatgccttgcctttagtatcaatattttaaaaatttcactgtaattttataactgcctaataacaaactgaaaacagaacttctgagtttccttatcagaaagggccacagaaaaggccttaagaaagaaagattcacttacttctgcaaacttggcaatccgtaatttaactttaatttgtattttatgcatgaattttacttgtaaagacaaaattaaatttgcttcccctacatcccaactccaagaagtcacaggaatagactctttctaatagtgcagtgaaatattttttcaaaccataaactcacatatatatatatatatatatatatatatatatatatatatgtaccttgtaaacaagaggttaagaaattttatagcacattttaaaattattttcttcctcaaatctatcatgtggtaacttaatctttaacagactttagggccctaaactaaaattataagagctatttcatttgcttgttgtactgggtaattgtaagaatcacaaacaataaatcatgaaaatcctttctgggtttgtggtttctaaaggaaataatattgagcttttgtattttgtcttttaattggctccctggtatcttcagaatgatgtctagattcttcagtctggacccacctactcttctcacattatctcccatcactgttgtcacaaaccataccctatagctaaagattgctactttagtttattacattcagaactttcttcactttgttcacctgttgcccatctttgttctatcatacctgaatggtataataattctaaacaactttcaaggttcatctcatctgtcattctttgttgaagcttgcccttatatcctctcttccccaaacctaaaagtaaaactttctaccactggggcttcagatacttttaatactacttatttgaatttcattatttttattatagtttattattgtcttcatagctgagtactcttaaaattactgtttattataagtgaatgtcttacagaacaaactcaaagtcaatgcttcttttgcatgtgaataatcaagctatttttttgtcatcattactttagtaagtaacattattttatatgaagaatagagtgtatatacataaacccatgtgccagctgccattgcactgcctcacattttcctttagatgtttgagcatagttttaatgactgtttgaaatctctgtctcctagttccaaatatgggtcatcttggagttggtcttcattggtgccttttctcttcagtatgagtcataattttcctgtttctctatatgcctagtaaattagaattttattctagatgatgaataatgtgtggcagagattctggattctgttacattccatcaaagagtattgatattttgtatatacatttacaaatgtacatgtacacaataataaaaataatttttttctcagacctgcctgcaatcatgaa

SEQ ID NO: 12062 - DNA, 4787 bp, Homo sapiens
ggttatggtttaactcagcagaatttgttgaacaactacgacatgctggggatcatggtatgtttagagacacaaaagtgaattcaaaatcttctcttcaattattttatcatacgttccctttgtttctttgctatttgccaagccctctatttgtgtttccaccttaatgccttcacatgtgctctttcttatgcctggaacacttcctgcaaatatagatatgtctctttcactttcttcattgaggtttttgtttaaatgtcatcttgtataaaagcctctcccttatcaccacatataaaaatgagtcactgccaccctccatcccaaaactttctaatatttttaccttcccatatgtttttattcatagcacttatcattattggtatcattcattgtttacttcctgattattcttcccaagagagtataaattgttagagattaggaactttgatttattcactgctgttatctcccgtgcctgaaattatattcagcacatagttgaaaggtattcaaaaaatttgttaaaataatacattaatgacatatatatatgtgtgtatgctttccttactgatgtaacctactttctatagttcaccattcaagtgtttttcattattattatgttctgcacagttttgtcattagtcacagtctaatgtttaatccttatattttctctctcttctttaggcatggaatgcaacttgcaaacactggctggcagcagaggctgccctggaaaagtactacctttccattttttatgggattgagttcgttgtgggagtccttggaaataccattgttgtttacggctacatcttctctctgaagaactggaacagcagtaatatttatctctttaacctctctgtctctgacttagcttttctgtgcaccctccccatgctgataaggagttatgccaatggaaactggatatatggagacgtgctctgcataagcaaccgatatgtgcttcatgccaacctctataccagcattctctttctcacttttatcagcatagatcgatacttgataattaagtatcctttccgagaacaccttctgcaaaagaaagagtttgctattttaatctccttggccatttgggttttagtaaccttagagttactacccatacttccccttataaatcctgttataactgacaatggcaccacctgtaatgattttgcaagttctggagaccccaactacaacctcatttacagcatgtgtctaacactgttggggttccttattcctctttttgtgatgtgtttcttttattacaagattgctctcttcctaaagcagaggaataggcaggttgctactgctctgccccttgaaaagcctctcaacttggtcatcatggcagtggtaatcttctctgtgctttttacaccctatcacgtcatgcggaatgtgaggatcgcttcacgcctggggagttggaagcagtatcagtgcactcaggtcgtcatcaactccttttacattgtgacacggcctttggcctttctgaacagtgtcatcaaccctgtcttctattttcttttgggagatcacttcagggacatgctgatgaatcaactgagacacaacttcaaatcccttacatcctttagcagatgggctcatgaactcctactttcattcagagaaaagtgaggggcttgtgaaacagattgttctacagatgaatctgtaagccagttacagtttgccttaactcatagacatcaatcagagagtgtcacagatttaaccttgatctaaagacaagttgtacccagagtatgtgaaaagaatgggacgacaagaatgtactggtttcttcctctaagaattgaaaggagttgaactgccttatgtttgggcatgtaactccaaaatactaggtagtataaggctttctcaatcagtgcaaaaatggaagatatataaagcaacaagttgtctgcatttgatcactggtcagattgtaaaaaaaaaaaaaattgttttggcaacattctctatgttattcttattcacatgatcctagaactttatgtgagaactgaatagcagaagatatattattaaatagtttttggaagttgtgctgttaagcaaatgtaaagtcaacagtaacaatgattaagaaaggaatataatgagttcaaagatatctatctgatatattttttatattcatcatgaatcggggtagtcttgtaatttatctaacctttttgttgtatgggtttatagtggaaagaatcttaatttaaataaaaagaacctgaagagataattcaacaaaagtagagaatatgtttgagcttgtcagagaatttaagtatcaaaatactagagagatacaccaaggatatttgaataaaaaaaaaatttgtagaacacaaaatgcctatcaggaaacccaaagcaaaacagaacaaaaagtgaatacatcgttttaaatgatgattttgccatctggtattttattatcataatttgaccaccagtgcatgaaaatatattaaagttcattagccttctgctcttgatttaatagtgaactttaaaatatattaatatcataaaccagcaaataaggagaaataaactgataatactagattcattgggatagttttcccttttggagggaaagtcacaatttttctccatgatcccccattttttgtaaacactggaataatttacaaggataactttattgtagcgagagcaaatcacatctggagtgagccttgttttcatgcaacattaccataagaccattggagtaaatgtttcaaacaaaatgtacttcatgaaattatagaacataaaaatatttatgtgcatattaacctgtattatcccaggagggttaatgaggccccatttcctgcacaaaacaaatgtaggggaaaaaatgggtgctgcattagctttttaaagtcaaacaactatcacataataattccttgatatgcaacataaagtacctatggccacatatctaagttcctttccttgatgtcattagctataaggagtgagtaatgtgaaggacaaaataagcattatgaatacagagacataaaattccactgtcccttccttttctgaaatactctgggaggtattctgatatttttaaatcccccaattttcccagttgatatctctagacttcaagcaactgaaatattataaaaatgcattagtcacaaaagatttattttcttacatcacaccaggctttaagatattttctgccatgccttgcctttagtatcaatattttaaaaatttcactgtaattttataactgcctaataacaaactgaaaacagaacttctgagtttccttatcagaaagggccacagaaaaggccttaagaaagaaagattcacttacttctgcaaacttggcaatccgtaatttaactttaatttgtattttatgcatgaattttacttgtaaagacaaaattaaatttgcttcccctacatcccaactccaagaagtcacaggaatagactctttctaatagtgcagtgaaatattttttcaaaccataaactcacatatatatatatatatatatatatatatatatatatatatgtaccttgtaaacaagaggttaagaaattttatagcacattttaaaattattttcttcctcaaatctatcatgtggtaacttaatctttaacagactttagggccctaaactaaaattataagagctatttcatttgcttgttgtactgggtaattgtaagaatcacaaacaataaatcatgaaaatcctttctgggtttgtggtttctaaaggaaataatattgagcttttgtattttgtcttttaattggctccctggtatcttcagaatgatgtctagattcttcagtctggacccacctactcttctcacattatctcccatcactgttgtcacaaaccataccctatagctaaagattgctactttagtttattacattcagaactttcttcactttgttcacctgtagcccatctttgttctatcatacctgaatggtataataattctaaacaactttcaaggttcatctcatctgtcattctttgtataagcttgcccttatatcctctcttccccaaacctaaaagtaaaactttctaccactggggcttcagatacttttaatactacttatttgaatttcattatttttattatagtttattattgtcttcatagctgagtactcttaaaattactgtttattataagtgaatgtcttacagaacaaactcaaagtcaatgcttcttttgcatgtgaataatcaagctatttttttgtcatcattactttagtaagtaacattattttatatgaagaatagagtgtatatacataaacccatgtgccagctgccattgcactgcctcacattttcctttagatgtttgagcatagttttaatgactgtttgaaatctctgtctcctagttccaaatatgggtcatcttggagttggtcttcattggtgccttttctcttcagtatgagtcataattttcctgtttctctatatgcctagtaaattagaattttattctagatgatgaataatgtgtggcagagattctggattctgttacattccatcaaagagtattgatattttgtatatacatttacaaatgtacatgtacacaataataaaaataatttttttctcagacctgcctgcaatcatgaa

SEQ ID NO: 12063 - DNA, 178 bp, Homo sapiens
tggcaggtgtccctctgggatgaagcttccagaggaaggagcaggcagcaattttcactgttctgcagcctctgctggtgatacccaggcaaacagggtctggagtggacctctagcaaactccagcagacctgcagtagaggggcttgactgttagaaggaaaactaacaaacagaa

SEQ ID NO: 12064 - DNA, 178 bp, Homo sapiens; identical to SEQ ID NO: 12063

SEQ ID NO: 12065 - DNA, 4327 bp, Homo sapiens
atctcccgttttatgctaataatcttatagaaatttaggttaaatacagaccaagagccttcaaagccctcagtaagttgcaatacttaatttctgcaacagctaaggactgcaaaaccccactctgcatcaactgaacgcaaatcagccactttaattaaggtaagccctaagtagaccaatggggacttaaacccacaaacacttagttaacagctaagcaccctgaatgcaactgggcttcaatgctgacttctgcccgccgccgggaaaaaaggcgggagaagccccggcaggtttgaagctgcttcttcgaatttgcaattcaatatgaaaatcacctcagagctggtaaaaagaggcttaacccctgtctttagattaacagtccaatgcttcactcagccattttacctcacccccattgatgttctccgaccgttgactattctctacaaaccacaaagacattggaacactatacctattattcggcgcatgagctggagtcctaggcacagctctaagcctccttattcgagccgaactgggccagccaggcaaccttctaggtaacgaccacatctacaacgttatcgtcacagcccatgcatttgtaataatcttcttcatagtaatacccatcataatcggaggctttggcaactgactagttcccctaataatcggtgcccccgatatggcgtttccccgcataaacaacataagcttctgactcttacccccctctctcctactcctgctcgcatctgctatagtggaggccggcgcaggaacaggttgaacagtctaccctcccttggcagggaactactcccaccctggagtctccgtagacctaaccatcttctccttacacctagcaggtatctcctctatcttaggagccatcaatttcatcacaacaattattaatataaaaccccctgccataacccaataccaaacgccccttttcgtctgatccgtcctaatcacagcagtcttacttctcctatctctcccagtcctagccgctggcatcactatactactaacagaccgtaacctcaacaccaccttcttcgacccagccggaggaggagaccccattctataccaacacctattctgatttttcggtcaccctgaagtttatattctcatcctaccaggcttcggaataatctcccatattgtaacttactactccggaaaaaaagaaccatttggatacataggtatggtctgagctatgatatcaattggcttcctagggtttatcgtgtgagcacaccatatatttacagtaggaatagacgtagacacacgagcatatttcacctccactaccataatcatcgctatccccaccggcgtcaaagtatttagctgactcgccacactccacggaagcaatatgaaatgatctgctgcagtgctctgagccctaggatttatttttcttttcaccgtaggtggcctgactggcattgtattagcaaactcatcactagacatcgtactacacgacacgtactacgttgtagcccacttccactatgtcctatcaataggagctgtatttgccatcataggaggcttcattcactgatttcccctattctcaggctacaccctagaccaaacctacgccaaaatccatttcgctatcatattcatcggcgtaaatctaactttcttcccacaacactttctcggcctatccggaatgccccgacgttactcggactatcccgatgcatacaccacatgaaatatcctatcatctgtaggctcattcatttctctaacagcagtaatattaataattttcataatttgagaagccttcgcttcgaagcgaaaagtcctaatagtagaagaaccctccataaacctggagtgactatatggatgccccccaccctaccacacattcgaagaacccgtatacataaaatctagacaaaaaaggaaggaatcgaaccccccaaagctggtttcaagccaaccccatggcctccatgactttttcaaaaagatattagaaaaaccatttcataactttgtcaaagttaaattataggctaaatcctatatatcttaatggcacatgcagcgcaagtaggtctacaagacgctacttcccctatcatagaagagcttatcatctttcatgatcacgccctcataatcattttccttatctgcttcctagtcctgtacgcccttttcctaacactcacaacaaaactaactaatactaacatctcagacgctcaggaaatagaaaccgtctgaactatcctgcccgccatcatcctagtccttatcgccctcccatccctacgcatcctttacataacagacgaggtcaacgatccctcctttaccatcaaatcaattggccatcaatggtactgaacctacgaatacaccgactacggcggactaatcttcaactcctacatacttcccccattattcctagaaccaggcgacctgcgactccttgacgttgacaatcgagtagtactcccggttgaagcccccattcgtataataattacatcacaagacgtcttacactcatgagctgtccccacattaggcttaaaaacagatgcaattcccggacgtctaaaccaaaccactttcactgctacacgaccaggggtatactacggccaatgctctgaaatctgtggagcaaaccacagttttatgcccatcgtcctagaattaattcccctaaaaatctttgaaatagggcccgtatttaccctatagcaccccctctaccccctctagagcccactgtaaagctaacttagcattaaccttttaagttaaagattaagagaaccaacacctctttacagtgaaatgccccaactaaatactaccgtatgacccaccataattacccccatactccttacactattcctcatcacccaactaaaaatattaaatacaaattaccacctacctccctcaccaaagcccataaaaataaaaaactataacaaaccctgagaaccaaaatgaacgaaaatctgttcacttcattcattgcccccacaatcctaggcctacccgccgcagtactgatcattctatttccccctctattgatccccacctccaaatatctcatcaacaaccgactaattaccacccaacaatgactaatccaactaacctcaaaacaaatgatagccatacacaacactaagggacgaacctgatctcttatactagtatccttaatcatttttattgccacaactaacctcctcggactcctgcctcactcatttacaccaaccacccaactatctataaacctagccatggccatccccttatgagcgggcgcagtgattataggctttcgctctaagattaaaaatgccctagcccacttcttaccacaaggcacacctacaccccttatccctatactagttattatcgaaaccatcagcctactcattcaaccaatagccctggccgtacgcctaaccgctaacattactgcaggccacctactcatgcacctaattggaagcgccacactagcaatatcaactattaaccttccctctacacttatcatcttcacaattctaattctactgactatcctagaaatcgctgtcgccttaatccaagcctacgtttttacacttctagtaagcctctacctgcacgacaacacataatgacccaccaatcacatgcctatcatatagtaaaacccagcccatggcccctaacaggggccctctcagccctcctaatgacctccggcctagccatgtgatttcacttccactccacaaccctcctcatactaggcctactaaccaacacactaaccatataccaatgatggcgcgatgtaacacgagaaagcacataccaaggccaccacacaccacctgtccagaaaggccttcgatacgggataatcctatttattacctcagaagtttttttcttcgcaggatttttctgagccttttaccactccagcctagctcccaccccccaactagggggacactggcccccaacaggcatcaccccgctaaatcccctagaagtcccactcctaaacacatccgtattactcgcatcaggggtatcaatcacctgagctcaccatagtctaatagaaaacaaccgaaaccaaataattcaagcactgcttattacaattttactgggtctctattttaccctcctacaagcctcagagtacttcgaggttaaaatattagatatttcccctgatacagggctcaatctttttctt

SEQ ID NO: 12066 - DNA, 389 bp, Homo sapiens
tttaattatactttaagttttagggtacatgtgcacaacgtgcaggtctgttacgtatgcatacatgtaccatgttggtgtgctgcacccattaactcgtcatttaagattagtttgtggctctaattttcttgactattgttttaagctattattaccttcttacttatcagggtgctcatctacttcttgaggctagccaggtggctggaattttccttggagggactcaagagtttcctttatttttcatgccttaaatgggtctgttctccctcttcaaagctcaagctcttaaggactatgctattgttagatttttcgtattggagcagtccttccctcctactcaagaacaccccttcttcagacagcctggctgggtcttc

SEQ ID NO: 12067 - DNA, 10166 bp, Homo sapiens
gctgaggagtacctgtccttcttccagtttggaggccagagtctggaccgagccctccggtaatgtctttgggccctctctggggaggctgtggaggatggcatggggcagtggcaccagcctgaggctggattctgattggccctaagctcccgggctctctccttgaccctggccctcctttgcaggagcttcctccaggccttggtgctcagtggggagactcaggaacgggagcgaatcctctaccagttctccagacgcttccaccattgcaatccggggatcttcccctcagtaggtagggaggggctggccctgacagcaaagcagggaaactttggggtgcccatgtctgcttgggagttcagtaggtgacagtgaactggtgggagtgtgttgggggctgtggagaatggaagcattccaggggttattcggttaccccacgcagtgtgggcagaggaaacaggagccctggttccaatgagctttctctccacttacctatctctggggtagattctgtacacaccttgacatgtgcaatcatgctgcttaacacggacctgcatggacaggtaagacggtggagagagtccctgtgggaactgaggctgtaacaaggggtgcggggaggagaagaccagaggcctgagaccgggcagggaacacccctgagggatgtgggcctggggagctggaaagggttccatggttgctggctgggaggttattctattgggatggggtgtgtgctcgagtcatcccacttctccgtggctacagaacattgggaagagcatgagctgccaggaattcataaccaacctgaatgggctgagggatggcgggaacttccccaaggagctgctgaaggtatgtgccacggggtcttcttatgagcctcatgtaggacctggagccttggttctttgttccaagggagatgctgagcttgggactggctttgccaaaatatccttgagagaacaggacttgtttattgaagggctagtaaaagtgtattccctggcgggcagcatcagaagcatcttggaatttgttatccatgcaaatctgcaggctccctgtgctggacttattgaatcagactctctgagactgggacccctaaaatattttcttaagttttcaagtcattcttaccccttcaaagtctgagaagggcaaagctacacatggtgaaagtctggagctcagacttgggagcctggtgttcctgggtttgaattctagtcttgggcaatttgccccctcttggccaactcaagttcttcctgagagtattaaccacttaccatgccattatcaagatgaaatgaaatcttccaagtgctcagcacggtgcttggcacatagcatgtgtgtcataagcaattaaaatcatttgctgtttcatcacagtcacgcatcacttaacgatgaaggtgtgttctgagaaatgcatcgttgggcattttcactattgtgtgaacattatagagtgaacctacacaaacctagatgtacagctcactgcacaccagggctatatgggatagtctattgctcctgggctacaaacctgtatggcatgctgctgtacttaatactgcaagcaattctaacacagtgctgtatttgtatatctaaacatagaaaaggtacaataaacacatgatagaaaagattaaaaatgatacatctgtataggacagctccatcacaaccttacaggaccactatcatgtatgcagttcatccttgactgaaccatcatgatgctgttatatggtacatggctgtacttcatgaacatttactgaacacctactatgtgccagactttttgctaggcaccgcaagagctatagaagcaagcgagataacatctacgttaatatgtcaaacttttagtgcatcattcattcatttactgcacatttattgtggggattggtcagccagtttcttctccatcagatccctcccagtagaatgccatgtaggtaattcatttctcctccatgagaactagttaaggcctcagtaagcatgggcaggacagggacttgtctgccctggtcatcatcttttttttttttttgagatggagtctcatcctgcactgtcgcgggagtgcagtggtgtgatcttggctcactgcaacctccgcctcccgggttcaagcaattctcttgcctcagcctcctgagtagctgggattacaggtgtgcaccaccacgcccagataattttttgtatttttagtagagacagggtttcatcatgttggccaaggctggtctcgaactcctgacttcaagtgatccacccgcctcggcctcccaaagtgcagggattagaggtgtgagccactgtgcctggcaggtcatctttatgtctctagcacccagcatagtgcttgttgctgggaaatactccagaaatactttgttgcacggatggatggatggatggatggatggatggatggatggatggatgcttgcttactcaaggaggaagggcacctatgttgtgggtggaggaggcaggctgtacacatgcccctatcctacctctgccagacaaagagactttaggctccacagccctgaggctcccctgcccacctgtgtgcttctgttccaggccctctactggtctatccgcagcgagaagctcgagtgggccgtgtgagtgagactccctttcccctctccctctcacccctctcccctgtctttggactgtcctccctctgtcacccacccgagagttagagaaactcagatagtgctccccttggagtgaggcaaagccagaggcagggctctggggagagagcatagaggagcccaagtaataccggagggccagaggtagtggggcgtggggtatggcagaattttcaggaattgatgggttcactgtgaaggaggactccttgtggggggtcctggggtgtggcttcccaggaaaagagaggttgctaaggctctgggaggcaatggatacctcccagttctctttgcatagtcagcacttccagcccgattctctgatgttcagggatgaagaagacacagccagacctgagaaggcccagccgtccctgccagctggcaagatgagcaagcccttccttcagctggctcaggatcccacagtgcccacctacaagcagggcatcctggctcggaaaatgcatcaagatgcagacggcaagaagagtgagtgtctgctgcccacaaacagggtggcgtgctgggagcagccctgctcagggacctgtgccgatgcatgcacaggtgtgcagagagacagcccgcgttgaggacaggcagccagcccatgttccttcctcagtgcgtactgaacagtgaccatgtgctggatgctgtgtgaggcactagagggtaggtaggagaacccagacaaaacaggcctagttattcctgggccccagagtccctgtagtaaggtagagattagacaagtgtgtcaatgtctgcgaaaaaaatgtagcaagagctgagtgtctaggggctgaatcaagtgaggagaaaaaggtttttggttttgttttggaagcgggatgtggctacagggagaggtaaggcttctggtaagtgatggtatctgcgctgaactttggaggagaagagggtctggaatttggaagctgggcagagggcatcccccacagagaaaacagcaagccgagtttgctcagaacatggggtgtgtgaaagggaggtacacttgaggcaaaattgccagggcctgcatttgggccttattccacaggcagctgaaggcttttgattatggcaccaacatgtccagagtggtgatctcagcagactaatgtgcaagcacagattgaataggctggggcgaccaggatgggaactagcattggctgtgaagccgccggggccctagggctgccttttgtccaaggagcttagaatggatcttaccacacaagaccagggtggagaggtagggggaaaagagggcaggtggtgctcagagtggggtacacagggaagggcaccccaaagctgggctctgcgcccttgagcccctctagatgggtatgcaaggtcaagatcatcctgcagggactagaaagctgtctgggaggagctgtgtttgtgcctgggtgtttgccactacttggggtagtgggtgtgtgtttggagttggagagaagatgatatgtatgaatatctatatttggatgtgagtggttctatggttttgtttccagcgggcattgcctgtgtgtggagagactctatatgtttgtttacgattgtatgtgttttcttgtgttggcatgttctgcatttgtgtgcatcctggtgagagactggaggtggtgtgagggacagggggcatatgcacacttgcgtgtgtctgagtgtgtctggatgctggtgcccccacctacaacatttgtgttctgttcctggaacagcgccatggggcaagcgtggctggaagatgttccacaccttactgcgagggatggttctctacttcctgaaggtaggaaaggagccaacacccctgtcagaatgggagactgagagaggcccagaacagtctggagggtgggcagctgatgataacctcttctctgagcccctgtgactggtagcagggagaagaccactgtctggagggggagagcttggtggggcagatggtggatgagcccgtgggggtgcaccactcgctggccacccccgccacgcattacaccaagaagccgcacgtcttccagctgcgcacggctgactggcgcctctacctcttccaggcaccgtaagtccctggggtgggagacgtgtggcaagccttgcctgccctagttctctctcccctgaccctgctgacacctgaggcttgtggggcccagggggtccctggtgggaatggccgtatgatcagaaattcttagaaagcggcagcaggaagaggagctggggcccagggatgaagcccaggcatcgcctacttcctccccatccttggccaactttgccagcacagtatgccttttccttgtcagtgggataaagcctcccagttcagaacacaggagttccgggacagttgctaatgattgaccatatctggcatttgttatgaaatctgtcaccttctcagattgtcctctatagtttttattttttatttttgagacagagtctcgctctgtcgtccttgctggagtgcagtgactctcacctcggctcactgcaaccgccgcctcccgggttcaagcgattctcatgcctgagcctcccgagtagctgggattaagaggcgggccaccgcgcctggctaatttgtgtatttttagtagagacggggtttcaccctgttgaccaggctggtctcgaactcctgacctcaggtgatccgcctgccaaggcgttgccaccgcaccgggcctccaaattttcctctttattgataagaaatgccacggtcagaggtcgggtgcccggctagtggcagggctgtaactatgggaggctgagttctgagcagctggccagctgtgcaagcagccacaggagggggcgggaggagggtgacaggacggactctgttgtcccgggggaccaacgacctcctttgccccagcactgccaaggagatgagctcctggatcgcgcgcatcaacttggctgcggcccacgcactccgcgccgcccttccccgccgctgtgggctcccagcgcagattcgtgcggcccatcctgcccgtgggccccgcccagagctccctggtacggcctccgggaaggggtggggtccggcggaactgggaatgtgcacctggagccccaggactaactcggggaggctggaggcgggctgcgcacttggcctgggaaccgaggcggccaggggggcggcgcgcgtggcccggaaagcagcggtggggacgctcgagacagcgcccctcaccgcccgctgctcgcagaggagcagcatcgatcccacgagaactgcctggacgtgcgcgacgacgactgctgaatctacagaggaacctgccggaagggcggggccgtggccgcgagctggaggagcaccgctgcggaaggagtacctggagtacgaggtgagcggccgagcccacctcaccgccgctgcgcagcgccctctccgccctctcgtggccgcctcggtccctgcagccgtcactgccctgaccgcgccggggcggggagaggcgcttgcgtgcgggcggggcccgcgtgcgccgtctgcaaaggggcgggggctcccacatggacacccgcgtgcacgggcgtgcacaaagagtgtgtgtccccacgcacttaggcctgtcgcctctcgtcctgggggcacatagcagctgcttgtctggaaacacccatagcagatgttattttacagttttcttttctcctaagagtatatttggcttttcccaagttgaagggaaaactgtatttcagctcaactgttccttctaatacctaccaaatattaataggtagtatggatggagcttgtcttccttgcatggattgtctcattcaattaacagctctgggtaggtcctgttatcctcattttacagatgaggaaactgaggcacagagaaattaaactactcttccaaatctggtaaatttacatgctgctctaaatgccccgtttatggtcttaactaagaaatgaccgtgtttttttgtttttgtttttgtttttgagacaaagtctcgctctgtcgcccaggctggagtgcagtggctcgatctcagctccctgcaacctccgcctcccaggttcaagcgattctcctgcctcagcctcccgagtagctgggattacaggtgtgagccaccacacctggataagttttgtatttttagtagagacaggggttcaccatgttggcaaagctggacttgaactcctggcctcaagtggtctgcctgcctcagccttccaaagtgctgggattacaggtgtgatccactgccccggccagtaatgactttgttgactctacagcccatgttgaaatgttttatcccttagtctcccccaaccctcacccatccacccacactccccaattctgctttggtgtgacgtcagttcatctgggatcctaacactgggtgcctgcttcagggatcctgggtgcctgcttagggtgagggcccactgggcaggaagggtaggtgaatgcaatgtgaaaatagagggaatcagaggccacccagaggcagagaccaggaagtgggagtcaacatcgcctcctgcctgtccccgctgtgcccgcatgcagccctctgcctgtctttcaaggtcccaggctatcccttggcttgttggttgtatccatggctgtgaactccccacttctcagaggcctcagggtgtggctgtgaggacccaacctcttcctcccactgaccagctgggacctttaacaagtcaccagccctcccttccgcaatgatttgtcccctcccagggctggcatgaggatccaatgggatggagggtgaggaagcactttgtaaactggaaaccatatcccaaggatgctagctgcaggggcctcaggagtacagtgttaagtagatgagggtagttagcatcatgctccacagatgccaattgttaaaatgctatttagacccaattagggctgtacagatgtgagctgtttgtgtgtagggctgcaaagatctcaggcatagtgggtgacacatcttttagtgcctcaaagatggaacatggcatagagatgttagttacagcactccaaggggttggttattattagaacagggctgggctgatatgtgtcattataatactatccagaggtgtgctctgcagtctgcttatccaagcattatactgacactcacggttggtccagccctctttctgtcgaggtctgtatcgccatagcttcatgtacctgtgagctgtccctcacgattctagcctcctcccaacctggagccaggatggtgctaaggtggtggggcctgtgtgttgcagaaaacccgctacgagacctacgtgcagctgctggtggcccgcctgcactgcccctctgatgctctggacctgtgggaggagcagctggggagggaagctggaggcactcgggagcccaagctcagcctgaagaagtcccactcgagcccgtccctgcaccaggatgaggctcccaccacggccaaggtgaagcgcaacatctcagagcgcagaacctaccggaagatcatccctaagcggaaccgcaatcagctgtgaagccagcaccacctcagagacactgttccctgctccagggtagacctgagatgaacctccctggaggagacttatttcaatgagtccaccatgacggatgaggcacctcctttccctgctgaaggacaaaccttgtttccctgtggccctcattcttgtgctccctgaagctttcctaatattgctgtgctccccaccacccccatggcagtccctccgcagccccagtccctggccacgcccaagggaagagggaggtgaggacttgactttcctcccagagctcagcccatgtcaccctccaggccccagaatccagagtggcctcatttcctagacttgctgagaactcagcacttgtttgagaaccagtgcttatgtggtgtgcccttggcttctgggggagagcttggggcagcagaggcccctgggcagcccagccaggggagccacagccccaaggatggtcttgctctgggaattaggtgaccttcctggggaggccccaggagagtgaatcagggactcttgagaaattcctaaccagcctcctgtgacccagggagcagggtcgctaaggtcctgcccactgaggggacagccttctgggcagggacctcggggggcttcaagggctctgcacggctgtggggccctgtgcctttgtctccttgtgtctcctttcccccgaagtagatgaaacagtctcacatacccaactgctcatcaacagagcagagctgatggcatgagtgagggctgggcggggtggggcctccagagctttgcagggaaccctggaaccctaggaacaaggagcctttgttccaacagagcagagaaggaggttctctatgttcagaccactggagaggatagagaggtaaaaggtggcgacagtttcccttaggggtctgcctggcaggagccacagctcaggagagttgtgagggatgggacggaggctggcgaccaggcgaggcctaggacaggctcgggagacttttctgtgctcctttctacacatgccttaaaccttccttcctgtggggtgcctggaccccttccccatctctggcagctcagagggtctctgctgctctcccctgggaaatcccctcatcctgccctctggctgcctcccagctgggcttgttctctgagggaggttccggagactcatggacttggggctctgcctgtaggaaggaggctgggcggaggaccagccaccattgtctctgttcagccaagtgtgcaagtaggctgcccgccaagagggggcctctgctacccgctgctgcctgccggctgacacactgcctccccagccttcctgctaggccaccctcctcccttcccatgcttgtaaccagctctggggcttgcacctccacaaagtaaggttggcccttggaggccatgtttgggtctccggccagggcctagggctaggccatgcacccaatgggtgcacaataaataacaggtcaacaaagagggaggtgtgtcagtgtgtgaggaagggaggtcaggcagctaggaccacctgcagtgtggcaggcttcatccctctttgctccaagtgtgtatgtgtgtctgtgcatgtgtgtagtgtctgtgtctgtgtgttcatgcatatgcaggagtcacacggtcataggccatcaaagctggaggagacctcagaatcattcattcacctacttgctcatttattcattcattcattttgcagataatatgggacgctttctatgtgccagtaccaggggattcacaaatgaattaaacatgtccctgactccatgagttgacaa

SEQ ID NO: 12068 - DNA, 249 bp, Homo sapiens
atctcccctcctaacttttcccccataccctcactgtatctgctgcttactctcagtcatggtcctcatgctctccacacccttggtccttggtccccactgccttgccaaccagactccacaggtctctcccagtgtctcccagtgtacactgaatagggtagcagggcataccagaccctggctgcccccttgctctgtcaggacccaaggcccagcgtgcctgcacccttcccttgctcaccccca

SEQ ID NO: 12069 - DNA, 315 bp, Homo sapiens
gtttcctgctctcagtttacagaggcacttttatcttgctggggaagtgtgctgaaaagacacattcccagcccacacccagggatgctgattcagtcagcctgggtcagagggatagataaatatgtttaaagctccttgggtaattctgatgtgtaagtagcagttagctgcagtagagtccaattgcctcatttgattgaagtggaatcccagcatcaagtggacatgacttttggcccaagactgatgcttacaaactaagtggagtaggttatttgacctcactgaacatgcatcctttttttttttttt

SEQ ID NO: 12070 - DNA, 10166 bp, Homo sapiens; identical to SEQ ID NO: 12067

SEQ ID NO: 12071 - DNA, 249 bp, Homo sapiens; identical to SEQ ID NO: 12068

SEQ ID NO: 12072 - DNA, 315 bp, Homo sapiens; identical to SEQ ID NO: 12069

SEQ ID NO: 12073 - DNA, 10166 bp, Homo sapiens; identical to SEQ ID NO: 12067

SEQ ID NO: 12074 - DNA, 249 bp, Homo sapiens; identical to SEQ ID NO: 12068

SEQ ID NO: 12075 - DNA, 315 bp, Homo sapiens; identical to SEQ ID NO: 12069

SEQ ID NO: 12076 - DNA, 12904 bp, Homo sapiens
aaaaggcgacggcggattgacagaagtatgattggagagcccacaaactttgtgcatacagctcatgttggatcaggagacctgttcagtggaatgaattcagtaagtatgttggtgggacatgcaggtagggcattggggcatagtcatatgaaacctgtgtgacaggcacaagcatttttaatagcattatgctaaatgaatttgtgtacagtgaatgtaaatacataatatgagcatagaagagagaagcaaactactgatgaaaaattaatctctttgaatttcctggattaggtatttgtttctgtttcttgtacgcaactcttcatagctgcctttgtcccgaataaatactttgaaacttgaaaggatttgagttcagaatggaggttaatatcctattgattctcttgctcccaccaaagagacttggatatcagcctttttaataataatctctttttgttcttttaagttcagttagttgccttttgcacacatttttattgctttactttataaaccagtggtctccaacctttttggcaccagggaccagtttcgtggaagacagtttttccatgggggaaatggttttgggatgaaactgttctaccacagttcatcaggcattagattctcataaggagtccacaaccaaatccttgcatgtgcagttcgcaatagggtttgtgctcctatgagaatcccatgccatcactgatgtgacaggaggcagagctcaggcggtgatgctcacttgcagctgctcacctcctgttgtgcagcccggttcctaacaggccacttctggttttgggacccctgttataaactattcatctttacctggtaatattagaatgttggtgatttatttactctaagttctcatgcactaagcataggattagaattttcacatatccctttagggcaaggcagtaaaaatttgtcacatttgccagtaggatgtgaagaaccagaaataagatttattcgctgtcttttaatagaggtttcagtgagtttcagaataggctttagatctactcagctgaccttttagtccttaatttttgttgaagagaaaaccagaatgcattataatagaagcagcaccaaatgcgggttcttatcagagttgttcctcacatttgccttaaagcaggccactgagtttcaacagactgactcttttccccatgcctaaagtaaacaagtataaatgatccctaaagtgttcaaaaccagaaaggattttataaacataaaattatgatccactgtataccaacttactagacagcattaacaaaagacttaacagggactttaaaaataggtagatgggtatcctggatacagcaacgacgtttgtcactgcagttactaggtaagcaaaggaatgacatttgaaccttgccggaaaggaaacagcttgtttgttttaaatccgtaggaaaagtactttgtttcacttgactgctttgtggaaatgcaagaggtatcatgttgctgtcaaaacagtcagtagttttgtttcctgcatcaacatagagtgaaaagactaaatgaggccctattacttttattaatatggttactataataaagagaatgggtagtttcaaatttgttatatatgatgaattttaatttctctctcatcaacagatgttgtctctgccacctcagatttttaaaaaatccaactataaggccaggcacggtggctcacgcctgtaatcccagtactttgggaggctgaggcaggtggatcatctgagctcaggatttcaagaccagcctgagcaatgtagtgaaaccctgtctctaccaaaaatacaaaaaaattagctgagtgaagtaatgtgcacctgtggttccagctgtttgggaggctgagcggggaggactgcttgaacctgggaggggggaggttgcagtgagctgagatcatgcctctgaactccagcctgggtgacagagtgaaaccccatcttaaaaaaataaatccaaccgtataggaggaattaaattttagttcgtggcatttaaaatcttatgtacatttcggaatttcctttaagattcctccttgaatgaaaaacctgtcattggcttactatttttttgcttctcatagtttaggtagaactttaggactgtactttgcagggcttgcacacctgcctcttaatcttagatgcaggattgagatgggactttagctgtggtagagtttctaccttgctgtctccaggcagccttctctgctactgaagtggactttttatgaagtatttcagccctttagagctaaatgtgcttcccaaatgtgttctatagttatttcgtatttgagtttgctatctctaaagcaatattcagcatccatcccactgtcacagagcactgtgttcttgctgctaggaatggtgttgttcaattagtaacttttttttttgagacagagtctcgctctgtcacccaggctggagtgcagtggtgcaatctcagctcactgcaacgtctgcctcctaggttcaagcaatcctgtctcagcctcctgagtaactgggattacaggctcctgccaccatgcctggctaattttttgtatttttagtagagcggggtttcaccatgttggcgaggctggtctcaaactccggacctccggtgatccacccacctcggcctcccaaagtgttgggattacagccatgagccaccacgcctggctgagtaacttttcttgaaagtatcattgatagtactgatttgatgagcctgactctgtgagaaaaattatgttctcctatgcaatgcaataataaataagaagaaaccataaatagacatgctgtttattcaaataaaagaactgagcagctagtattaggaatgtggcttgacgcatatgaaacaggcttgcctaaactatattattgaatggttagatgacttgtaatttcttttttcttctaaatatattattcttctacctttacttagtgtaaaagactcttttctactaccctctttccagaaaagatttccgttacccgttcagtaatacaaccttgcgttaaaatattgtatattcacagtcacaataatacattgtctcaacactgaaagattacttattaaagttacttaataaaggttacttaagataaaccaaatcttttaaattgaagaattgacttttggagaaaaatactttttttttcttagaatctgcttggcattattgaatgcacaatgtaaaaacaaacaaagattttgtgtttggttggttttgggcttttttgatgcagagtctcattctgttgcccaggctggagtgcttactgcagccttgaccgcctaggctcaatcgatcatcctgcctcagcctcccccagtagctgggactacaggcctgcaccaccatgcccagctagtttttgtattttttttgtagagatggggtttcgctatgttttccaggctggtctcaaactcctgggctcaagttatctgcctacttcgaactcccatagtgttgggattacagctgtgagccactgtacctggtcataaagatgttttttaagccaggcctaaaatatctataaaagctaacatgccatgttaagtggaaaattacttggtatcaggtttgtgccacataacttaatgttagttaccataaaggggaagatgacgaatttgaactggtatcatatgacaggccctagcctcttcacactgcattaactgagcaagtttatgtttaaaaaacaaacaaacaaaaatatagatttcttcttacactcttacctgaaggtagtcattttattaatctgactattatagcaataccttataatgtgatgtcatacgaataagatgttccatgtaagtaaatttccaggttagtaaaaatgtccccatttaagagcaaaacacattttctcattaagactctcttgatctaaataagctatgcattttctgttttgccattatgttcttttacagtatatattgaaacctgacttactcaaaaaatgagttagacaagtcttactttaaatatattgactcagaatcaccagtggaaagcacctcacccttcatgccttatgttacagtaggtgctcagtaagtatttgataagcaggtgactgataaatagatgatgccccggttccttccaaattgtggaagtgtgcagggccctttgagctgattccatgaaataaatactcgaccacattgctagtgctctctctccactagttaggccatcacctccaaaatcatattgcttgtgttccttcttctagcagtctagcctgactctccaattctctgcttccagactgcttctaatttatatgaactaagactggaataataatgatatgctaaaagtacttcacagtttgcaaatgactttatgtgcctttgtttcagcaaaaagaaaatatcccaattttcatatatcttgcactctatcaggaaacagccctgcaatgtggtcgggagagattaccatcttaacccttttacagataagaagcctgatactcagagaggataaatagtttacccagttacaatattaataaataaactgggactatatctgtctttggattctttgattcttttttatcaggctatattaacatggtacattttttgacacagacttttaagatttatctttggttggtccaattttattcatgcttattttcttggttttgattctttactaagtaattgaggtgattatatatgtgagatatctgtaaattaagatacttgaggttgagaaacaaagtggagttgatcggccgggtgcggtggctcatgcctgtaatcgcagcactttgggaggccgaagcagtcggatcacttgaggtcaggagttcaagaccagcctggccaacatggtgaaacctaaaaatagaaaaattagctgagtgtggtgatgtgtgcctgtaatcccagctactagggaggctgaggcaggagaatcatttgaacctgggaggtggaggttgcagtgagctgagatgacgccagtgcactccagcctgggcaacagagcgagactgtcttaaaaaaaaagaaagtggagttgatctatatatttttgaccatttttcaaatgttaccaagtgccttgtgaattacaaaactgacttttgtaatttggaaatagagaaaataggggtttttgcaaaaaatgtttcagttgctagcctccctgtttgtccttataactagaaaattgtttgtctataaaaaaattttgtctataaaagtacccttctgaaaaaagcagcccaaataaaattctgggaaaagaattacttagttgcaccggacctacttcctgacttccattttgttttgttgtatttttgtcttgttttaggttagctccattcagaaccaaatgcagtccaagggaggttatggaggtggaatgcctgccaatgtccagatgcagctcgtggatacgaaggcgggatagccctggtcctttctccagtgagtactcagagctggggtctggacctgacggccagacatggccaggccaataatagtaaatatatgtatatatatataattttttaatggtgaacttattgggaaaggcaaaattactcagctaagtgtagtttctgcacttggaatgtaagttttaggttcttttccttattaagaactttaaatactttaaaacatctggttggggaggattctgatgacaagatgcttcttatgtgtcctttaaacaagagtgaaatcattattttgagtattgaggccgagcatggtggctcacacctgtaatcccagcactttgggaggcctaggtgggctgatcacctgaggccaggaattggagactagcctggccaacatggtgaaaccccatctctactaaaaatacaaaaattagctgggcatggtggcgcatgcctgtaatcgcagctactcaggaggctgaggcacgagaattgcttgaacctgggaggcaggggttgcagtcagctgagaatgcgccactgcgctccagcctgggtgacagagcaagaccctgtctcaaaaaagtactgatactaaagataatctcttgggtagtaattttacagttaagacttcattgtttataaacttttcaaattaattaaaaagactactttgaaaaaggataaaccctgaaaatgtagaaataatttcaagtttttttttgttttatagggttattgtgaatttctatattttctctgtccactattctgtaatttttttttgtcctgtgattgcttttattttgaattacaaaaaagaagtgtgatggcaccttgtccaccctgtcgtgattattccagtgagatgttactgttctgctctgaagaagatactgtcagacgaatcctgcatttccttcagctggcatgcatgcctttggactcatggacagagttctttggattgtcactgaattttcaatgtttaatcagtatggatctgatcttcgcatgatcttttttgtgaatgctaacaccattttgcagttttttttttctattttaaacatttttcttttcactgccgaccccctgccttacgattttattggaaagcaaggacctgctattatttgttaatttgccatcatttatgtatattttggaaggtatgagacccacaagcacaatgatcatttttatttgtttgtttgtttgaaacttcagcagaatagatatctgcatgctttatgaagttgttgcttcggtaagagcccatgggatgccagaaattaacatttctttgctgccatgggctgatgatgctgctattagataaagtttagctgtggcaccaagtcacatcattttcatagaaaaagattacttgtagcttattttagaagtatgaccttttggtctgtttgattgattgattagaattgcaataaaagaaaagcttgcattcataaggcattcattctgttgtaaatgttcaatatatttattttgagagcaaggacctgtggttgtaaacaggtgtggttacaggtgtggttatgtatctgagtgttgcggtcatactctcctccagtccaatcctgagcatcttcatcttattaattagctgttcgtttctttgtgcactcattcttttatttttacttctttttaatgttatggtatccagttgtttccagtagcagtttcttgaacttctggcctgtactactaactgcagacctccagagtcactggcctttctgtgctctacatattattttaggggccacatcagttgccaagagcaacatacataccgacctggctgaattattgccagtgaaaacaacctgtacgaagcctttgctcaggttctaaaatatgtttgtccttgcacgaattttgtatatttcaaatatttctgtaaaggtttcttcttttctgttagagtgtggtgttaagccagagtcagtggtttgtgttctcattaaaatgtttgtttaaatcctatgtccaattcaagcctatctaactacatttggtaggattaacatttcatataacaaatggggcttaattaaaaactttaacttggaataaaggaacagggatcactttatcttctgccttcatttaccttagtccaagattcttgcaaaacaggcaactgaacaaacattaggtttatgtaggtaaaatgtgaaagcatttctcctccactttttaaaatttaatttacccagtacagcggggcaccagattacttgatctttgtattttgcagttttgagcctttgtgtcaatcccaagcacagagaggatctgccaaggaaaaacatttgcatcttcggagtagacattttgcagtttgtttaataacaacttctaaagtaagttgaattcatccattgtcactgattcaccaagtggatgttgcattgtggaatttgcctgagtactgttgtcattctgctcagccagggcacggtcagtttcttggccagggacattgctatgtgctgtgtgcaagctctttagaagagagattggattttcttggcattatcagcactcatgctatttagtctacttctattttgactgactctttaaattagtacaatttttctacttgtcatataactcctggaacaatagtacgggaagccgtgatccttttccctgactcatgattttagtctttttccaaatcgctgttttttttttttttttttttttttttgctgctccaacgaccagcatgtgttggagcagatctccatggtaagccaaaagtggacttgtcagcctataactactctgcagctgccactaactctacaggcacagtaactacactttatacaggagcacatgccaaagtgcctgggaggtgccaataaaatcaagaaataagaaaactacaaaaaaagatacggtattaaccttggacataattttttttagggaggcagctttcccacttttataaagggggttgtaaatctcaagaggtcatttgttccccatagcagcatatctcatttttaaattgaagcgaattaaataggattttactactcaacattcattatactgttaatctttgctgaaatatatgctaacaaatgttaagcaagggaaactgaagacttagtcatgtggattgttagcagtgatctgcattctgtaaaagaggtactttcccatgatgtaggcatgaagtggtgccagtaagcgtagagcggaaatgttgactttagttaacattgggtttagcatttccagtgcagcattatcagtgggcctttaaaaatacttcgtaagtacattagctttcactttgttgttaaattatagcagactcattatagagaacaagtttgccttgattttgtttaaaatgacttctgctaagcacccagaagataaaattgacatatttttataatataagcatactttttttgtacattgtgttcattcttgaataaaatgagttctgtgttggcttgtagatactaaaaagaaagtattgattttgattcaataaatgttttctttcaatcctggttggcctttcctttaaattttgtttagtttttcttttctttcaaggaaggaattatttaccagaattcagttagagcaccttttttgcattcttatattttcagtcatgattcctatcatgcaaaaaacaacttaaaactttttgatttaaaagagaatttaaatttctatcattgtaatctttaacttcacagttcacctcttaatttaacaaatacctagtcagaatgaaaattaaatggatagaaataggactaataaaacatttatgcctggtgcagtgactcacaactgtaatcccagctcttttggagatggaggtgggtggatagtttgagaccagcctggacaacatggtgaaaccctttctgtaagtttttattgcctatcaaccacatgatttttaacagaggtatcagatatctacacagctttccatgatgaagcatcttgtccttatagtatatgtaggacttaattaaaatgaaattaaattaagaattctcctcatacttagccacatttcaggtgcttagcagtgtcatgtagtgatcagctgctgtattaggaagttatagactatttccaccatcacagtttggggagttagtttgtagtttgcctctaaaatggtttatgacactggttcccatagggagtgattttgctccccatggagacattagagcaatgtcaggagacagttttggtcatcacagcttgaggagggggtggtgcaggctctggggagtggaaagtagggatgctggtaaatatgctgtgatgtacaggacagcccccaccacaaagattgattgggtccaaaatgtccgtgccacagctaaaacctgttttaagacaaagaagatctctacgtctgcatactcaccaggtgtaacctgttagggactcttcgttgcattagatcatgtgcacaggtaagtgaggtgttctgctggtcgaatactgagaataggtgagttaggttttgttttatgagaattgccacaaacattctaaaaacagaaaagacaaatattaggaaagactatttcaaaacttctggtaacttttgtccttatcccatatccaaagattctaaaaagaaattggcttaaaatgaagttctttgcaaaataaaattctgacaatcccaactatgaaaaagtatctgaagaaactgatgttggtagaccaagagcaattacattgtgagcttatgtttttaaaggatatgcataaaatgttgaaggaggggcacataaccacaaaaagaaatatctataaaataatagagtatcagagtctagaaattgctaatatttatgaagacgcaaacatctacaaaattgataaagacgaaggaaattctgtgccctcggcttaaagtacactatacacaaacttaaaagaagtcattgaaactttaccttctacttgtctccatctagaatggtccagtaagaatgaaaccattaaattactcatcttcatctgactttttatgttgtagcaccttaacttttggttttcatagtgtttctcagactatgagggtttgcctttgataccttgtcccaggattccttgagccctggagttcaaggttacagtgagcttgacttacgatggtgcctctgcacttcagcctgggtgacagagcaagaccctgaatctttgaaaaaataaaagtgtttttcaatgagctgctccatctatgcaggaaggaaaaaaaaaactttattgtagatatatgcaacctctaggctcattttgacccctacctcatctttttaatgcccatcatcttaatgttgtatctggtttgcctttgatgcctagaagaagaaaaaaatctttgcatttactaaagaaaacagttactccctgagtaagatcaagtgtttgatctgggaccttataaggaagttctcaaagaatggtgatcttggtattgaagaaagctgattttcatctcattagaaggtaatctttgcagaaaagtaaagccggtgcttcattctaacccccagattttctattttgtaaatccaagctatggagttcattagagcttttacaactcactagaactcatgagttcagtagctttagacagttaaatgcagctgagaacctgccttgggggcccagaaagaattcctaggcttatgggaatgttttttgttttgtttttctcccttaaaggagcagcaagcaagtaacacacttctttcaaaatcttcagagcctcacctagttacctatttcttaaccattgctttaagttatataaacatattcatcctttttatgtctgtgtctttcaaataaatatgtaagctggcagagtcctttgccttagacaccacgccttcccccagagcctccgctgctgctgtgctctcccgcagggcttcatctgctgggcgctgcttccttagggagtatgtaaaacatttcagctgctgtttctgggtttctgcaaaaaactgtttttacttttcagaaatactgcaaaggaagtaaaaaccactctgcttctgtcttttggcaaaaccacccagattccaaatggggtaattttaagttcaatctctttccaatgtccataatgtccattgtgtcctattatcatttttcacaagtgtatgtaggttttgctcacctgattttctctggataggtacagcgtaagtgtacctaataagggactcgactgtccctctctaaatgcagccacatccaatctgtgcacaatggaattaaggccacagaccatctaagccaatagcatagaaggatctgttactcctaaaaccagaaacagaaacaagcagtcctttgtcccttcttccctcttttcaatctgatattcctataggaaactagtatgatcagatagacattttagaaaagtatcagctgggcatggtgacgcatgtctgtagtcccagctactttggagggtgaggcagatggatcacttgagcccaggacttgggtccatcctgggcaacatagcaagaccctatctcttttaaaaaaagaatctaagggttggacacagtggttcacgcctgtcatcccaacactttgggaggccgaggtgggcaaatcacaaggtcaggagttcgagaccagcctggccaacatggtgaaaccccatctctactaaaaatacaaaaattagccaggcttggtggtgcacatctgtaatcccaggtactcaggaggctgaggcaggagaatcgcttcaactcaggaggcggaggttgcagtgagccaagatcgtgccactacactccagcctgggcgacacagtgacactccgtctcaacaacaacaaaagaatctaggaaatattcattctactgtgaaggacacagtagagggtcaggcagtccaatctgtgattaacgggagttttacaaaaagcaaggaaaatgctcttcagaggaaaaagattttaaaaaaaagtctcttgaaatttcaaaaaatttgtttttacatttatactttctcacttcacagccctcaaggacgttttgttctgaagactctcatattcagctctgggaaataattatttctctgattatcccttcaacttttgaagattaccagatttctcaacagcaatactgtggtctggaataaaagggggcacttccctcagactttggagaagacattattttgaactagaattctgtctacagccatactctcaatgaagtaagatggcagaataaagatgattacactagcaa

SEQ ID NO: 12077 - DNA, 789 bp, Homo sapiens
ctgcaatttcaggagaagtatactattgacagtaaactgggataagcagagccccatagtaggacactaacccaacgtggccagtggtctctcccaataacattatcatatctaagggatcatggaaaacaggacagatctaagataatcttcatatctggaaaactcttagataatcagtgaaacacagcagtacagtcaggaaatatctctaaggggtagatgagcatattggtcagaacagggacaccagctggtggctaaagttactggaaaatggggctcagcaccccatgagaagtgcttttcaaaaattaggaagagtcagccaggcgtagtggtgcgtgcctgtaatcccagctacttgggagctgaggtgcgaggattgcttgagcccagttaaaagaccagcctgggtaacatagcaagactccatctcaaaaaaaaaaaaaaaaaaaaaattaagaagagtgagtaagacccagcctagttagtcaacaggtttagttcccagctagaacagaccagagaagagtgaatggactaggaccaaatctgtcaccctctcaccctcccacctccaccccctccagctgaaatgacagattcattttagcatagaaaggtaattgggtataatctgaataataaccatcaaaatataatacatctgttaatgatgaaagccagaaagtaatgtttaaaatcagacagtgtattcaaaccactgtgttctttgccaacaataatagtgactgagggtaattttacatttgtctcgttttttaa

SEQ ID NO: 12078 - DNA, 1565 bp, Homo sapiens
gcaaagaccaagatttttgtcgtgtagtcaggctcatcatgcctgcctccttcttccctttggagaattctgagggaaattcctcaatctctcagaatcaaaatcttaagtgtctaaacttccaaatgactgcagcttttctcaagttaagaagccaaactaaaataggttaccatcctcttttttttttaggaaagagtttatgagtgtcacaagtgcctggtgtggagtttggattatttataggattattaaatgactctctgaggcacaggtgaatacataatttttttgagggagtttgcctaatgaacatttgtgcggtaaatattaagtaagcactgtttcatgtgccagggataaaagattaaagatagttcttccatctggggaggagatagcaaaacacatggacaattaaaatatggcctaattaaatactgtgataattataaatatcaggtgctcagaagtttgtaggaaggcctttgggggagaagagcaaagggtaggcaggtgctgttcaagttgttttagaaaagggaaccctgatgagtttaggatacagttggccctccatatctgtgagttttgcatttgtggattcaaccaaccgagattggaaaataagttaggcccatgatcgttgtgcctgtgctgaacaggtacagacatttttcttgctagtattccctaaacaatacagtatagcaactctttacatagcatttccactgtattaggtattaataaataatctagagtaatgatttaaagcatacaagggccaggtgtggtggctcgtgcctgtaatcccaaaacattgggggctgaagtggatcctcaaactcctggctgcttgagcccaggagtttgagaccagcctgggcaacatggtgaaaccctatctctacaaaaaagtacaaaaatcagcagggtgtggtggtgcatgccagctactcaggaggctgagatgagaggatcgcatgagcccaggaggttgaggctgcagtgagctgtgatcgtgccactgcacttcagcctgggcaacacagtgagaccctgtctgaaaaaaaaagaaaaagaaaataaagcctaccagaggatgtctgtaggttatatgcaaatactacaccattttatataagggactcaagtgtctatgggttttgatatccacaaaggctcttggaatgaacccagtggataccaaggaacaactatatatagaaatttaagtgtagaagggaaggtgtgtttcttgaaagggtaacagcatatgccaaggccacaggatacgtatggtatgtacatgcaagttgcctaggcagctggaacactgggacaagaatgaatggtaaagtagatgaagctggaggaattgtcaggatccagatcatgaggaattgtgttctccttattaaggaatttagatttggcttccagaaagatcgctttggcagtatatgtgaagagtggattttaccgtgggcatggtttgtcatgcctgtaatctcagcactttgagaggccgaggtgggcagatcacttgaggccaggagttc

SEQ ID NO: 12079 - DNA, 1564 bp, Homo sapiens
gcaaagaccaagatttttgtcgtgtagtcaggctcatcatgcctgcctccttcttccctttggagaattctgagggaaattcctcaatctctcagaatcaaatcttaagtgtctaaacttccaaatgactgcagcttttctcaagttaagaagccaaactaaaataggttaccatcctcttttttttttaggaaagagtttatgagtgtcacaagtgcctggtgtggagtttggattatttataggattattaaatgactctctgaggcacaggtgaatacataatttttttgagggagattgcctaatgaacatttgtgcggtaaatattaagtaagcactgtttcatgtgccagggataaaagattaaagatagttcttccatctggggaggagatagcaaaacacatggacaattaaaatatggcctaattaaatactgtgataattataaatatcaggtgctcagaagtttgtaggaaggcctttgggggagaagagcaaagggtaggcaggtgctgttcaagttgttttagaaaagggaaccctgatgagtttaggatacagttggccctccatatctgtgagttttgcatttgtggattcaaccaaccgagattggaaaataagttaggcccatgatcgttgtgcctgtgctgaacaggtacagacatttttcttgctagtattccctaaacaatacagtatagcaactctttacatagcatttccactgtattaggtattaataaataatctagagtaatgatttaaagcatacaagggccaggtgtggtggctcgtgcctgtaatcccaaaacattgggggctgaagtggatcctcaaactcctggctgcttgagcccaggagtttgagaccagcctgggcaacatggtgaaaccctatctctacaaaaaagtacaaaaatcagcagggtgtggtggtgcatgccagctactcaggaggctgagatgagaggatcgcatgagcccaggaggttgaggctgcagtgagctgtgatcgtgccactgcacttcagcctgggcaacacagtgagaccctgtctgaaaaaaaaagaaaaagaaaataaagcctaccagaggatgtctgtaggttatatgcaaatactacaccattttatataagggactcaagtgtctatgggttttgatatccacaaaggctcttggaatgaacccagtggataccaaggaacaactatatatagaaatttaagtgtagaagggaaggtgtgtttcttgaaagggtaacagcatatgccaaggccacaggatacgtatggtatgtacatgcaagttgcctaggcagctggaacactgggacaagaatgaatggtaaagtagatgaagctggaggaattgtcaggatccagatcatgaggaattgtgttctccttattaaggaatttagatttggcttccagaaagatcgctttggcagtatatgtgaagagtggattttaccgtgggcatggtttgtcatgcctgtaatctcagcactttgagaggccgaggtgggcagatcacttgaggccaggagttc

SEQ ID NO: 12080 - DNA, 373 bp, Homo sapiens
tgtttttaaagacaaggtcttgctgtgttgcccaggttggcctccagcccctgggctcaagcaattttcccaagtagctgggagtacaggtgtataccaccatgcccagctcattgtaagtattctttctggcagccaagaggactatgaagctaccttggttctttgcattttgcctttgtattggacttttaacctcctctcttggggctttccttgctagtcatctgattatctatcctttatatcctgacactaaaatctcttctgtttctgtgcattgcataggatgggaacagtatggtaacggtgtcactggcctttgaattttgcatttggacaagcctacttcaaatctggactccagttctga

SEQ ID NO: 12081 - DNA, 2738 bp, Homo sapiens
cagtgggaagctgacggtgttcactgtgctgtgtgagcagtaccagccatccctccggcgggaccccatgtacaacgaggtgagagcttggggctggggagggaggaggggaccccacggtctgggtccaccccctctgagcccgctgcctgtgccttgcagtacctcgaccgcataggacagctgttcttcggcgtcccgcccaagcagacgtcttcctacgggggcctgctcggtaagccggggcgcccttgtcacacccactccagccctgggtcggtgtggggtcatcatctctgcccaggcaggtccagtgcggtccttcacgtggaagtggttttctgatcttttaaatgtttctcagtttacttttgttagtaggaaattattagatttcagagttgagaattctggcacggtggctcgcagccccgtctccactccagagctccccatccctgaggtgtcttccatttcctggcagggatcacatcacgtggctggctgcgtgctcccccgtctctctgtgcgccatgctaggtggcctccgtgagcctggtgtgcccgggacgctgccagccgtcgtgctggggcaggcagtgctgccgtggctttggggtcgcggcggggcgggtgtctcactgtgggtggtggttcgtggcaccgcgggagaggcccctcactgagccgcctgccttcccagcgtcacctgtctgggtttattttagtgggaggtgtgaggtggtgacctctccccacagatgtctgccctggtgcagctgcgtcctgtggcaggccctgtcctccccggatgccccccccagacaccctggccctcaccgtgccccgtgacacaggcacctccaccccaacacccgtcaggagcgccctgactcttctgactctccagtcgaaaccgcagcctgagctcccgttccacagaagcgccgtcaggcgtgtcctgagatggggtgacgtcgtggataagagagggtgacactgccacggccgtgtctttgtattcaaagaacacggtgtaacgtctcgtttgggttcaggagacttttggagctttggctttgtacgtacagagtagttgttgattggataaaaatcagatgacagtgaccgcagttggcccctgtgggagcagccgttgaagctttggcacatccagttgattcatgtgtcactgtagggcgcagtgtgctctacagccccacttctctgctcaaaaatctctttccgtgaggtggtgttggttctgtaggtccctccgtggctcctgttggtgggtgtggagggtggttctgtaggcccccgtggctgctccatggccccgttggtggacgtgggagggccgttctgtggagtcccccgtggctgctccatgtttgagtatctctgtggtcgtcggctccctggcctccagagtgtcctgtcccggggttcctgggtcgtagacagtagcgatgtgaggcttttgcttgttccatgggacactgggacaccttgtgagacgtttgtgggaaggaggggcttgggggcctgtgggaggctgcccaggcgtgactgccacggtgttcttctttccagggaaccttctgaccagcctcatgggctcctcagagcaggaggatggggaggagagccccagcgacggcagccccatcgagctggactgaactggccaggccacgtggagacaccacggtcgacgacggctggagggacgtttcagaggcgagtcctgggtggctcctcgccttgggggctcctggccctgaggctggcggtggccgcatgccggcgcgtgtctgtttctgtgcggcggctcagggtggcgcggctgctgctcactgtgctgctgggacccaagagtggggcgtcgcctgctggccgccgcgtcccccgagattgacccacaataaagcacaggccttaccgcggcgtcaccctctcccactcctttgttctgggtcctttcgggagggctgatgggcagcacaggaggcccgtcctcgggggctgcgcacatcacgctccttgccgggcgtccggcacagctgcggtcaccaaagcaggtgctggccctcggacctgagagcccagccagggcccatgtggtctgcaaatgggagcggctgtttttgaacacggggtcattctgcagtcaggacgaaccggtccccgtcgcagacggagtgcacgtgccctgcgccacatcctcacgctcggtggagggacgcgtgcggcgggacggtgcctacgggtacttgcagctgtgtcccatgtggcatcccagacctgcgccctgctggtctctgtgagcgccacgctgctgtgctggaaatgccgctttaaaaagggataccgtgggactctgcccgtctctttcataacgcaatatttatttgtattgggtgatgattgattctttcgacctaacattttgggttttaaccaaataaccggtccaggagtgagcagctccgttctgtcagatgctactccaaatgttaccagaacgatgacaaaaggggagacgctctattttttcacagttaaatgacagttgtagattgatacgcagttgtgcatgggaaggggaaacgcacagctttatttactgtaaagtggaatttcaggaaggcttgtgtgaaccgttgcgcataaataaaccctttctaccgggctgtgcaacgctggtcctttcttgggcgctggtgtgggggatc

SEQ ID NO: 12082 - DNA, 543 bp, Homo sapiens
tggaaccatgccagagccacattttattccaggatgcgacacggggcggcggatgcctggcctcggaaaccccctccctgcctatgagggcttgtccagggctcccctggaacacagctcagccaggcaaggctgggagaggctgggccccccaggtgacctgcagacgcctcccccacctacatgccccacgcaaggggagccctggagcccggcctgccttgacaggaaggagataggtgaaaaataaatacacggctgggccgcctgcagcaagcgcgacagtgcccgggacccccagggccactcctgcctctggtgcctcaccgcggcccaggccctcgtccccaagggttcagacaccactgtcggcgagcaccgtgctgggcgcagaggccacgtgtggtgggacggcagcctgctggcccctccaggtgaggaccaggagcacaggctgtggcaactccagcccgggcaggggccgggacctgtgtggataatccacccaaacaccccacggccctcatagccccgtgacacaca

SEQ ID NO: 12083 - DNA, 6584 bp, Homo sapiens
ttctcaacatctggcttagtattgtgtgcaaaatcagagaggggtgcaagatcctgatttctcagtaaagggaatagcggtgtgtgtggtgcgggtcgggacgaatgtgcgatttcggtgaggagggacctgtatcttaaatcgtctggtaaacatgttttcagactatattctcgctggttcccgtttcctggctttgctaattttaggctgtgatctgttttcaaggctgagccctacaaatcaatgcctcttccagagattgctgctcagaggatacttgttttacaaataaatgtttcctctcgctggttgtggaatttatatagaaactttgattcttccagggataaagttgggtgagcggacagaattagctctgggggagctggtgggaagaggaacattgggatgtgtaaggggcacagctccatatgtggccccacaaagactgcacccaggtcaggattggaggctctgcagtctgaggtcttgttacagggttaactgtctgctcggagctgcccgttagggaaactgtctcctcagggacagtcctgggtttactgggcattgagctcccctttagcgggtaggaggagggagatgccacctggtgtgactctctacagttcaggagaagctggatgctgatgggtgcttgttccttaggcagagagaggagaattcagccacctgaagtcagcacctacagaagcacagtctcctggctttgcctctgaattattaacagcagagcagcattaaagagcccacacactagaaggaggatatgaagaaacacccagagaatgtcacaaaaacccagaatgtcacagtattgttttcttcttgctggtgtcctatcctctctcctaacaccagccaccaaagctgatttttaaaaaatgccatgatttctcttgtttacaagaagctgtttcctataccctattcttgaaggataaagaaatagtcattcaaaagaaatatctggcttttcacagtgtttcatatttgttggcttcctatgaggtgactctgtctttaacaactaccattttctgcctgttttgttcaaagtctgctccaataagagttcttcaaatatctttctccattgcaaaatgtttgtaggtagcaatgaaataaaacatttaaaattaataccatgtttctataacactacatattaattaataaaggaatggattgtcattttcacagatcagatgtgggctggacataatgatcaatcaaaggcaagaagcagggagattatccatttatttatttaacaatgatcgataaccattctttgcccagtattgtgcttgtccccagggaataatgagaaatacaagacatatgtggtcttctcatcacaaagcttgtagtataagaggagacagtaaaaaaatcaagcaattaacttcctaaagtaatacatattctgtaagaagcctctggggtgcagtggatcataacagagggtgttgctggtagacagtggtgttggggaagactctctggagagccgaggcctgcgggttgagcaggaacaagctgggcactaggttggagggtgagtgctccaaagagaaggaatgataactgcaaaggccttgaaggtggaaggagcctagatttccagaacattgagggtagtgtggctcacacataggagagaggagagagctgatcacacaggcctatgggccattctgaggacttcagttattttgaaaccaatagtaagccactaggaaatttaaacaagaaaaaatatcaaattttagttttaaaagaacatctgattgtagagtagaaaagggattgaaggggagatgatcaattagaagcctgttaagttgtatacaattgacagtgggttgtattagcacaaagatggagagaaatgggtaatttcgagttttttggaagtggaatcaataggatttggtgatgggctgatgagagagagaggataaaagagttgtagatgaccccaaagttctgcaggagccacggggctagatgtatggtgccatctgctgagcggggagccaggaaggcagacaggatgtggaggtcagggcttaatttcggccaggttctgtttgagatgcccatgaaatagccaaatggagtgagatacaaaagtttggaacttttataagctgagggagatataaaagtttggaactctgaggagggtgtaggctacagacctcatataaacacatccaagccacgaatctctagatagaggggggaaggggccagaacccctgtgaggaagcactggaagcatttatgtttgtgtaaagaaaaaggaacaatctgaaaatgaaactgaaaatggagggttgaggagacttttgggaaatggagcaggagaaatcaatgtagcaagctcatggcaaaaagaaagttgttgttgactacaggcagtcagggattctagttgcttccatttccctaaaatgacatggttatgtttcttgatctacaggagttcaagcgacaatggcagcccaatacggcagtatgagcttcaaccccagcacaccaggggccagttatggtgagagggcattcagtgctccccagaccaggctgcagggaggttagcaggtgggggtgggggatttgggggggaataggggtggggttctcctgccttgccacccagtccccatttgagcaggagaaaaatatttccaacctcttttctcattttctcctcatttgacctgctctttcatctttcttgaccctctgcactttctgcccatggtgtggctaagcagctaagcagaagagagattaaatatcctctgattgacccagggctcggcacagtttcttacctcctgcttcctacaacatggacacaccagaacagctggttgtagcctatctgattgtttttctgcccctttcttcagcctggaggagaactgggaatgaggaatgtgggagtaattgtccctcaccctggtatctaatttcccagctcctggtggtctcactataaccaacaaattaaactggctggctcattcagtgtatcacatgaccctccattttcttccttacccatagaaattgactatatcagttgagattttgctggtttaataaactatcccaaagtttcatagcttaaaacatcagccatttagttggttcttaattctgtgggttcactgggctgttcttgggtctggaccagcttggctcatctcaggcactcactcatgcatctggggtaagctagtgcctggtatgcaactgaatggtcttggatagccttatggacatgtctggtagttagcaagctctcagacagcaagggtaatagagataactgggccttgttgttatcatcaagaaggctagtccaggcttccttttaaggcagttgcaggaggagcagaaagaaaaggcaagccacagtgcataagcacttttggagtctctgcttgcaccaggctttctactgtcctactgtccagagcaagtcataaggcccacccagattcaacagttgaagagacagatagcatcttgatgggaggaactgcaaatctacatcccagaggcatgcatccagggatgggaatagattgtggctacatttacaatctcctccatggattgtcaccatatgctctcaacactgactaactgttgcagtgttggagctggcctttggtgctttgtcattttgcctcccatgattctcctacttccttccctatggccaaaaaatgccctcaggatatccttaggacagagccttctgctgtgatgctaactaaaaatgtgaacgccagcccacgtttttccttagataatcttagccttcctgtatccagtgttctcagtcacatcactttcggaaatacgcttctttcatcccagaattctggttatcaaacgtgggaaggtgtattttaagaataatgataagttgcataacccacttccctggcttcttaatgggaagaagaaatgcttcattttgaatataaattgggaaaataaatctccactacagatatgctaaagtcaaatcttgggttactccctgcacgaccttatttagaaagaaacagctggccgggtgcagtggctcatgcccgtaatcccagcgctttgggaggccgaggcgggtggatcatctgaggtcagcagtttgagaccggcctgatcaacatggcgaaaccccgtctctactaaaaatacaaaaattatccgggcatggtggtgcatgcctgtaatctcagctacttgggaggctgaggcaggagaatcgcttgaacccaggaggcagaggttgtagtgagccgagatcatgccactgcacttcagcctgggcaacaagagtgaaactccgtctcaaaaagaaaaaataaaggtacaaacagctattattggcagctcatagttctcttctgaaaccattttatttcttcctctgggctacatagctacaaaaggtcagactgagaagctcaaaggaatcctaaaaagcaagattgaagataggagattaagggaaaggccagttgcccaagtactgaaaaatgagcatcaggcctacaggaatctctgagtgcagcagtaacatcaggagaagcccccacagccagtaacggaggagggcactgggggtgaggactctgcaggggaatctattagaggtagattctaacagcatggctttttttttttcttgatgtcccagggcctggaagcaagagcccagaaattcccaattgagaattgtgttagtgggtaaaaccggagcaggaaaaagtgcaacaggaaacagcatccttggccggaaagtgtttcattctggcactgcagcaaaatccattaccaagaagtgtgagaaacgcagcagctcatggaaggaaacagaacttgtcgtagttgacacaccaggcattttcgacacagaggtgcccaatgctgaaacgtccaaggagattattcgctgcattcttctgacctccccagggcctcatgctctgcttctggtggttccactgggccgttacactgaggaagagcacaaagccacagagaagatcctgaaaatgtttggagagagggctagaagtttcatgattctcatattcacccggaaagatgacttaggtgacaccaatttgcatgactacttaagggaagctccagaagacattcaagacttgatggacattttcggtgaccgctactgtgcgttaaacaacaaggcaacaggcgctgagcaggaggcccagagggcacagttgctgggcctgatccagcgcgtggtgagggagaacaaggaaggctgctacactaataggatgtaccaaagggcggaggaggagatccagaagcaaacacaagcaatgcaagaactccacagagtggagctggagagagagaaagcgcggataagagaggagtatgaagagaaaatcagaaagctggaagataaagtggagcaggaaaagagaaagaagcaaatggagaagaaactagcagaacaggaggctcactatgctgtaaggcagcaaagggcaagaacggaagtggagagtaaggatgggatacttgaattaatcatgacagcgttacagattgcttcctttattttgttacgtctgttcgcggaagattaaacttaatgaaaatctgtttgtattttctgcatattctctggcaaccttgccccatacttacttatttagcatagtcgagtgctctagtttctgtctctcaggcactcgtaactaaggaccaccattggccattggtagatgtttgattgacttaacaagagagggacaaattttcaatttgtgaaactccaaagcagaaagtattggtgcttgctaccttgtgaattcttccttagacatgcagagaaaatgtatgcaagagaccaaaaagatggctccaagctatgtcatgttacctgtaataaaatcttttcttctagattctttctatgttggcagataatctccccttgtagcttccactcacttattcttgcattcagagtcacaatgatcatcttacccatgtggtttttgagaaagaaagatcaattctttgtttgcagtaggtaatcttagagatggagatgattgtagaattattcctagatgagtgtcaatttatttaattccattgtcatataaggagtcaaattgtttcttatcatttgttcattgaagaacagagacctgtctggaaaatcgatctctacaaattcaattaaataatgatccccaaatgctgaaaaagtgaaatacagcaattcaacagataatagagcaatgtttagtatattcagctgtatctgtagaaactctttgacgaacctcaatttaaccaatttgatgaatacccagttctcttcttttctagagaaagatagttgcaacctcacctccctcactcaacactttgaatacttattgtttggcaggtcatccacacacttctgcccccactgcattgaattttttgcttatgttgtttataataaaacttttcaattatctcatatt

SEQ ID NO: 12084 - DNA, 2735 bp, Homo sapiens
tttccttttttttaaattttattattattatactttaagttttagggtacatgtgcacaatgtgcaggtttgttacatatgtatgcatgtgccatgctggtgtgctgcacccattaacttgtcatttagcattaggtatatcgcctaatgctatccctcacccctccccccaccccacaacaagccccggtgtgtgatgttccccaccctgtgtccatgtgttctcattgttcaattcccacctatgagtgagaatatggggtgtttggttttttgtccttgcaatagtttgctgagaatgatggtttccagtttcatccatgtccctacaaaggacatgaactcatcatttttatggctgcatagtattccatggtgtatatgtgccacattttcttaatccagtctatcgttgttggacatttgggttggttccaagtctttgctattgtgaacagtgctgcaataaacatacgtgtgcatgtgtctttatagcagcatgatttataatcctttgggtatatacctagtaatgggctggctgggtcaaatagtatttctagttcaagatccctgaggaatcgccacattgacttccacgatggttgaactagtttacagtcccaccaacagtgtaaaagtgttcctatttctccacatcctctccagcacctgttgtttcctgactttttaatgatcgccattctaactggtgtgagatggtatctcattgtggttttgatttgcatttctctgatggccactgatgatgagcattttttcacgtgttttttggctgcataaacgtcttcctttgagaattgtctgttcatatcctttgcccactttttgatgggtttgtttttttcttgtaaatttgtttgagttcattgtagattttggatattagccctttgtcagatgagtaggttgcaaagattttcccccattttgtaggttgcctgctcactctgatggtagtttcttttgctgtgcagaagttctttagtttaattagatcccatttgtaaattttgacttttgttgccattgcttttggtattttaaacatgaagtccttgaccatgactatgtcctgaatggtattgcctaagttttcttctagggtttttatggttttaggtctaacatgtaagtctttaatccatcttgaattaatttttgtatcaggtgtaaggaaaggatccagtttcagctttctatttatggctagccagtattcccagcaccatttattaaatagggaatcatttccccattgcttgtttttgtcaggtttgtcaaagatcagatggttgtagatatgcagcattatttctgagggctctgttctgttccatcgatctatatctctgttttggtaccactaccatgctgttttggttactgtagccttgtagtatagtttgaagtcaggtaacattatgcctccagctttgttcttttggctgaggattgacttggtgatgcagactcttttttggttccgtatgaagtttaaagtagttttttccaattctgtgaagaaagtcattggtagcttgatggggatggcattaaatctataaattaccttgggcagtatggccattttcacgatattgattcttcctacccatgagcatggaatgttcttccatatctttgtgtcatcttttatttcattgagcagtgatttgtagttctccttcaagaggtccttcacatcccttgtaagtcgtattcctaggtattttattctctttgaagcaattgtgaatgggagttcactcatgatttggctctctgtctgttattggtgtataagaatgcttgtgatttttgctcattgatttggtatcctgagactttgctgaagttgcctatcagcttaaggagattttgggctgagacgatggggttttccagatatacaatcatgtcatctgcaaacagggacaatttgacttcctcttttcctaactgaataccctttatttccgtctcctgcctgattgccctggccagaacttctaacactatgttgaataggagtggtgagagagggcatccctgccttgtgccagttttcaaagggaatgcttccagtttttgtccattcagtatgatattggctgtgggtttgtcatagatagctcttattactttgagatacgtcccatcaatatgtaatttattgagagtttttagcatgaaggttgttgaattttgtcaaaggccttttctgcatctattgagataatcatgtggtttttgtctttggttctgtttatatgctggattatgtttattgattttcgtatgttgaaccagccttgcatcccagggatgaagcccacttgatcacggtggataagctttttgatgtgctgctggattcggtttgccagtattttattgaggatttttgcttcaatgttcatcaaggatattggtctaaaattcccttttttttgttgtgtctctgccaggctttggtatcaggatgatgctggcctcaaaaaatgagttagggaggattccctctttttctattgattggaatagtttcagaaggaatggtaccagctcctccttgtacctatggtagaattcggctgtgaatccatctggtcctggaatttttttggttggtatgctattaattattgcctcaatttttcagagcctgttgttggtctattgagaaattcaacttcttcctggtttagtct

SEQ ID NO: 12085 - DNA, 2750 bp, Homo sapiens
tgaccttcaaaattgcttccacttctaattttgttttaagacactattgactacacttctcctaaaaattgatctttttgacgtgattgggctcttgagacttttttaccctttgtcctgatctgattctctccatgaatcaattttgttcatctcatctgtcactcttcctctgtatgctttgtaacctgcatttcctctacttctggcacttttttgccaatggaacctgcaattctactctgcaaatagctagggttgtttcctccctcactcccagccaaaatacagcttttatagtagtatctctgagtagggagttgggctattgagaaaaacatgctatagcccaaagtccctattttaaaagagatagagattggaatgatatgttctttttagggtgtggatgttttaggctccaatgaccataatcaaaatagatctataaccaagccgtaaaagggtaatatatgtgaattttctcataatatgaatcctaacacaaaagcagttacaatactttaagcgtaaattacatagtctgcaccatgattttttcaaaatttgtcttacgaacctcaaggaggaaaatgtaccccactggttaggaaagaattattttctctaggttccataacatagaaggagtgttttatttcctcactgccttgtgcctgggaatactgaaatgatagattcagccatgttttaataaaattcctctgtaagaatattagcatggagagagattggtataaatacatgaatgtgcctggattttgaaggtaaatcctatagctatcagattgctattcacttaattgccacaatctaaaatttatctgttagtgtttcttttctaattgttactagtgtgataaaaagaaaaactcttatttatatatagattatttgtttcaggacattaactgagaatatagtattgaaatgacttgaaattgaaggaatcagattttctactgcttatttattcagaatataacttacccaacaaggtctgatttaatttattttgaggagtagtatttagaagcaggattactcttatttaggaaaagaatctggatcttagatatacagtgacttgcccagagtcacctagtaaatgaaagaactataagtcaccacttgggcgtgtgattcatgatcttgactatgaattgataccagtactttacatgaaatggccatactctgaaaattatatttttagatataaccttaataaatatacttgcctttcacagaatattagaaccaattcctccttatcttcatggaggagcatacttaatgatatatgtactgatgagatttcgtcttatttttaaaaacttccaagaaagaatgtttcatagctcccttcattcatctactctggtgcttaattagatttgatacgagaacgctttctttcttatctaacttgaatccctcatgctgtagcttaagtctgttttctctcactctgcctaggatgccaaaagcagctaatcaccattatccatagtaatattcacaaagtcctccttatgtttgaaatgttagcgctataactgacagtaaacataacccccaagtatcagcaaattataaactagagaagagggactagcttgtagtaaatatagatgacatattagtatttagttgtgatgaatgaataacactaaataacgtgacttaagcattaagcagactaaatgaaaggcattcttctgttaactcattcacttaaatatttattaggcacctactttgtgatgctatgctacattcaagactttcaatgaaaatgatttttaaaaagtaaaacttattaagtatatttctcagaaatgtgaatgtacaatagcctaatattaacaagataaccctgtgccttatctaatcatcctgtggaatttacccatattttggaggtggggctgaaaaatagtctgattattagaacatttgtgtttatatttacagctgccctattactaaaatatgcagttggcatcaaaattttaccatacacagtcactgagcccttcacctggaagcctctttatttcagcattactgctgaagagttacctgtgtctttctgtgtgcatttgaacatgtgtgagcatgcagccagtgtagcactacaagatgcttatcgctagaaataaattatagagtcgtgcagcatgaaaattatatgcccgggaatgcagaacacagggttaccttctgcctcctttctttgtcatggacagcagaggcagaaaggagaaagagatttattctaaagccatttgaagctgaccaagcaatttataacagatgaaatgctgatttattgctgcagagaaaataatgggtgttcttgctaaaatgccattaatagctttattgtttaaagtgcaaattatattcagcaatttgttagtcctcttttgaggcaaagttgaagtaattcaatgtaggcttttagcagaaaaaaggacaaagtaattaacaaatcgtaaaagaattcattcaccaagattggctgatagttgaattctctgtctgaactataaagacatagggaaaatttgcacttaagaaatacaagatgactcaagtatttgtttaaaactgaaaagccataaggaagttggagttgggacactacagatttaggagtatgccttctgttggtgtccactgtgtctgcaagatgtggtagtcaaccagagaaaaactgaaaa

SEQ ID NO: 12086 - DNA, 1583 bp, Homo sapiens
ctgggcctcccgaagtaaaactattttaaagtgtacagttcagtggcaataagtatattcatgatgttgtgcaactgttaccactattggaattccagaacattttcatcaccccaaagagaaaccccacaaccatcaggaaccagtcctcattctcccctttcctcagcccctggcgatctctaacctactttttgtttgttttccaattctggacatttcctgtaaatgggatctaataatatgtggccttttgtgtctgcttctttcactaaggaaaaatgatttgcattttactcttgcatgttctgtgttgtttgtgtgggcgtattcatctaggagaaatcttcctgaagttccttctgtaactaattctgcactgtccatggagtcatgttattgtcagactggtggccttagagacatgctgttttctgcaacatcgtgacacaaaagggtgcaccctgtaagaatcatttgggaatttttgttctcttttcacaaacactacatctcaaatttttaatttgatcaaatttgactctcggtgtctgcaattttctttagaaattaagctaacaaacattatgacattgtaatattgtgaaccatgataaaatcttaaatagtgacaaatgaagcatgtgataacacaatattttctactttttacataatgcagagatggcaaaattacacatttaaaataagtagatatatttttccatccattaaatggttctaatttgcttactgcttctgcctgtatttacttccaaaccaggtatctgcgagcttttcctgcggctactttggaacagaagaagccatagtaacatagaggtgaaaaaggggtaaaaggtttcaggagcacctaggatttcaggcccagtgagaaatcacttcaaccaaattgcagcaggggagctggtctcaggttgggaggagagaggggagacttatttcatgatcttttctctatttcccatacagggaagagatagtattttattattttttatgtattattttgtatttacttatttatttattaaaatagagacgggggtctcaatattttgcttaagctgatctaaaactcccgagctcaagccaccctcctgccccagcctcctgaataggtgggattacagatgtgtaccaccactcctggcactgggaagatattttaatatgttttagaccaatttagaaaatgaagctaaaagaggtcatctaagggaaatcgtttcctaacattttgatcccgcatgcctatcagcagagaatgttttgagcatgtactcctaatgtgtgtacatttatttaaacattctatgatggaaaattcttaatttgtatactatttactgttctactttttaaaactttttaaaatcaattttattgaggtatgatttacatacaataaaatgtacccatttaaagtgtatggaggccgggcgccatggctcatgctgtaatcctagcactttgggaggccaaggcaggcggctcacttgaggtcaggaatttcaccagagatggtggaaccccatctctactaaaaaaacaaaaaaaaa

SEQ ID NO: 12087 - DNA, 1583 bp, Homo sapiens
ctgggcctcccgaagtaaaactattttaaagtgtacagttcagtggcaataagtatattcatgatgttgtgcaactgttaccactattggaattccagaacattttcatcaccccaaagagaaaccccacaaccatcaggaaccagtcctcattctcccctttcctcagcccctggcgatctctaacctactttttgtttgttttccaattctggacatttcctgtaaatgggatctaataatatgtggccttttgtgtctgcttctttcactaaggaaaaatgatttgcattttactcttgcatgttctgtgttgtttgtgtgggcgtattcatctaggagaaatcttcctgaagttccttctgtaactaattctgcactgtccatggagtcatgttattgtcagactggtggccttagagacatgctgttttctgcaacatcgtgacacaaaagggtgcaccctgtaagaatcatttgggaatttttgttctcttttcacaaacactacatctcaaatttttaatttgatcaaatttgactctcggtgtctgcaattttctttagaaattaagctaacaaacattatgacattgtaatattgtgaaccatgataaaatcttaaatagtgacaaatgaagcatgtgataacacaatattttctactttttacataatgcagagatggcaaaattacacatttaaaataagtagatatatttttccatccattaaatggttctaatttgcttactgcttctgcctgtatttacttccaaaccaggtatctgcgagcttttcctgcggctactttggaacagaagaagccatagtaacatagaggtgaaaaaggggtaaaaggtttcaggagcacctaggatttcaggcccagtgagaaatcacttcaaccaaattgcagcaggggagctggtctcaggttgggaggagagaggggagacttatttcatgatcttttctctatttcccatacagggaagagatagtattttattattttttatgtattattttgtatttacttatttatttattaaaatagagacgggggtctcaatattttgcttaggctgatctaaaactcccgagctcaagccaccctcctgccccagcctcctgaataggtgggattacagatgtgtaccaccactcctggcactgggaagatattttaatatgttttagaccaatttagaaaatgaagctaaaagaggtcatctaagggaaatcgtttcctaacattttgatcccgcatgcctatcagcagagaatgttttgagcatgtactcctaatgtgtgtacatttatttaaacattctatgatggaaaattcttaatttgtatactatttactgttctactttttaaaactttttaaaatcaattttattgaggtatgatttacatacaataaaatgtacccatttaaagtgtatggaggccgggcgccatggctcatgctgtaatcctagcactttgggaggccaaggcaggcggctcacttgaggtcaggaatttcaccagagatggtggaaccccatctctactaaaaaaacaaaaaaaaa

SEQ ID NO: 12088 - DNA, 147 bp, Homo sapiens
ggtcaggagatccagaccatcctggctaacacggtgaaaccccgtctctactaaaaatacaaaaaattagccgagcgtggtggcgggcacctgtaatcccagctactcgggaggctgaggcaggagaatggcgtgaacccagggggg

SEQ ID NO: 12089 - DNA, 184 bp, Homo sapiens
gctgcgatctcggcactttgggaggccaaggcaggcggctgggaggtggaggttgtagctagccgagatcacaccactgcactccagcctgggcaagattgagcactgagtgagcaagaccccgtctgccatcccggcacctcgggaggccgaggctggcggatcactcgcggttaggagctgg

SEQ ID NO: 12090 - DNA, 1321 bp, Homo sapiens
aattttgatttttttttttttttattgatcattcttgggtgtttctcacagagggggatttagcagggtcataggacaatagtggagggaaggtcagcagataaacaagtgaacaaatgtctctggttttcctaggcagaggaccctgcggccttccgcagtgtttgtgtccctgggtacttgagattagggagtggtgatgactcttaacgagtctgctgccttcaagcatctgtttaacaaagcacatcttgcaccgcccttaatccatttaaccctgagtggacacagcacatgtttcagagagcacagggttgggggtaaggtcatagatcaacagcatcccaaggcagaagaatttttcttagtacagaacaaaatgaagtctcccatgtctactttctacacagacacagtaacaatccgatttctctatcatttccccacctttcccccttttctattccacaaaaccgccatcgtcatcatggcccgttctcaatgagctgttgggtacacctcccagacggggtggtggccgggctgaggcgctcctcacatcccagacggggcggcagggcagaggcgctccccgcatctcagacgatgggcggcctggcagagacgctcctcacttcctagacgggatggcggccgggaagaggcgctcctcacttcccagactgggcagccgagcagaggggctgctcacatcccagacgatgggcggccaggcagagacgctcctcacttcccagacggggtggcggcagggcagaggctgcgatctcggcactttgggaggccaaggcaggcggctgggaggtggaggttgtagctagccgagatcacaccactgcactccagcctgggcaagattgagcactgagtgagcaagaccccgtctgccatcccggcacctcgggaggccgaggctggcggatcactcgcggttaggagctggagaccagcccggccaacacagcgaaaccccgtctccaccaaaaaaatacgaaaaccagtcaggcgtggcggcacgcgcctgcaatcgcaggcactcggcaggctgaggcaggagaatcaggcagggaggttgcagtgagccgagatggcagcagtacagtccagcctcggctccgcatcagagggagacggtggaaagagagggagagggagaccgtggaaagagagggagagggagaccgtggaaagagagggagagggagaccgtggaaagagagggagagggagaccgtggaaagagagggagagtggaattttgattcttaaagttttatgtgataatgccaaattgttttcc

SEQ ID NO: 12091 - DNA, 581 bp, Homo sapiens
attgcaccattgccctccaacctgggcgacagcgtgagactccatcttaaaaaaaaaggtaaataatgtgtatggtttaaagagttttgataaatggatgcccctgtgtaaccatcacaacactctagatacagaacattttcatcagccctaaaggttctcttgtgccccttctcagttaaccagggagtccccccactcctccagccctttcagcccaggcaatacttttctgggctgaaaagatttttttacattaagaaatataaggagttccggccgggcttggtggcttatgcctgtaatcccagcactttaggaggccgaggcgagcggatcacgaggtcaggagatccagaccatcctggctaacacggtgaaaccccgtctctactaaaaatacaaaaaattagccgagcgtggtggcgggcacctgtaatcccagctactcgggaggctgaggcaggagaatggcgtgaacccaggaggtggagcttgcaataagccgagatcgcgccactgcactccagcctgggcgacagagcgagactccatctcaaagaaaaaaaaaaaaaaaaaaa

SEQ ID NO: 12092 - DNA, 1511 bp, Homo sapiens
ggcaatattgaactgatgcctggctgtggattgaaatggcttcctggccaactcctcttggctgtttaaaatgtttgtgaccccacctagacttaccttcaatttatttacactacgctcctggttctacgtttgtgactgtttattgtctttactcctttcaccttctggaaggtaaatgatagctattattaatatattaaagaggactagatccaaaagtttgtagtatatgtgtggtggggggggctttccctcatagggaagaaaaagtattagctttttcccacctgtcactaggttcgtggctgagtcacctttaacagactacagattaagaagagaaaataacacaaatttatttaataaaagtttcacatgacatgaagttttcagaaatgaagacccaaagatacagggaaacctgtgtatttcagtgcttggatttgatgaagaatagacagtggtggggaaatgtgattggtcaaagcaggtaggatctaatggtaataaactggaggggagcttaacaaggcctgtttgtgcagattcttaatgttcctgtgttttcagagataaggacatttcctttcctcagggaatagcgagggcacctctggaatgagggtcttatgacttactttaggggaaggtcagaaaattgttttatggcctgtttcaggggagaagggtgggaggaggtcagaaaccttcctgcttctgctactttctcaaataccaaggtaccatattttggggtagcatttactgaaccctatcaccctcaatgttttcttcctttcactcttcactagcaacactcaagcatttttcccaactcatcattatgtctgaggcaggactttctcctcagaaagtggttcctgatgacctggttgataatccatgctttacatactcatcttcagcagtcatccactctgacattatctcccgtcactcactctggataggatttccaggtgtccattatttttatagacttttagcccttggcttccattttcagtcacctgtggaactcttcctcgtggatgtttagtaagtacttctaattaaatatgtctaaaatggaactcatccagttttccctccatcctcccaccaataagaaagcctgttgctattctgatgcaccgcctcccccggccccccactcctccccacagacacacacttaaatttttaatccttggccaggcacagtggctcacacctgtaatcccagcactttgggaggccgaggtgggcagatcacctgaggtcaggagttcaagaccagcttggccaacatggtgaaaacccgtctttactaaaaatacagaattagctgggggtggtggcacatgcctgtaatcccagctactcaggatgctgaggcaggagaatcacttgaacctgggaggcggagtttgcagtgagccgagatcgcaccactgtactccagcctgggtgacaagcgaaactccatctcaaaaaaaaaaaaaaaa

SEQ ID NO: 12093 - DNA, 33895 bp, Homo sapiens
aatctttcatttttacagattgaaagtagtgttccctgccaactgctagagtcagtgctacaagaactaaagggtttgcaggaatttctagacagaaactcccagtttgcaggaggaccattaggaaatccaaagtaagaataaatagggtttattaattcatctttttcttttcgttgtattttttgttgagatgatttacatactacaaagttggtccttttaaagtgtgcagtttagtattttttagtgtatctacaaggttatgcaaccatcaccactatctaattttagaacattttcatcacagcaataagaaactcttgtgcccatgaccagccattattattcatggaccttcccccagtccctggcaaccactaatctactttctgtctccacagatctgccttttctgactatttatataaatattatattttatatattacataagatacacaatatataaatatattatatgaatatatgtaaatggaatgtttatagaaatatagttatataaatggaatatttatagaaatatagttatataaatggaatatagaaatatttatatgaatggaatatttatagacatatttatatacatggaatctttatagaaatatttatataaatggaagtatgcaacagataacctttggtgtctgtttctttccccaagcatgttttcaaggtttgattgttgtagcatgtattactacttgtctcatttctcagtttatcagttgatagatatttgggttgtttcagctttttggctaataagaatgctgatatgagcattcctgtacaagtttttgtgtggacatgtgtttagacggactcttgctctgtcacccgtgctggagtacgaaggctccaacttggctcacagcaacctccgcctcccaggttcaagcaattctcctgcctcagcctcccaagtagcttagattacagatgtgcaccaccatgcccagctaattcttctttgtattttcagcggagacggggtttcaccatgttgaccaggctggtcttgaactcctgacctcatcatccactggcctcagcctcccaaagttctgggattacaggcgtgagccaccatgcccgaccaagagtggacatttgggttttttttttgagacggagtttcgctcttgtcgcccaggctggagtgcaatggtgcaatctcggctcactgcaacctccacctcctaggttcaagcgattctcctgcctcagcctcctgagtagctggggttacaggcgcctgccaccatgcccagctaatttttctatttgtagtagaaatggagtttcactatgttggccaggctggtctcaaactcctgaccaccttcaggtgatccaccatgcccagcaataatggattttttttttttttttgagacagagtctcgctctgttgcccagcctggagtgcagtggtgcggtctcagctcactgcaacctccgcctcccgggttcatgccattctcctgcctcagcctcccgagtagctgggactacaggcgcttgccaccacacccagctaattctttgtatttttagtagagactgggtttcaccgtgttagccaggatggtctcgatctcctgacctcgtgatccgcccgcctcggcctcccaaagtgctgagattccaggcgtgagccaccgcgcccagccaagaatggatatttttaagcctctaatataatacggactttttgttgaaaaataataatcacatggcattgggggagtcacatcactccttagaattgttaacgaggtattacagtataatctttttaaagcatatgtaggccaggcagagtggctcacacctataatcccaacactttggaaagccaaggcaggaggattgcttgaagccaggagttcgagaccagcctgggcaatataggagaccttgtcactacaaaaacacataaataggccgggcgtgatggctgatgcctgtaataccagtactttgggaggctgaggcaggcggatcacctgaggtcgggatttcaagaccagcctgaccaacatggaaaaacccgtctctactaaaaatacaaaactagccaggtgtggtggcacatgcctgtaatcccagctactagctaggctgaggcaggcgaatcacttaaacctgggaggcggaggttgcggtgagcccagatcgtgccattgcactccagcctgggcaacaagagtgaaactctgtctcaaaaaaaaatatcataaataaataataaagcatacataaatatacacttctttaaaagcaaaaacagagtctaagtaagtacacttttatataacattattcatactttgtgtgtgtgtgtgtatacatatatatatatattcccctgcccctgccgaggcagagtcttgctctgttgcccaggctggagtgcagtggtgcaatctcagctcactgcaacctctgcctcctgggctcaagcagttcttctgcctcagcctcccgagtagctgggattacatgcatgtgccaccaagcctggctaatttttgtatttttagtagagatggggtttcaccatgttgcccaggatggtctcgatctcttgacttcgtgctccgcccgcctcagcctcccaaagtgctgggattacaggggtgagccaccgcgcctggcctgtctttatcttttaagcaggagaatttacctccttcccattttattggaattagttaaatgtggtttattgttttggtttggtttttttggagacagagtcttgctttgtcgcccaggctgcaatgcagtggtgcaatctcagctcactgcaacctccaactccctggctcaagcgattctcctgcctcacccttccaagtagctgagactacagccccacaccaccatgcctggctaatttttctatttgtagcagagacagggttttgccatgttggcaaggctgatcttgaactcttgacctcagataatccaccttcttcagcctcccaaagttctgggattacaggagtgagccactgcatctggtctagttaaatgtttgatttttttctccccatcctgaatttgtgctttttgtttattttcttccctttcccatttccttattgtattggattgatcaggcctctctctaccttaaacaccaattaagaagttctacatatgatttttcttcctctgttagtcttaaattctgacagacatgcatctcagtcagcattaataatttaacaaactctattacattttgtttccttgccttctactgccatccctctccctccaaattatctggaattttacttgtcagatgtttttagtttgtttggttttttttctaacattatggtcttttgttaattgaattttaccattacatctgcaattatatgtaaattttctaatctacttctaatttctcttaattactcatttatctttacagtttttagcaggatgtttttttcattgatgtttcttgaattgtcacagaagcagttctgtcatctgcaaacagagatagtttcatcttttccatcttttcttgtctagctctacttgctttctcctctctgcacaaggtaatctctctctctctctttttctttttaattgagacagagtttcactcttattacctaggctggagtgcgatggcatgatcctcggctcaccgcaacctccgcctcccgggttcaagcgatgctcctgcctcagcctcctgagtagctgggattacaggcatgagccaccacgcccagctaattttgtatttttagtagagacggggtttctccttgttggtcaggctggtctcaatctcccaacctcaggttatccacccgcctcagcctcccaaagtgctgggattacaggcatgagccgctgcgccctgccacttatctctgtctgtcttttctctttttttttcttttttaggcaatcttgctctgtcattgaggctggagtgcagtgatgtgatcattattccctgcaatctcagactcagccgcctgagtagctggggctacaggcatgtgctgccacacctggctgattttttcttatttttctcagagatagggtctcactgtgttgcccaggctggtctaaaactcttggcctcaagttatgctccctccttagcttcccaaagtgctgggattacaggcatgacccactgcatccacccttacttgaggtgttttttggttttcttttttgagactggtctcactctgttgcccaggccggagtgcagtggcatgatcacggctcaccgcaactttgacctcccagcttcaagtgatcctcccacctcagcctcctgagtagttgggactacaggcacatgctaccatgctcagctaatttttttatttcacattttgtagagacaagttctcactgttttgcccacgttgatcttgcactcctgggcttaggtgatcctcctgtcttggcctcaaaaaatgctgggattttaggcatgagccatccgcactcagcccttattgaatatgtttaacatattcatatatttaacatattgaatatgcttaccatattcaataagtgagtttgtcaaatgtatttactgcattttacagagatgatcatatcattttcccccttacctttaacaatagagttaatacatgtcctaatttcgaccaacccttggattcctataacattagtttcattgactatggaaattttttaaacagatttttgagatctactttacataccactaaatttactcattttgaatgttcagttcagtgacttttagtaaattcatagaattgtgcaaccatcaccacagtccagttttagcacacttccattatctaggagacatacctcatgtccattagcagtcactttccattcccacttcttagccccagacacttactgatctgctctatctctgtagatgtgcctattcttgacatgtcatataaacagaatcatactgtgtggtctttgagtctggcttctttcacttagtgtgttttgggggctcatgtttgagatttatgtggtaggatgtattcatgctttgttcgtttttattgcccaatgaatgtggaattttaagatcatagaccatttctcagatcttcgtatacattttgcaccattttcttcccaaagtttaatgttgtagatgaaaaagtacattatctgtatgattctccttcctttgtaagtgacttagtgtttactttgaaatttttttgtgtttttttctttttgttaccgaaattcaaaagtcacatgatgtctttaggtatatcttctttacagctctcagtgagccttaagaatgaacgtcttggctttgatcagttttcttctctcgttttttatgtattgtgatacacattgaatatcccttatccgaactgtttggaaccagaagtgttttggctttcacgttttttttgatttttaaatatttgcattatacttaggttgagcaccccattccgaaaatttgaaatcgaaattgctccagtgcgcatttcctttgagcatcatgctgatgtgcaaaacgtttcagatttggggacatttcagatgttagtttttttttttattagggatactcaatctatgtttcttctgtcccattctctttggagaatcatattaactcttttgtatctagcttgtttcttctcttccgtaatttccttccttcctttctctcctttaccccctctttttacttgatctttttttttctacaggttaggaaaatttatagctgatgttctcagtcatttaattgatttaatctcagtcattttaagtagcatctgtttagtctgtgtcataaattttttctggccatcagcccttctggtgttggttgcccaaccttatgaattatttaaaaaaagtaaacatattaaatgtttgaattgtactgtatgtgttatatctcaataaagctgttataaacacacacattctgcaatttctgtttcagtactactgctaaagtgcagcagaggctgataggattcatgcgtcctgaaaacggaaatccccagcaaatgcaacaggaactgcagaggaagtttcatggtaaattattgcttctcatcagttaagcgtacatgacctcagtaaaattttattacttgaatagaaaacaatggactttcttagtaagatgtactttgtacacaaatatttgtaattaaaatatcagtgtaattgggtccggggtggtggctcacacctgtaataccagcactttggaaggctgagttgggaggatcacctcttcctgggaggcagaggttgcagtgagctgagatcatgccactgcactccagcctgggtgacagagtgagaacctgcctcaaaaaaaaaaaaaaaaaagtgtgattgggaaagtaggataatatggatattaatatggatattgtatatttccctatctcttttagcatatacatttttgttccttcctccaccagaaaacatgatacacacctatttcattatgttttttttattgtggtgaaatatatatataccataaaatttaccatttttactttttatttgtttatgtttctgagacagagtttcactcttgtttcccaggctggagtgcaatggcgtgatcttggctcactgcaacctctgcctcctgggttcaagaaattcttctgcctcagcctcccgagtagctgggattagaggcatgtgccaccacgcccggctaattttgtattttcagaagagacggggttctttatgttggtcaggctggtctcgaacttccaacctcaggtgatcccgtccgcctcggcctcccaaagtgctgggattacagatgtgagccaccgtgcccagccccatttttactttattttatttatttatttatttttttgagacagagtctcactctgtcgcccaggctggagtgcagtggcatgatctcggctcactgcaagctccacctcccgggttcactccattctcctgcctcagccttctgagtagctgggactacaggcgcccgccaccacacctggctaattttttttttttgtatttttagtagagacagggtttcaccgtgtttaagcaggatgatctcaatctcctgacctcatgatccgcccacctcagcctcccagagtgctgggattacaggcaagagccactgcgcctggcccgtttttactgtttttaagtgtacagttcagtggcattcagtatattcattttatgtacccattaccagcatctatctccagaacttttgtcatcttccccaaaaatgtcactctgggctgggcgcagtggctctcacctgtaatcccagcactttgggaggccatggcaggtggatcacctgaggtcaggagttcaagaccagcctggccaacatgttgaaaccccatctctaccaaaaatacaaaaattagccaggcgtggtggcgggcacctgtaatcccagctgctcgggaggccgaggcaagagaatcacttgaacccagcaggcggaggttgcagtgagccgaatttgtgccattgcaccctagcctgggcaacaagagcaagactctgtcttaaaaaaaataaacaccaaaagtcactctgtacccatgaaataataaccccccatttttttcccctatcctaggtccctggcaaccaccattctactttctgtctcttgaattttacaactctgggtaccctattaggatgaaatcaaattttacattttgtggcaggcttatgtcacttagcatactgtcctcgaggttcatccatgttgtaacgtgtcagaatttccttcctttttaagactgagtaatttctattgtgtatatgtgcatatgtgcacatataccacatttcctttatccattcatctgttgatggacactgagttacttccgttttttggctatcgtgaataatgctgctattaacatgggtgaacaaatacaaattaaagcctctgctttcagttcttttgggtatatacccagaagtggaattgctatatcatatggtaattctattactaatttttttgatgaactgccatactgtttcatagcagctactgcattttatgtttatgtttatctttatttctttttgagacggagtttcactcttgtctcccaggctggagtgcaatggtgcgatctcagctcactgcagcctccacctcccaggttcaagcaattctgcctcagcctcccgagtagctgtggttacaggcatgtgtcaccacacccagctaatttttttatttttagtatagttggggtttcaccatgttggccaggctggtcttgaactcctgacctcaggtgatccacccacttcggcctcccaaagtggtaggattacaggcgtgagccactgcgcctggccagccacagcattttatacttctagtagcaatgcacaagggttccaatttcttcacatctttgccaacatttgtctcattgggattttgatttgcatttccctaatgattagtaatatgcctttttatagagctaaaaatatgaatcaaatatttcattgtgctttttatcaattataagtagtaacaagtaaggaaagagcaaggcaactgaaaagttctcataatcttcagttattccagatacaagttagaacaataataagttattgcatgaactttttgtgccatttaattttttctaagttcttttgccttccattgttagggttagagttactttttctggccgtgatagaactttctggtttgtttgttttgagatggagtctcgctttttcgccgaggctggagtgcattggcacaatcttggcttactgcaacctctacctcccaggtccaagcgattctcctgcctcagcctctcaagtagctgggatcacaggcgtgtgccaccacacccatctagtttttgtgttttcagtagagatgaggttttgccactttggccaggccggtcttgaactcatgacctcaggtgatccgcccaactcggcctcccaaagtgctgggattacttgcgtgagccaccacgcctggccagtagaactttctcagttaacactcaaccatttacttttgtcccaagttactttcttccctactgaggaccctaggtttctattcatcattttgtaaattcttttttactatcttttaaattttttgtctctcttttatttttttggagatggagtcttgctctgtcgcccaggctccgcctcctgggttcacgccattctcctgcctcagcctcccaagtagctgggactacaggcacccgccatcccccccaccagctaattttttatgtttttagtagagaccgagttttaccgtgttagccaggacggtctcgatctcctgacctcatgatccacctgcctcggcctcccaaagtgctgggattacaggcgtgagccaccgcgcccagccacacagcaatattttcatggtttatgtgtacctacacaaacacagaagcatatatatatacacacacggagaagataataacataaatactactgattatcatggttgcctgtaatgggggctaggaagaaaacaacagggatttcaaccttaactacagtttttatttgaaataaagcaacttaacctatgttattttataataatttattttgttttctcattagaggctcaactaagtgaaaagatttcacttcaggcaattcagcagttggttcgaaaatcatatcaggctctggctttatggaaacttctttgtgaacatcaattcactatcattgtggcagaacttcagaaggtaattttttttatttttttatgattataccattaatactatgtttggattttttggatgagtattttggctttggaggggattattttgggaagcatttaagttatgatgaagttagtatgttatgggaagatggcacaaaaaaagcgtaccaacttgggggacctattttttcaaagccgcaagtttttacttgtgggtatgtgaatgaagtcatactttacaaaacatattttttaaaacagtggactttaccctttatttgagctacaggttcttctgagaatctgataaaagctatctctcactacccttaaagaaatgcatatcgacatggacacacagacttttgcttataatttcaaagggcccaacaacctaaattaaatactcttgactgggcaccatgcctcacgcctgtgatcccaacactttggtaggctgaggcaggaggatcacttgagcctaggaattcaagactatcctgggcaagatgtcaggacccatctctactaaaaataaaaaataaattagtcaagtgtggtggcacatgcctgtagtcccagctacttgggaggctgaagtgggaggagcacttgagcctgggaggttgaggcgccacttagccatgatggtgccactgcaccccagcctgggtgacagagtgagaccctgtctctctctgtctctctcacacacacacacacacacacacacacacatatacaccactcctacttcattttatgttttcttttttttttttttaagagatggagtctcactctgtcgcccaggctgcagttgtgcaatctcggctcgctgcaacctccacctcccgggttctagcaattctcctgcctcagcctcctgagtagctgggattacaggtgcatgccaccacgcccagctaattttttgtattttagtagagacggggtttcaccgtgttgcccagggtgatctcgaactcctgagctcaggtaatccacccgcctcagccacccaaaatgctaggattacagacgtgacccaccatgcccggcaactgctcctactttaaaggaagatatttatcactgtaggaaataaatggttcatatttcttttgatgttcacatttgaatcctttctaaggataaggataatcaacattaatctaaatgttagatagaatatatagaggaaatttattcctaccttttatttaattgtgagcatttctaaacgtatacaaaagtagagcaaaaactgtaactcccatatacatttgactcattcagcattttcaagatactgtgtttctaaaaaaaatagacagttccttgaacaacaacaatgtcatgatcagttaccagtttttcttgagacagtgtctcactctgtcacccaggctggagtgcagtggcatgatcacggctcactgcacccttgacctctctggactccagtgattctcctactttagcctcccgagtagctggtactataggcacgcaccactacgcctagctaatttttgtatttttttgtggagatggggtttcaccgtatctcctaggctggatagttaccaatattaactgtcaatatttgatagcaaaatctgtcttaaaaatgtctttttacagattggttcattcaaatcaggatctaaacagtttaaggggtttgctcatggaatttgtttttctctttcatctgtttcagtctaaagcagtctttccttctttttcttttccttgctgttgccttgtagaaatccagtcatccatccagtagaatgtccagcattctaaggacattctaaggcttttttttttttaatcctctttgtagcgagcttcttcctctatctcctgcattttctataaaatgaaagtttattatataggcttgattcagttcaggtccttttttgaggaagaatagaatacttcataggtagtggtttattcatcagactgttagaagatacaaaaggtttcgttgtccttcttttagttatactaagataaattgctggattcaagtagtaagcctaatactgccattgtggaattctccatcagattttaatcatccattgataatcattgctggaatttattatttcatttaggattacaaaagggtaatatttatttatttgtttgtttgttttttattttttttgagacagtgtctcattctgtcacccaggctggagtgctgtggagcaatctgagatcactgtaacctccacctcccgggtacaagcagttctcctgcctcagcttcccgagtagctgggactacaggcatgtgccacaacgcctggctgatttttgtagttttagtaagagaccgggtttcgccatgttggccaggctggtgttgaactcctgacgtcaggtgatctacctgccttggcctcccaaagtgctgggattacaggcatgagccaccatgcccggccaaaaggataatattttaaatctgtgattccttccccagttactagctgcaattctgtaaaaaaaaaaaaaaaaattctttttccttgtcctgtatggatatttcattactctgaaacacttactttttgactctcgtataccatttttcaacgttggaaggcagtctcctcattctttccactagtgtccaatgaatagtgtggcttttgttggtggttttgtttcttttaaatacatactgttttttatttttaaaaattcaagctaatatatttaattatgaaacttatctttttcataccaagtagaataataattttgagttttatagagtgataaatatattgtaggtaggtttttatcctgggtatgtttttgtgatccatcttcaaagctctcttccttacatcaccaatggcatgctcaatgaatgcaaattaaagatttgttcaagaattttaacacagtttgggtatttccttgaatttagaaaaaagagatagcagtcacatcactaacagaatcttttactatagtataaatcaatactttagagcttcatttggacaagcagatttgttcacaatacagattaaactccaatattattataaggcctagaataatggaattctaacagtgtttaggaaggagtaatatgtaagcccaagattttcaaatatagccaagtgattgttttttccattttataaccaaagccaggagatctgactctagttttggctctacttaagctttacttttctcatttggaaagtgagagttttggactagatctactgtaggttcttttccaactctctatgattttatgtaagttcgcaaaaatttgtttctactaattagtatattttcgcttttcaattatagagtctattaatatttaggttattttaatttattaaaataatttcattatgtttagaaatatggtatttctataattgtgatagaaaagttttatgctcctaggaacttcaagagcagctgaagatcaccacctttaaagatcttgtaatcagggacaaagaactcacaggggcattaattgcctctcttatcaactgctacatcagagataatgccgctgttgatggcattagtttacatttacaggatatctgcccacttctatatagcactgatgatgcaatttgttctaaggtatgatactttattacctatttcattgtttgttataagaggtatcatgtatgatgaaccatcttgtttcacttaatataggacctcagtcagttagatctcttaacctctcctagcctcagaatcctcatctaagaaaggggttggaatatgtggcttcttaaaaccagtgtatactcttttaagcttagcttttctttttaaaaatatttttatttatttatttgacacagggtttcactctgttgcttaggctgtagtgcagtgctgtgatcatagctcacagcagcttctaagtcctagactcaagcaggcctctcatgtagctaggggctacgggtgtgcaccactacacccagccaatttttttgttttttatagagacaagttctgatttgttgcacaggctggtcttgaactcttggcttcaagtgatcctcctgcctcagcctcccatagtgctgggattataagtgtgagccaccatgcccagccctcctttaagtttttcataaagaatattctctctttttttttaagactgagtacgatctcagctcactgcaacctccacctcccaggttcaagtgattctcctgcctcggcctcccaaatagctgggattacaggtgtgcaccatcacacctggctaattttttatatttttggtagagacaggatttcaccatgttgtctaggctggttttgaactcctgacctccgcctgcctcagccttgcaaagtgttgggattatagacatgagcctctgcgcctggcccataaagaatctttgatagtgtttctaggccatattaaaaaaccaaaggtgagaaattaagaaaaatcactaaatttagaaattaaggaaatttaggggataatttatctccttagcttaaggaaaagtactaaaacttcaagtaaatcttttagtgaattagagttaatgggggcatttttattgatcctttcctacaggtggaaaaaataaataaatcagtgtcacatggactgcctgctgcccaataatgtattgactaggcaagagaattaccagacaaaagttctcttgcttaacatatttgggagaggaattaagaatagctaggaatctttggtcaaaaacttttctgcctaaaattaagaagtaagtttgtagagttgttttcattttaatggtaataaccatatataaatttagacatagactaaaacttagttgacagcatcatctgtctgcttgattttatatatttttaagttcttgttatctcctcttctaggcaaatgagcttctccagcgttcccgacaagttcaaaataagactgaaaaagaaagaatgttaagggaatcattaaaggaatatcaaaaaattagcaatcaagtggacctttccaatgtttgtgctcagtatagacaaggtgagaaataaaatgtttcttgtatcttttactcaactcaaaagacaaacaatagtgtatgaatgaagcaagctaatgatgaaaagccactttccagatgcaaatcttctttcagcatcagaggccgagtgaaaggacgtaggaatgtggtatcattgtgttgcaatatttgatgactacactgacctgcagaagctgtaatgttctttctattttttgaaatgtacttttttttttttttttttttttttgagagtctcgctctgtcagccaggctggagtgcagtggcacgatctcagctcactgcatcctctgcctcccaggttccagcaattctcctgcctcagcctcccgggtagctggtattacaggcgcacgccaccacgcccagctaattttttatttttttatttttttattttttttattttgagacagagtcttgctctgtcacccaggctgaagtgcagtggtgcgatctcagctcactgcaagctctgcctcccaggttcacgccattctgcctcagcctcccaagtagctgggactacaggcgcctgccaccatgcccggctaatttttttgtatttttagtagagatgggtttcaccatgttagccaggatggtctcaatctcctgacctcatgatccacccacctcagcctcccaaagcgctgggattacaggtgtgagccaccgcgcccggccattgcccagctaatttttgtatttttagtagaggtggggttttaccatgttagccagggtggtctcgatctcctgacctcaggtgatccacccatctcagcctctcaaagtgctaggattacagacatgagccactgcgcccagccgaaatgtataactttttagcattagagtttcagttcttgtccagttcaattactgtatgttttacattgctttctggattacatttatttttcagatatttaaaattttttattgagttttaaggtataatctgcttactttttaaaaaattactttaaatcaaatctaacataatgtaaaggccataactatttgcacaggtattattttgaatcccaaggtatttttttccccccagtagggaactaaaactttcctttttgttatttgaaataggatctttttttccaatgaagaaatatatatatatatatatttttttttcctttttctttttttttttgtgagacagagtcttgttctgtcacccaggctggagtgcaatggtgcaatctcagctcactacaacctctgcctcgctagttcaagtgattctcctgcctcagccttttgagtagctgggattacaggcgcatgccaccaggcccagctaatttttgtatttttagtagaggtggggtttcaccatgttggtcaggctggtctcgaacccctgaccttgtgatctgccccctctcagcctcccaaagtgctgggattacaggcgtgagccaccacacctggcccccaatgaagaaatatatttaacagttgccttttaggcatattaagaccttttccttctgaagacctatcagaaatattttatgttagcagggtgactattgtacagtagagacataaccttgatcattattttcatgtgccagctaaggaaaaatgtatccaacttagtagtaagtcataggtcttcattcttttctttcccatcagtgagattttatgagggtgtggtggaactttctcttacggctgcagagaaaaaagatcctcaaggtcttgggcttcatttctataaacatggagaaccagaagaagacatagttggacttcaggccttccaagaaaggtgcattccattacgttagcagattgtcatctttatggatacagacttttctttgcataatgttttttgttttttgttttatgttttttttttttttttgagacagagtcttgctctgtcacctgggctggagtgcagtcgtgtgatcttggctcactgcaatctctgcctcccaggttcaagctattctcgtgcctcagcctcccatgtagctaggattacaggtgcacaccaccacgcctggctaatttttgtatttttagtagagacagggtttcaccattttggccaggctggtcttgaattcctaacctcaagtgatccacccacctcagtcttgcaaagtgctaggattatagccatcagccaccgtgtctggcctctttgtgtaaaggtcgaccacccaaagtgctgggattacaggcatgagccaccatgtccagtaggatttcattttaaaggataatttttaagtattcccaaatttgttgagactgttaaaaaggaaatgtgtgtccttaaaagaaatataggccaggcacagtggctcacgcctgtaatcccagcactttgggaggctgaggtgggcagatcatgaggtcaggagttcgagaccagcctggccatcatagtgaaaccctgtctctactaaaatacaaaaattagccaggcgtggtggtgcacacccgtaatcccagcaacttgggaggctgaggcaggagaattgctttaacccgggaggcagaggctgcagtgagctgagattgcaccacagaactccagcctgggcgtcagagcagggctccgtctcggaacaaagaagaaatatataacctttctataacatatatatatggagggtgttttgttttgtttttgtttttgtttttgagacaaagcttcactctgtctcctgggctggagtcagtggcaccatcatagctcactgtactcttgaccttttgggctcaagtgatccagtgatcctcctacctcagcctcctgagtagctgggactacaggcacatgtcaccacactcggctaattttttttttctctttaatttctgtagagacagggcctcactatattgcccaggctggtctttaactcctgggctcaagcaatcctttcttctcagcctcccaaagtgctgagattagaggtgtcagccaccacatctggcgaaaacatatttttttattactatatttaatgactttacccttttaatgtttaaccaaacacttctcaaacttattgaaaaagtatatggtttgtattattttaaatgccaaatatgtacatctattctgccaaatagtcttgaaatccttgtatatacttaggtaaggtaaatcaatggctttcttttttgttatttgttttgttttgtttttggggggttttgttttttgtttttgagacagggcctcattctgttgcctgagctggagtgcagtggcatgataatagctcacttgcagccttgaattcctaggctcaagcgatcctcctgcctctgcctcccaagtagctgggattacaggtgcacaccgccacgcctggttaattttttgtttcgttttgttttgttttttgttcgtttgttttttgagacagggtcttgctgtcacccaggatggagtgcagtggcatgatctcagctcacctcaacctctgcctcccaggttcaagcaattcttgtgcctcactcacctgaatagctggcactacaggcatgcaccaccaagcccggctaatttttgtatttttgtcagatacggggtttcaccaggttggccaggctggtctcaaattcgtgacctctggcagtccccctgccttcgtctcccagagtgctgggattacaggtgtgaggcactgtgcccagccaattttttgtattttttgtagagacgtggtcccgctctgttgccctggctagtcttgaactcccagcctcaagccgtcctcctaccttgacttccctatggctggcattacaggcgtgagtcaccacacttaccatcatttgctttctagttaaataatgtaattgttccttttccattttctttcagattaaacagttacaaatgcattacagacacacttcaagaactggtaaatcaaagtaaggccgctcctcagtctcccagtgtacccaaaaaacctggtcctccagtgttgtcatctgatccaaatatgctgagtaatgaagaagcaggacatcatgtaagggacatagtatattttcattctgagaatacactgtttagaagttctccatggtaatggtagcacagtcatcttggggaaaggtggtagttcttagaagttatcatgtaaggattcttgatttcttactggagtttatagggctaaagggttgtgatgcccagaaacagagcctttaactgctaatttttactattttctttattttagtttgaacaaatgcttaaattgtcacagcgatccaaggatgagctctttagtattgccctttataattggctaatacaagtcgaccttgcagataagctgctacaggtaaatcttttttcattgcagttgtgttaattattcttaaggagcataactcaatgatttaagcacatatatagatgtaaaaaattcagtttctcatcccatgcctgctattagatgttagtataaagctgagtaatgcagtatcttttcctaaggggcaaagtaggctactgctccaattttcttgttaattcgaagctgattgggatagtttgtattgcggggtagaaatcactggattatgaatatgagtcctgtaggtcatcttatcttaactctgctgttaagtcactgtgacttcagatatgtccttttacctaccctaagtttcagtgttcctcaatctgtttaatgaatacatagcatttgataatttcaataatgcctttgagctcaatgtctaggaatcaatagctgtgttatcaaagtttatttaaaaatttgtaattttatagtaaatttcctttttttttttttttttttttttgagatggagtctggctctgttgcccaggctggagtgcagtggcatgatctcagctcactgcaacctccgcctcccgggttccagcaatcctcctgcttcagcctcccaagtagctgggattacaggcacccgccaccacgcacagctaatttttatatctttttagtagagacggggttttaccatgttggccaggctggtctcaaactcctgagctcaggtgatctgcccacctcagcttcccgaagtgctgggattacaggcatgaaccactgtgcccggccaaatttccttttcttttttgaggcagggtctcaatctgtagcttaggctgaagtgcagtgcaatggcacgataatggctcactgtagccttgacctccctaggctcaggtgatcctcacacctaaccctcctgagtaactagaactataggcccgcaccaccacacccagctaatttttttgtagagacgaggttttgccatatattgcccaggctggtctcaaactcctgagctcacatgatctgcccacctcggcctcccaaagtgcgaggattacagacatgagtcgccatgcccagcctactaaattattgttatcaacctaatagaattgttttggaaactcttatgctaactgtggtaaaacaaaaattgtttataataagaaaatttgccctctcttttatctgttagtattggattataattttgcttgttttcataaaacaaggcaaagttgtagttgacttaaaaatactatattttccttatcaggaacattatctgtaggtggttagaaaatttttctgaataactatataatttctaggttgcttctccatttctggagccacatctagtccgaatggccaaagttgatcaaaacagagttcgttatatggatttactctggcggtattacgagaagaacagaagtttcagtaatgctgctcgtgtactgtccagactggctgacatgcataggtatggcataatattcttattgtgaagaatgattcaaaactgagctatatgtacttacattcagttttctttaattttagaagaatctaagttttaatatactgacctaaattttttaaataggatgttactttttagtcataaatgtatttctttatgtgttgtctaaaattgtggatctctcttatgagaaatctaaaatagatttttttttaaatctaatgattttttttcaagtttcagatggctttttatgtgtgtttggtatgaaacagtacatactaattgacgtatttgtatcatcaatccttaagaaattgtgtaactaaaaataagcgttttcccttctagcacagaaatttcacttcagcagcgactagagtacattgctcgagccattcttagtgccaaaagttccactgccatttcatcaatagctgccgatggtgaatttcttcatgaattagaagaaaaaatggaggtaagtgctaaagatcttaagctgtgtccacattgagtactagccacatagttattccacattccattcttcccttggtaagtaataggtctgagaagtcattattattctagttgcttttgtctgtttatatttatttttatgtttagatataaatcttaaagatttttaaggatgcacttgggtcataaaaacattgctataatttagaagttttctctttggcacttcgaaaggtttttcccagctgggtgcagtggctcacgcctgtaatcccagcactttgggaggccgaggcagccagatcatgaggtcagaagttcgagaccagcctggccaatatggcgaaaccttgtctctacttaaaaaaatacaaaattagccgggggtggtggcacacacctgtagtcccagctacttgggagactgaggcaggagaattgcttgaacccaggaagcggaggttgcagtgagctgagattgcaccactgcattccagcctgggagacagactgagactctgtctcaaaaaataataataataaaaaataaatgtttttcccaactgtttcaacagcaagtggattacatcacattcaccatttattttggaagcaaataagtagatgtatgaagtagagtaggctaaaattccctaactaagagaatcaagaacataccatcgtccaaatacaaaagtttgtttcttattcacaaaaatccaaggtgagtcttcctgattggcagctggctttcctccgtgtggttgatttaggaacccaagttctattttctggcactaccattccctagggcctctgctttatcttcagcagagggtggaaggaaaagaaagaacacattcactgtcttaaaaactatagccctgacatgacacactacttctactcacattcctttgaagagaacttggttgtatggccatacctcccctacagaggaggctgagctgtatagtctaaccatttggctacagtcttggaaggtataagtattgggcagcaaggagtctgccacagtatacttcctgtgaaatctattatgtttagttgatgtctgttatgataatattagcctattatgatagaaatcttcatttatacattattttagcaaacttaaagtcagatagtaggatccgttctttcaaacgtatgttgatttatcataaataaattaagacatcctgttttctgcccaaactaggttgctaggatccaacttcagatacaggagacactacaaaggcagtattcccatcattcttctgtacaggatgcagtttctcagctggattctgagctgatggacataactaaggtaataaaaaagcaagtgaaatttttatagtagttacctaataatgagaaatttttgttttttattttgctttttgtttcatgggggaaattaccttatctccacaaataagataaggcatctttggcagcttgtcactgggctgacagatcaccactgcttcatctgactcctagaaaaaggctaagctactctttccaggccagtagctacaaagaacctatcatcctcgcatgagagctgtgttaaaaccagcttatttccagcctgggcaacatggcaaaacctcatctttacaaaaaaatagcaaaaaaggccaggcactgtggctcacgcctgtaatcccaacactttgggaggctgaggcgggcagatcacctgaggtcaggagtttgagaccagcctggtcaacatggggaaactctgtctctactaaaaatacaaaaattagccaggcgtggtggcatgcgcctgtaatcccagctacctgggaggctgaggcaggagaattgcttgaacccaggaggtgggggtttcagtgagccgagatcatggcactgcagtctaggagcctgggcgacagagcaagactccatcaaaaaaaaaaaaaaaaaattagccaggtgtggtggtgtgtggttgtagttcatctactcaggagtctgaggtgggaggattgatttagcccaggaggcccaggttgtggtgagcctcgatggtgctactgcattccagcctgagtgacagagtgagaccctgtctcaaaaagaaaaaaaaaactaaaaaaccaaaaccatcttatttatggcctcgcttcttgccttggaaaaactaacttatctttgcttaactctctaaacctctttctctctctgtaattttctgagcagttccttcctcttcatttattcttagacatagttccaggtaccctgcaacactttgagatttgtcagtattcctgtgattcttcaacccattgtttatacaacactagttctaaaataccattgcaggaggtttgtagggaaggtggggatggttaatgggtacaaaaacaaaatgaataagacctatctgatagcacaatagggtgactatagtcaataataactgtatattttaaaatagagaatgtaattggattatttgtaactcaaaaggataactgcttgaggaatagacattctccatgacatgcttatttctcattgcatgactgtatcagaacatctcatgtaccccataaatacatacacctactgtgtacccacagaaatttgaaaaaatgaattttaaaattaataaatagaatgtcgttgcaacatcttcttcccagccaagaaaaaagctctacatgctaaaatgtgtttgaatgtatttaccatacccttaccctttttttttttttttggcggggggagacagagtctttctctgtcaccaggctagagtgcaatggcgtgatctcagctgactgcaacctccaccttcctcagcctcctgagtagctgggactacagccatgcaccaccatgcccagctaattttttttttttaaattttagtagagacggggtttcaccatattggccaggatggtctccatctcccgatctcgtgatccgcccaccttggcctcttaaagtgctgggattacaggcctgagtcaccgtacccggcccatacccttaactttttaaatatggagttataaccagctacatacatcatcacatctttatatcatatttcagaaactttatgtaaaatctttggttattttttaattttcaaggagtgcttcactattaatctctgaatgttgatctctagttggatgttaattttgggattttctctcacagctttatggggaatttgctgacccatttaaacttgcagagtgcaaacttgcaataattcattgtgccggttattcagaccctatattggtgcagacactttggcaagatatcatagagaaaggtaagtgttcagttataggtatgttagcatacgttatgtagtgacttggtggaggaatgcaagctgctagtaactaatataatgcaagctgctagtggctcatgaaaattgtgtatacctaagaagagagtaagtggaagtcacctgggtatggtggaggatgatcatacacagaatgacccaagtgaatattcgggagaatactcagtgaaaaggttatttaatttatattatttgtgctgccttataaaagatactgagacactcacctcagaatctaataaccagtataacctggtaagacatgagagtatctcagacaataacagaaacaccaaatctgttaatcatattaatgtgactatctgttctaaagtattttgaaccttgaaacagaattaaataaccaatgtaaacatttcacattaaaagtaatttgggtttcaaatgacatgtctttttgttacagaattgagtgacagtgtgacattgagctcctcggatagaatgcatgctcttagtctcaagattgttctccttggtaaaatttatgctggcacaccacgcttctttcctttaggtaagctgtgatcttaggtgcagtcacgtattttctgttctgatggttttctccgttgatatggacaaataacgatctttcgagtaaagtaaagagtttctttgctatttagttcagcactttaattctgcctctccggaaagacttccaaagaatggcagaatttgttaatgaagagttgagtatgaaactttctgtgactaactttccaagtttatattacctgtcttaggattgtgctgactgacaaactatgattatattgttggtaaccctatacaagtttctgaagagaaaagaaaaacggttgatgtttttgtgcataggtaatctgtgattgattcaactgttctttttttatgttgagggcatgtttttctttaaaatagcaaataattatgttaaaacttagtgtttgaatccctttcttaatgagatatggtggctataatttttaaataaggtagctaattatgagctatttgccaacctacaagtgttttcctcagtggtaaaacaatagaagcaacataaatacatccataaattagaatatcaactacttttgtgttatttaaaaatattgagagacatgaaaatcctcacaatataacttttttttttttttttgagacagaggctttctctgtcgcccaggctggagtggaatgatgccatctcggctcactgcaacttctgccttccaggttcaagcagttctcctgcctagcctcccaagtaggtgggattacaggtgcctgcaaccacgcctggctaattttctgtatttttattagaaatgaggtttccccatgttgtctaggctggtctcaaactcctggcctcaggtgatccgcttgccttggcctcccaaggtgctgggattaaaggcgttcgccactgtgcccagcctaatttttttttttttttttcaaatgagcattcaaacttgtttacagaccatctctgacttagggtctattccctctggacatagtcagaaataaaaccattttattcatacccttacttttgtaggtataatatggaaacggttccctttccataccattttattgatcctaaaaataaagagaaataaaagagcaaatacatactttatataaatgtttataagtgtgtgaaactggtacttttgatagttgttttaaaaaacactgcaccatggctgggcatggtggctcacaggtgtaatcccagcactttgggaggccgaggcggatggatcgcttgagcccaggagttcgagaccagcctgggcaacatggcaaaaccctgtctctacaaaaaaataggaaaattatccaggcatagtggcatgcgcctgtggttccagctactcgggaggctatggtgggaggatcacttgagcctgggaggtgaaaactgcagtgagctgagatcgaaccactgcactccaacctcagtgacacagtgagaccccatttcaataaataaataaataaataacactgtattgtacatagttctttttaaggaattttcattttaatttagaaataatcatgtgggctttgtgtggtggctcacacctgtaatctcaacactttggagaggcaaaggcaggaagattgcttgaagccaggagtttgagaccagcctgggcatagcaagccccgtctctacaaaaaaaattaagattagctaggcatggtagcacgtgcctatagtcctagctaatcaggctgagttaggaggatttctatgttttacttatatatatatatttttttcttttgatagagaagggatctcatggtgttgcccaagctagtcttgaattagccacgcctagctaatttttttgtatttttaatagagacagggtttcaccatgttggccaggctggtctcgaactcctgacctcaggtgatctgctcaccttggcctcccatagtgctgggattataagtgcgaaccaccacgcctggccataactataaatttggctgttactgtttatgataagataggcagttaaaagtaagaatgaggccacagttagaactgtcaaataaatctaggggtggggcattaaaaaacacatttaatatttctgaaatcaggatgcagttgcccttttctgaaaagctgttaaagtgaggaaacctatttatttatttatttatttatttatttatttatttatttttattgatcattcttgggtgtttctcgcagagggggatttggcagggtcacaggacaatagtggagggaaggtcagcagataaacaagtgaacaaaggtctctggttttcctaggcagaggaccctgcggctgccttccgcagcgtttgtgtccctgggtacttgagattagggagtggtgatgactcttaacgagcatgctgccgcatgctgccttcaagcgtctgtttaacaaagcacatcttgcaccgcccttaatccatttaaccctgagtggacacagcacatgtttcagagagcacagggttgggggtaaggtcacagatcaacaggatcccaaggcagaagaatttttcttagtacagaacaaaatgaaaagtctcccatgtctacctctttctatacagacacggcaaccatccgattcctcaatcttttccccacctttcccccctttctattccacaaaactgccattgtcatcatggcccgttctcaatgagctgttgggcacacctcccagatggggtggtggccgggcagaggggctcctcacttcccagtaggggcggccgggcagaggtgcccctcacctcccggacggggcggctggccgggcggggggctgacccccccacctccctcccggacagggcggctggccgggcggggggctgacccccccctcctccctcccggatggggcggctggccgggcagaggggctcctcacttcccagtaggggcggccgggcagaggcgcccctcacctcccggacggggcggctggccaggcggggggctgacccccccacctccctcccggacggggtggctgccgggcggaggggctcctcacttctcagacggggcagctgctgggcggaggggctcctcacttctcagacagggcggttgccaggcagagggtctcctcacttctcagacggggtggccgggcagagacgctcctcacatcccggatggggcgacagggcagaggcgctccccacatctcagatgatgggtggccgggcagagacgctcctcacttcctagatgggatggcggccgggaagaggcgctcctcacttcctagatgggatggcggctgggcagagatgctcctcactttccagactgggcagccaggcagaggggctcctcacatcccagacgatgggcggccaggcagagacgctcctcacttcccagacagggtggcggccgggcagaggctgcaatctcggcactttgggaggccaaggcaggctgctgggaggtggaggttgtagcgagccgagatcacgccactgcactccagcctgggcaccattgagcactgagtgaaggagactccgtctgcaatcccggcacctctggaggccgaggctggcggatcactcgcggttaggagctggagaccagcccggccaacacagcgaaaccccgtctccacccaaaaaatacaaaaaccagtcaggcgtggcggcgcgcacctgcaatcgcaggcactcggcaggctgaggcaggagaatcaggcagggaggttgcagtgagccgagatagcagtacagtccagcttcggctcggcatcagagggagaccttggaaagaggggagagggacagggagagggacagggacaggaaacctattttttttaaatactgttactaaaaaaaattatcagtgaagtcctcttcaatattgggatcgtgaatcgtctctgttttcttcttatatctttctgagttttctaggttctgtaattttaattttaggacattttcatcatcccagaaagaaactctgtgctcattagttgtcacttcccattccttcacaccctccagccctaggcagccactaatctactttagatttgcctgttctggtatatatcttacttttatttaaaaaaaactttttttttcttttaagctgagagtgatggtgcacacttgtagccccagcttacttgggaggttgaggtgggaggattgagctcaggatttcaaggctgtcgtgcactgtagttgctcctatgaatagccactatttctagtctgggcaacatagcaaaaaaaaccccccgccccaaaaaattgcaattggatttcagaagatatccccctagaaactattcagttatgaataagacctaccttttagtatcaagagctaaaaatccaaatttccgatctttttttttcttcccagattttattgtacagtttttagaacagcaggtttgtactttgaactgggatgtgggcttcgtaatacagacaatgaatgaaattggagtaccattacctagactactagaagtttatgatcagttgttcaaatcacgggtaaggaaaatattaaataacataaaattattttatttaattaaagtaactttgtagatatagagtggggtattttgattgcatttttgtatcctatcacttagtctaattacacttggttgagtcttggaaattatgcttttgactttttaaactgataatgagagttgctttcctgtatatcatgattaaaatgaaatattatttttgaatattaataaatatgctttactcttggtgaaagaggctaaaccaaggtgtgggctaaactcattacattaagaatcatcatttgctttaaaagaacaagattacattgtatttatttactataacctcatctaaaatatcagtgcttaaagatccttctcaccctgctgaaccttatcagactatatgttttgtaatttttatgctaaggataaaagatccaaataaaaacttgtcaaagtagattgtgtcttttatagcagcatcacacagtgctttacaacattagcctgtgatggaaatgagcaggtaactgtagtatctccatcttatattgcaaaaaacaagagcagagatgttaaataacctgcttaagtcacatggctagtaactggtgaagccagacctagaattaagtttctgttactgctagtttagtctctttatgatgtcagactaaatctgcataggttcaaagtaaaagtggtgtcacaacccatagaaagaaagatttttctcttatctcagattcctaagcgggacatttacatgctctgcaaagtagattggtatatcaaatatgcctcctaagtaatatcatagtgttgttaattaataagtttttaatgttgtttgaaatattaactataatcagatatataatttagtagccatgtgatattaaatgctttttaatagcgataagttttgcatggatcctgatgtctactttagtataaatgatttaaataatcaattgacacaatttgcctcacatttcattatgtatatttcttcataggatccattctggaacagaatgaagaagccactgcaccttttggattgtatacatgtattattgataagatatgttgagaatcccagccaagttttaaattgtgaaaggtacttatgaattaaatattggatcagcaaaagcttttaaatgcttctaataaatacctgggtaaaaaatttgaagagaagatgggaagattcttgtgtatattagcaataactatttgaatgatattgatcaccatgtatgaaaaataggagttttttccattttcaacccttgtcctaaatcctttctacagctgaacatacataatgtattcatttcttctactttagattagtgatctaggaccaaaacatttcaattatgtctttgtgatattattggccatttaagggatattcttttgaaaaagaatattagcaggaatcatctcttactgctttcttctcattgtaaaaatcttcaggccaggcgtggtggctcacacctgtaatcccagcactttgggaggctgagatgggcggatcatgaggtcaagagatcgagaccatcctggctaacacgtgaaaccccgtctctactaaaaatacaaaaaaattagctgggcgtggtggcgggcacctgtagtcccagctacacgggaggctgaggcaggagaatggcgtgaacccaggaggcagaggttgcagtgagccgagatggcgccactgcactccagcctgagtgacagagcgagactccgtctcaaaaaaaaaaaaaaaatcttcaaatggaacccacctacacccaagttttcttttttactttatttcttatttacttaatcacatggtctttcctcttctgtgagaattaaagttgccagaagttggtggggaagaagtcctgcaggaggaaatgtttgtaaatgtataattaatcatgtgtctttttcgttgtaggagaagatttacaaatctctgcctggatgctgtttgtggttaccttgttgagctccagtctatgagctcgtcagtagcagtacaagccatcactgggaattttaaatctcttcaagctaaattagaacggcttcattaattactgtgatatactttcgtccgttttatgatctgtaaaataaaaactcagctgggtccagatatcaggtgttctaaatctaagaatgtaagaacaatcttaatagaaatatgtttttaataagtggctaatatctacaaatagtacctttgctaaatgaattcttttttatgactattttgttttttagtaattgggtgaaaaaacaactgaaatgagattatttattattttaacataaggattaaaaaaatttagaaactcttattttgaattgtactgcaggcagaaatttcgaatttatattattcattttcaagttagtccaaggatattggcattaaaactccactaggcggccaggcacagtgacttacacctgtaatcccagcactttgggaggccaaggtgggcgaatcacgaggccaagagtttgagaccaacctggccaacatggtgaaaccccatctctactaaaaatacaaaaaaaaatagccaggcgtggtggcgggcgcctgtaatcccagctactcgggaggctgagggaggtgaatcacttgaacccgggaggcagaggtttcagtgagtcaaaatcgcaccattgcactccagcccaggcaacagggcgagactctgtctcaaaaaacaaaaaaacctcaaataggctaagcagatccattcccataatagtggattctaaaaccgtccttaaataggcaaataactgactttttcaaaactttttttaggtgttgggttcacccttgaaagaactgtcctctaacaactggttttgtcagttaaagcccttgagaattgacatagctatatacctggttgagcaggtgataaaacttgtaactaatgttgtgtcctgaaaacctacacagggaggtactgttttcccttagtgtctacctggctgcttggccttgtgactactgattccattagagcagtggttctcaaagtatgtgctccaaaccagaagcatcagcatcagcatcagcatcacctaggaatttgttagaaatgcaaattctcgagccccaacccagacctactgaatcaaaaacgtgggggatgaggccctgctttctatgttttaacaagctctccaggagattttggtgcatgtcaaatttgaaagccactgcagtaaaggatactgctaccttccatagtttatggactgagctacctatctggctcctcctctgtgaataaccacacacacaaattttgcccaaggcacacaatatataaagcaaaactgttagtaatgtactttttaattattccttaacaaaatagaataaccaaaccaaatgcttcaaagtaatagcaacaagagagaagaagagtgggaatgaccagagctaacaaaacactctattcctttctctcttttttttttttttggagacagaatctcaccctgtagcccagcctggagtgcagtggtgcgatcccggctcactgcaacctctgcctcacaggtttgaagcaatttgcctgcctcagcctctcgagtagctgggattgcaggtgtgcgccaccatacccagctaatttttgtatttttagtagagatgggtttcaccatgttggccaggctggtcttgaactcctgacctcaagtgatctgcccgcctccacctcccaaagtgttgagattacagacgtgagccaatgtgcctggcctattcccttctctctttatgctaccacaaataattaccttctgtttattgtaagtgatgcatgtctaacaatttgtacaatacattttgaatatatttttccttccattattgtcttttcccaagaccatagggttgccttctctacatttgttctcttagaattcagctcccttttccctataatcttctaatgtagaatatttaatagaatgccagaacgtcactcagtgggtactactacctcttatttttcaacttttcagtttcttaagtttagcgttttttgaatatgtaaagtgaatgtatgcgatacattaattcgttttataaatttaaa

SEQ ID NO: 12094 - DNA, 24477 bp, Homo sapiens
gaggctcaactaagtgaaaagatttcacttcaggcaattcagcagttggttcgaaaatcatatcaggctctggctttatggaaacttctttgtgaacatcaattcactatcattgtggcagaacttcagaaggtaattttttttatttttttatgattataccattaatactatgtttggattttttggatgagtattttggctttggaggggattattttgggaagcatttaagttatgatgaagttagtatgttatgggaagatggcacaaaaaaagcgtaccaacttgggggacctattttttcaaagccgcaagtttttacttgtgggtatgtgaatgaagtcatactttacaaaacatattttttaaaacagtggactttaccctttatttgagctacaggttcttctgagaatctgataaaagctatctctcactacccttaaagaaatgcatatcgacatggacacacagacttttgcttataatttcaaagggcccaacaacctaaattaaatactcttgactgggcaccatgcctcacgcctgtgatcccaacactttggtaggctgaggcaggaggatcacttgagcctaggaattcaagactatcctgggcaagatgtcaggacccatctctactaaaaataaaaaataaattagtcaagtgtggtggcacatgcctgtagtcccagctacttgggaggctgaagtgggaggagcacttgagcctgggaggttgaggcgccacttagccatgatggtgccactgcaccccagcctgggtgacagagtgagaccctgtctctctctgtctctctcacacacacacacacacacacacacacacacatatacaccactcctacttcattttatgttttcttttttttttttttaagagatggagtctcactctgtcgcccaggctgcagttgtgcaatctcggctcgctgcaacctccacctcccgggttctagcaattctcctgcctcagcctcctgagtagctgggattacaggtgcatgccaccacgcccagctaattttttgtattttagtagagacggggtttcaccgtgttgcccagggtgatctcgaactcctgagctcaggtaatccacccgcctcagccacccaaaatgctaggattacagacgtgacccaccatgcccggcaactgctcctactttaaaggaagatatttatcactgtaggaaataaatggttcatatttcttttgatgttcacatttgaatcctttctaaggataaggataatcaacattaatctaaatgttagatagaatatatagaggaaatttattcctaccttttatttaattgtgagcatttctaaacgtatacaaaagtagagcaaaaactgtaactcccatatacatttgactcattcagcattttcaagatactgtgtttctaaaaaaaatagacagttccttgaacaacaacaatgtcatgatcagttaccagtttttcttgagacagtgtctcgctctgtcacccaggctggagtgcagtggcatgatcacggctcactgcacccttgacctctctggactccagtgattctcctactttagcctcccgagtagctggtactataggcacgcaccactacgcctagctaatttttgtatttttttgtggagatggggtttcaccgtatctcctaggctggatagttaccaatattaactgtcaatatttgatagcaaaatctgtcttaaaaatgtctttttacagattggttcattcaaatcaggatctaaacagtttaaggggtttgctcatggaatttgtttttctctttcatctgtttcagtctaaagcagtctttccttctttttcttttccttgctgttgccttgtagaaatccagtcatccatccagtagaatgtccagcattctaaggacattctaaggcttttttttttttaatcctctttgtagcgagcttcttcctctatctcctgcattttctataaaatgaaagtttattatataggcttgattcagttcaggtccttttttgaggaagaatagaatacttcataggtagtggtttattcatcagactgttagaagatacaaaaggtttcgttgtccttcttttagttatactaagataaattgctggattcaagtagtaagcctaatactgccattgtggaattctccatcagattttaatcatccattgataatcattgctggaatttattatttcatttaggattacaaaagggtaatatttatttatttgtttgtttgttttttattttttttgagacagtgtctcattctgtcacccaggctggagtgctgtggagcaatctgagatcactgtaacctccacctcccgggtacaagcagttctcctgcctcagcttcccgagtagctgggactacaggcatgtgccacaacgcctggctgatttttgtagttttagtaagagaccgggtttcgccatgttggccaggctggtgttgaactcctgacgtcaggtgatctacctgccttggcctcccaaagtgctgggattacaggcatgagccaccatgcccggccaaaaggataatattttaaatctgtgattccttccccagttactagctgcaattctgtaaaaaaaaaaaaaaaaattctttttccttgtcctgtatggatatttcattactctgaaacacttactttttgactctcgtataccatttttcaacgttggaaggcagtctcctcattctttccactagtgtccaatgaatagtgtggcttttgttggtggttttgtttcttttaaatacatactgttttttatttttaaaaattcaagctaatatatttaattatgaaacttatctttttcataccaagtagaataataattttgagttttatagagtgataaatatattgtaggtaggtttttatcctgggtatgtttttgtgatccatcttcaaagctctcttccttacatcaccaatggcatgctcaatgaatgcaaattaaagatttgttcaagaattttaacacagtttgggtatttccttgaatttagaaaaaagagatagcagtcacatcactaacagaatcttttactatagtataaatcaatactttagagcttcatttggacaagcagatttgttcacaatacagattaaactccaatattattataaggcctagaataatggaattctaacagtgtttaggaaggagtaatatgtaagcccaagattttcaaatatagccaagtgattgttttttccattttataaccaaagccaggagatctgactctagttttggctctacttaagctttacttttctcatttggaaagtgagagttttggactagatctactgtaggttcttttccaactctctatgattttatgtaagttcgcaaaaatttgtttctactaattagtatattttcgcttttcaattatagagtctattaatatttaggttattttaatttattaaaataatttcattatgtttagaaatatggtatttctataattgtgatagaaaagttttatgctcctaggaacttcaagagcagctgaagatcaccacctttaaagatcttgtaatcagggacaaagaactcacaggggcattaattgcttctcttatcaactgctacatcagagataatgccgctgttgatggcattagtttacatttacaggatatctgcccacttctatatagcactgatgatgcaatttgttctaaggtatgatactttattacctatttcattgtttgttataagaggtatcatgtatgatgaaccatcttgtttcacttaatataggacctcagtcagttagatctcttaacctctcctagcctcagaatcctcatctaagaaaggggttggaatatgtggcttcttaaaaccagtgtatactcttttaagcttagcttttctttttaaaaatatttttatttatttatttgacacagggtttcactctgttgcttaggctgtagtgcagtgctgtgatcatagctcacagcagcttctaagtcctagactcaagcaggcctctcatgtagctaggggctacgggtgtgcaccactacacccagccaatttttttgttttttatagagacaagttctgatttgttgcacaggctggtcttgaactcttggcttcaagtgatcctcctgcctcagcctcccatagtgctgggattataagtgtgagccaccatgcccagccctcctttaagtttttcataaagaatattctctctttttttttaagactgagtacgatctcagctcactgcaacctccacctcccaggttcaagtgattctcctgcctcggcctcccaaatagctgggattacaggtgtgcaccatcacacctggctaattttttatatttttggtagagacaggatttcaccatgttgtctaggctggttttgaactcctgacctccgcctgcctcagccttgcaaagtgttgggattatagacatgagcctctgcgcctggcccataaagaatctttgatagtgtttctaggccatattaaaaaaccaaaggtgagaaattaagaaaaatcactaaatttagaaattaaggaaatttaggggataatttatctccttagcttaaggaaaagtactaaaacttcaagtaaatcttttagtgaattagagttaatgggggcatttttattgatcctttcctacaggtggaaaaaataaataaatcagtgtcacatggactgcctgctgcccaataatgtattgactaggcaagagaattaccagacaaaagttctcttgcttaacatatttgggagaggaattaagaatagctaggaatctttggtcaaaaacttttctgcctaaaattaagaagtaagtttgtagagttgttttcattttaatggtaataaccatatataaatttagacatagactaaaacttagttgacagcatcatctgtctgcttgattttatatatttttaagttcttgttatctcctcttctaggcaaatgagcttctccagcgttcccgacaagttcaaaataagactgaaaaagaaagaatgttaagggaatcattaaaggaatatcaaaaaattagcaatcaagtggacctttccaatgtttgtgctcagtatagacaaggtgagaaataaaatgtttcttgtatcttttactcaactcaaaagacaaacaatagtgtatgaatgaagcaagctaatgatgaaaagccactttccagatgcaaatcttctttcagcatcagaggccgagtgaaaggacgtaggaatgtggtatcattgtgttgcaatatttgatgactacactgacctgcagaagctgtaatgttctttctattttttgaaatgtacttttttttttttttttttttttttttgagagtctcgctctgtcagccaggctggagtgcagtggcacgatctcagctcactgcatcctctgcctcccaggttccagcaattctcctgcctcagcctcccgggtagctggtattacaggcgcacgccaccacgcccagctaattttttatttttttatttttttattttttttattttgagacagagtcttgctctgtcacccaggctgaagtgcagtggtgcgatctcagctcactgcaagctctgcctcccaggttcacgccattctgcctcagcctcccaagtagctgggactacaggcgcctgccaccatgcccggctaatttttttgtatttttagtagagatgggtttcaccatgttagccaggatggtctcaatctcctgacctcatgatccacccacctcagcctcccaaagcgctgggattacaggtgtgagccaccgcgcccggccattgcccagctaatttttgtatttttagtagaggtggggttttaccatgttagccagggtggtctcgatctcctgacctcaggtgatccacccatctcagcctctcaaagtgctaggattacagacatgagccactgcgcccagccgaaatgtataactttttagcattagagtttcagttcttgtccagttcaattactgtatgttttacattgctttctggattacatttatttttcagatatttaaaattttttattgagttttaaggtataatctgcttactttttaaaaaattactttaaatcaaatctaacataatgtaaaggccataactatttgcacaggtattattttgaatcccaaggtatttttttccccccagtagggaactaaaactttcctttttgttatttgaaataggatcttttttttccaatgaagaaatatatatatatatatatttttttttttcctttttctttttttttttgtgagacagagtcttgttctgtcacccaggctggagtgcaatggtgcaatctcagctcactacaacctctgcctcgctagttcaagtgattctcctgcctcagccttttgagtagctgggattacaggcgcatgccaccaggcccagctaatttttgtatttttagtagaggtggggtttcaccatgttggtcaggctggtctcgaacccctgaccttgtgatctgccccctctcagcctcccaaagtgctgggattacaggcgtgagccaccacacctggcccccaatgaagaaatatatttaacagttgccttttaggcatattaagaccttttccttctgaagacctatcagaaatattttatgttagcagggtgactattgtacagtagagacataaccttgatcattattttcatgtgccagctaaggaaaaatgtatccaacttagtagtaagtcataggtcttcattcttttctttcccatcagtgagattttatgagggtgtggtggaactttctcttacggctgcagagaaaaaagatcctcaaggtcttgggcttcatttctataaacatggagaaccagaagaagacatagttggacttcaggccttccaagaaaggtgcattccattacgttagcagattgtcatctttatggatacagacttttctttgcataatgttttttgttttttgttttatgttttttttttttttttgagacagagtcttgctctgtcacctgggctggagtgcagtcgtgtgatcttggctcactgcaatctctgcctcccaggttcaagctattctcgtgcctcagcctcccatgtagctgggattacaggtgcacaccaccacgcctggctaatttttgtatttttagtagagacagggtttcaccattttggccaggctggtcttgaattcctaacctcaagtgatccacccacctcagtcttgcaaagtgctaggattatagccatcagccaccgtgtctggcctctttgtgtaaaggtcgaccacccaaagtgctgggattacaggcatgagccaccatgtccagtaggatttcattttaaaggataatttttaagtattcccaaatttgttgagactgtaaaaaagaaatgtgtgtccttaaaagaaatataggccaggcacagtggctcacgcctgtaatcccagcactttgggaggctgaggtgggcagatcatgaggtcaggagttcgagaccagcctgggccatcatagtgaaaccctgtctctactaaaatacaaaaattagccaggcgtggtggtgcacacccgtaatcccagcaacttgggaggctgaggcaggagaattgctttaacccgggaggcagaggctgcagtgaagctgagattgcaccacagaactccagcctgggcgtcagagcagggctccgtctcggaacaaagaagaaatatataacctttctataacatatatatatggagggtgttttgttttgtttttgtttttgtttttgagacaaagcttcactctgtctcctgggctggagtcagtggcaccatcatagctcactgtactcttgaccttttgggctcaagtgatccagtgatcctcctacctcagcctcctgagtagctgggactacaggcacatgtcaccacactcggctaattttttttttctctttaatttctgtagagacagggcctcactatattgcccaggctggtctttaactcctgggctcaagcaatcctttcttctcagcctcccaaagtgctgagattagaggtgtcagccaccacatctggcgaaaacatatttttttattactatatttaatgactttacccttttaatgtttaaccaaacacttctcaaacttattgaaaaagtatatggtttgtattattttaaatgccaaatatgtacatctattctgccaaatagtcttgaaatccttgtatatacttaggtaaggtaaatcaatggctttcttttttgttatttgttttgttttgtttttggggggttttgttttttgtttttgagacagggcctcattctgttgcctgagctggagtgcagtggcatgataatagctcacttgcagccttgaattcctaggctcaagcgatcctcctgcctctgcctcccaagtagctgggattacaggtgcacaccgccacgcctggttaattttttgtttcgttttgttttgttttttgttcgtttgttttttgagacagggtcttgctgtcacccaggatggagtgcagtggcatgatctcagctcacctcaacctctgcctcccaggttcaagcaattcttgtgcctcactcacctgaatagctggcactacaggcatgcaccaccaagcccggctaatttttgtatttttgtcagatacggggtttcaccaggttggccaggctggtctcaaattcgtgacctctggcagtccccctgccttcgtctcccagagtgctgggattacaggtgtgaggcactgtgcccagccaatttttttgtattttttgtagagacgtggtcccgctctgttgccctggctagtcttgaactcccagcctcaagccgtcctcctaccttgacttccctatggctggcattacaggcgtgagtcaccacacttaccatcatttgctttctagttaaataatgtaattgttccttttccattttctttcagattaaacagttacaaatgcattacagacacacttcaagaactggtaaatcaaagtaaggccgctcctcagtctcccagtgtacccaaaaaacctggtcctccagtgttgtcatctgatccaaatatgctgagtaatgaagaagcaggacatcatgtaagggacatagtatattttcattctgagaatacactgtttagaagttctccatggtaatggtagcacagtcatcttggggaaaggtggtagttcttagaagttatcatgtaaggattcttgatttcttactggagtttatagggctaaagggttgtgatgcccagaaacagagcctttaactgctaatttttactattttctttattttagtttgaacaaatgcttaaattgtcacagcgatccaaggatgagctctttagtattgccctttataattggctaatacaagtcgaccttgcagataagctgctacaggtaaatctttttttattgcagttgtgttaattattcttaaggagcataactcaatgatttaagcacatatatagatgtaaaaaattcagtttctcatcccatgcctgctattagatgttagtataaagctgagtaatgcagtatcttttcctaaggggcaaagtaggctactgctccaattttcttgttaattcgaagctgattgggatagtttgtattgcggggtagaaatcactggattatgaatatgagtcctgtaggtcatcttatcttaactctgctgttaagtcactgtgacttcagatatgtccttttacctaccctaagtttcagtgttcctcaatctgtttaatgaatacatagcatttgataatttcaataatgcctttgagctcaatgtctaggaatcaatagctgtgttatcaaagtttatttaaaaatttgtaattttatagtaaatttcctttttttttttttttttttttttttgagatggagtctggctctgttgcccaggctggagtgcagtggcatgatctcagctcactgcaacctccgcctcccgggttccagcaatcctcctgcttcagcctcccaagtagctgggattacaggcacccgccaccacgcacagctaatttttatatctttttagtagagacggggttttaccatgttggccaggctggtctcaaactcctgagctcaggtgatctgcccacctcagcttcccgaagtgctgggattacaggcatgaaccactgtgcccggccaaatttccttttcttttttgaggcagggtctcaatctgtagcttaggctgaagtgcagtgcaatggcacgataatggctcactgtagccttgacctccctaggctcaggtgatcctcacacctaaccctcctgagtaactagaactataggcccgcaccaccacacccagctaatttttttgtagagacgaggttttgccatatattgcccaggctggtctcaaactcctgagctcacatgatctgcccacctcggcctcccaaagtgcgaggattacagacatgagtcgccatgcccagcctactaaattattgttatcaacctaatagaattgttttggaaactcttatgctaactgtggtaaaacaaaaattgtttataataagaaaatttgccctctcttttatctgttagtattggattataattttgcttgttttcataaaacaaggcaaagttgtagttgacttaaaaatactatattttccttatcaggaacattatctgtaggtggttagaaaatttttctgaataactatataatttctaggttgcttctccatttctggagccacatctagtccgaatggccaaagttgatcaaaacagagttcgttatatggatttactctggcggtattacgagaagaacagaagtttcagtaatgctgctcgtgtactgtccagactggctgacatgcataggtatggcataatattcttattgtgaagaatgattcaaaactgagctatatgtacttacattcagttttctttaattttagaagaatctaagttttaatatactgacctaaattttttaaataggatgttactttttagtcataaatgtatttctttatgtgttgtctaaaattgtggatctctcttatgagaaatctaaaatagatttttttttaaatctaatgattttttttcaagtttcagatggctttttatgtgtgtttggtatgaaacagtacatactaattgacgtatttgtatcatcaatccttaagaaattgtgtaactaaaaataagcgttttcccttctagcacagaaatttcacttcagcagcgactagagtacattgctcgagccattcttagtgccaaaagttccactgccatttcatcaatagctgccgatggtgaatttcttcatgaattagaagaaaaaatggaggtaagtgctaaagatcttaagctgtgtccacattgagtactagccacatagttattccacattccattcttcccttggtaagtaataggtctgagaagtcattattattctagttgcttttgtctgtttatatttatttttatgtttagatataaatcttaaagatttttaaggatgcacttgggtcataaaaacattgctataatttagaagttttctctttggcacttcgaaaggtttttcccagctgggtgcagtggctcacgcctgtaatcccagcactttgggaggccgaggcagccagatcatgaggtcagaagttcgagaccagcctggccaatatggcgaaaccttgtctctacttaaaaaaatacaagaattagccgggggtggtggcacacacctgtagtcccagctacttgggagactgaggcaggagaattgcttgaacccaggaagcggaggttgcagtgagctgagattgcaccactgcattccagcctgggagacagactgagactctgtctcaaaaaataataataataaaaaataaatgtttttcccaactgtttcaacagcaagtggattacatcacattcaccatttattttggaagcaaataagtagatgtatgaagtagagtaggctaaaattccctaactaagagaatcaaaaacataccatcgtccaaatacaaaagtttgtttcttattcacaaaaatccaaggtgagtcttcctgattggcagctggctttcctccgtgtggttgatttaggaacccaagttctattttctggcactaccattccctagggcctctgctttatcttcagcagagggtggaaggaaaagaaagaacacattcactgtcttaaaaactatagccctgacatgacacactacttctactcacattcctttgaagagaacttggttgtatggccatacctcccctacagaggaggctgagctgtatagtctaaccatttggctacagtcttggaaggtataagtattgggcagcaaggagtctgccacagtatacttcctgtgaaatctattatgtttagttgatgtctgttatgataatattagcctattatgatagaaatcttcatttatacattattttagcaaacttaaagtcagatagtaggatccgttctttcaaacgtatgttgatttatcataaataaattaagacatcctgttttctgcccaaactaggttgctaggatccaacttcagatacaggagacactacaaaggcagtattcccatcattcttctgtacaggatgcagtttctcagctggattctgagctgatggacataactaaggtaataaaaaagcaagtgaaatttttatagtagttacctaataatgagaaatttttgttttttattttgctttttgtttcatggggaaaattaccttatctccacaaataagataaggcatctttggcagcttgtcactgggctgacagatcaccactgcttcatctgactcctagaaaaaggctaagctactctttccaggccagtagctacaaagaacctatcatcctcgcatgagagctgtgttaaaaccagcttatttccagcctgggcaacatggcaaaacctcatctttacaaaaaaatagcaaaaaaggccaggcactgtggctcacgcctgtaatccaacactttgggaggctgaggcgggcagatcacctgaggtcaggagtttgagaccagcctggtcaacatggggaaactctgtctctactaaaaatacaaaaattagccaggcgtggtggcatgcgcctgtaatcccagctacctgggaggctgaggcaggagaattgcttgaacccaggaggtgggggtttcagtgagccgagatcatggcactgcagtctaggagcctgggcgacagagcaagactccatcaaaaaaaaaaaaaaaaaattagccaggtgtggtggtgtgtggttgtagttcatctactcaggagtctgaggtgggaggattgatttagcccaggaggcccaggttgtggtgagcctcgatggtgctactgcattccagcctgagtgacagagtgagaccctgtctcaaaaagaaaaaaaaactaaaaaaccaaaaccatcttatttatggcctcgcttcttgccttggaaaaactaacttatctttgcttaactctctaaacctctttctctctctgtaattttctgagcagttccttcctcttcatttattcttagacatagttccaggtaccctgaaacactttgagatttgtcagtattcctgtgattcttcaacccattgtttatacaacactagttctaaaataccattgcaggaggtttgtagggaaggtggggatggttaatgggtacaaaaacaaaatgaataagacctatctgatagcacaatagggtgactatagtcaataataactgtatattttaaaatagagaatgtaattggattatttgtaactcaaaaggataactgcttgaggaatagacattctccatgacatgcttatttctcattgcatgactgtatcagaacatctcatgtaccccataaatacatacacctactgtgtacccacagaaatttgaaaaaatgaattttaaaattaataaatagaatgtcgttgcaacatcttcttcccagccaagaaaaaagctctacatgctaaaatgtgtttgaatgtatttaccatacccttaccctttttttttttttttggcggggggagacagagtctttctctgtcaccaggctagagtgcaatggcgtgatctcagctgactgcaacctccaccttcctcagcctcctgagtagctgggactacagccatgcaccaccatgcccagctaattttttttttttttaaattttagtagagacggggtttcaccatattggccaggatggtctccatctcccgatctcgtgatccgcccaccttggcctcttaaagtgctgggattacaggcctgagtcaccgtacccggcccatacccttaactttttaaatatggagttataaccagctacatacatcatcacatctttatatcatatttcagaaactttatgtaaaatctttggttattttttaattttcaaggagtgcttcactattaatctctgaatgttgatctctagttggatgttaattttgggattttctctcacagctttatggggaatttgctgacccatttaaacttgcagagtgcaaacttgcaataattcattgtgccggttattcagaccctatattggtgcagacactttggcaagatatcatagagaaaggtaagtgttcagttataggtatgttagcatacgttatgtagtgacttggtggaggaatgcaagctgctagtaactaatataatgcaagctgctagtggctcatgaaaattgtgtatacctaagaagagagtaagtggaagtcacctgggtatggtggaggatgatcatacacagaatgacccaagtgaatattcgggagaatactcagtgaaaaggttatttaatttatattatttgtgctgccttataaaagatactgagacactcacctcagaatctaataaccagtataacctggtaagacatgagagtatctcagacaataacagaaacaccaaatctgttaatcatattaatgtgactatctgttctaaagtattttgaaccttgaaacagaattaaataaccaatgtaaacatttcacattaaaagtaatttgggtttcaaatgacatgtctttttgttacagaattgagtgacagtgtgacattgagctcctcggatagaatgcatgctcttagtctcaagattgttctccttggcaaaatttatgctggcacaccacgcttctttcctttaggtaagctgtgatcttaggtgcagtcacgtattttctgttctgatggttttctccgttgatatggacaaataacgatctttcgagtaaaataaagagtttctttgctatttagttcagcactttaattctgcctctccggaaagacttccaaagaatggcagaatttgttaatgaagagttgagtatgaaactttctgtgactaactttccaagtttatattacctgtcttaggattgtgctgactgacaaactatgattatattgttggtaaccctatacaagtttctgaagagaaaagaaaaacggttgatgtttttgtgcataggtaatctgtgattgattcaactgttctttttttatgttgagggcatgtttttctttaaaatagcaaataattatgttaaaacttagtgtttgaatccctttcttaatgagatatggtggctataatttttaaataaggtagctaattatgagctatttgccaacctacaagtgttttcctcagtggtaaaacaatagaagcaacataaatacatccataaattagaatatcaactacttttgtgttatttaaaaatattgagagacatgaaaatcctcacaatataacttttttttttttttttgagacagaggctttctctgtcgcccaggctggagtggaatgatgccatctcggctcactgcaacttctgccttccaggttcaagcagttctcctgcctagcctcccaagtaggtgggattacaggtgcctgcaaccacgcctggctaattttctgtatttttattagaaatgaggtttccccatgttgtctaggctggtctcaaactcctggcctcaggtgatccgcttgccttggcctcccaaggtgctgggattaaaggcgttcgccactgtgcccagcctaattttttttttttttttttcaaatgagcattcaaacttgtttacagaccatctctgacttagggtctattccctctggacatagtcagaaataaaaccattttattcatacccttacttttgtaggtataatatggaaacggttccctttccataccattttattgatcctaaaaataaagagaaataaaagagcaaatacatactttatataaatgtttataagtgtgtgaaactggtacttttgatagttgttttaaaaaacactgcaccatggctgggcatggtggctcacaggtgtaatcccagcactttgggaggccgaggcggatggatcgcttgagcccaggagttcgagaccagcctgggcaacatggcaaaaccctgtctctacaaaaaaataggaaaattatccaggcatagtggcatgcgcctgtggttccagctactcgggaggctatggtgggaggatcacttgagcctgggaggtgaaaactgcagtgagctgagatcgaaccactgcactccaacctcagtgacacagtgagaccccatttcaataaataaataaataacactgtattgtacatagttctttttaaggaattttcattttaatttagaaataatcatgtgggctttgtgtggtggctcacacctgtaatctcaacactttggagaggcaaaggcaggaagattgcttgaagccaggagtttgagaccagcctgggcatagcaagccccgtctctacaaaaaaaattaagattagctaggcatggtagcacgtgcctatagtcctagctaatcaggctgagttaggaggatttctatgttttacttatatatatatatttttttcttttgatagagaagggatctcatggtgttgcccaagctagtcttgaattagccacacctagctaatttttttgtatttttaatagagacagggtttcaccatgttggccaggctggtctcgaactcctgacctcaggtgatctgctcaccttggcctcccatagtgctgggattataggtgcgaaccaccacgcctggccataactataaatttggctgttactgtttatgataagataggcagttaaaagtaagaatgaggccacagttagaactgtcaaataaatctaggggtggggcattaaaaaacacatttaatatttctgaaatcaggatgcagttgcccttttctgaaaagctgttaaagtgaggaaacctatttatttatttatttatttatttatttttattgatcattcttgggtgtttctcgcagagggggatttggcagggtcacaggacaatagtggagggaaggtcagcagataaacaagtgaacaaaggtctctggttttcctaggcagaggaccctgcggctgccttccgcagcgtttgtgtccctgggtacttgagattagggagtggtgatgactcttaacaagcatgctgccgcatgctgccttcaagcgtctgtttaacaaagcacatcttgcaccgcccttaatccatttaaccctgagtggacacagcacatgtttcagagagcacagggttgggggtaaggtcacagatcaacaggatcccaaggcagaagaatttttcttagtacagaacaaaatgaaaagtctcccatgtctacctctttctatacagacacggcaaccatccgatttctcaatcttttccccacctttcccccctttctattccacaaaactgccattgtcatcatggcccgttctcaatgagctgttgggcacacctcccagatggggtggtggccgggcagaggggctcctcacttcccagtaggggcggccgggcagaggtgcccctcacctcccggacggggcggctggccgggcggggggctgacccccccacctccctcccggacagggcggctggccgggcggggggctgacccccccctcctccctcccggatggggcggctggccgggcagaggggctcctcacttcccagtaggggcggccgggcagaggcgcccctcacctcccggacggggcggctggccaggcggggggctgaccccccaacctccctcccggacggggtggctgccgggcggaggggctcctcacttctcagacggggcggctgcctgggcggcaggggctcctcacttctcagacagggcggttgccaggcagagggtctcctcacttctcagagcggggtggccgggcagagacgctcctcacatcccggacggggcgacagggcagaggcgctccccacatctcagatgatgggtggccgggcagagacgctcctcacttcctagatgggatggcggccgggaagaggcgctcctcacttcctagatgggatggcggctgggcagagatgctcctcactttccagactgggcagccaggcagaggggctcctcacatcccagacgatgggcggccaggcagagacgctcctcacttcccagacagggtggcggccgggcagaggctgcaatctcggcactttgggaggccaaggcaggctgctgggaggtggatgttgtagggagccgagatcacgccactgcactccagcctgggcaccattgagcactgagtgaaggagactccgtctgcaatcccggcacctctggaggccgaggctggcggatcactcgcggttaggagctggagaccagcccggccaacacagcaaaaccccgtctccacccaaaaaatacgaaaaccagtcaggcgtggcggcgcgcacctgcaatcgcaggcactcggcaggctgaggcaggagaatcaggcagggaggttgcagtgagccgagatagcagtacagtccagcttcggctcggcatcagagggagaccttggaaagaggggagagggacagggagagggacagggacaggaaacctattttttttaaatactgttactaaaaaaaattatcagtgaagtcctcttcaatattgggatcgtgaatcgtctctgttttcttcttatatctttctgagttttctaggttctgtaattttaattttaggacattttcatcatcccaaaaagaaactctgtgctcattagttgtcacttcccattccttcacaccctccagccctaggcagccactaatctactttagatttgcctgttctggtatatatcttacttttatttaaaaaaaactttttttttcttttaagctgagagtgatggtgcacacttgtagccccagcttacttgggaggttgaggtgggaggattgagctcaggatttcaaggctgtcgtgcactgtagttgctcctatgaatagccactatttctagtctgggcaacatagcaaaaaaaaccccccgccccaaaaaattgcaattggatttcagaagatatccccctagaaactattcagttatgaataagacctaccttttagtatcaagagctaaaaatccaaatttccgatctttttttttcttcccagattttattgtacagtttttagaacagcaggtttgtactttgaactgggatgtgggcttcgtaatacagacaatgaatgaaattggagtaccattacctagactactagaagtttatgatcagttgttcaaatcacgggtaaggaaaatattaaataacataaaattattttctttaattaaagtaactttgtagatatagagtggggtattttgattgcatttttgtatcctatcacttagtctaattacacttggttgagtcttggaaattatgcttttgactttttaaactgataatgagagttgctttcctgtatatcatgattaaaatgaaatattatttttgaatattaataaatatgctttactcttggtgaaagaggctaaaccaaggtgtgggctaaactcattacattaagaatcatcatttgctttatttttttttttttttttttttttgagacggcgtctcgctctgttgcccaggccggactgcggactgcagtggcgcaatctcggctcactgcaagctccgcttcccgggttcacgccattctcctgcctcagcctccccagtagctgggactacaggcgcccgccaccgcgcccggctaattttttgtatttttagtagagacggggtttcaccttgttagccaggatggtctcgatctcctgacctcatgatccacccgcctcggcctcccaaagtgctgggattacaggcgtgagccaccgcgcccggccaagaatcatcatttgctttaaaagaacaagattacattgtatttatttactataacctcatctaaaatatcagtgcttaaagatccttctcaccctgctgaaccttatcagactatatgttttgtaatttttatgctaaggataaaagatccaaataaaaacttgtcaaagtagattgtgtcttttatagcagcatcacacagtgctttacaacattagcctgtgatggaaatgagcaggtaactgtagtatctccatcttatattgcaaaaaacaagagcagagatgttaaataacctgcttaagtcacatggctagtaactggtgaagccagacctagaattaagtttctgttactgctagtttagtctctttatgatgtcagactaaatctgcataggttcaaagtaaaagtggtgtcacaacccatagaaagaaagatttttctcttatctcagattcctaagcgggacatttacatgctctgcaaagtagattggtatatcaaatatgcctcctaagtaatatcatagtgttgttaattaataagtttttaatgttgtttgaaatattaactataatcagatatataatttagtagccatgtgatattaaatgctttttaatagcgataagttttgcatggatcctgatgtctactttagtataaatgatttaaataatcaattgacacaatttgcctcacatttcattatgtatatttcttcataggatccattctggaacagaatgaagaagccactgcaccttttggattgtatacatgtattattgataagatatgttgagaatcccagccaagttttaaattgtgaaaggtacttatgaattaaatattggatcagcaaaagcttttaaatgcttctaataaatacctgggtaaaaaatttgaagagaagatgggaagattcttgtgtatattagcaataactatttgaatgatattgatcaccatgtatgaaaaataggagttttttccattttcaacccttgtcctaaatcctttctacagctgaacatacataatgtattcatttcttctactttagattagtgatctaggaccaaaacatttcaattatgtctttgtgatattattggccatttaagggatattcttttgaaaaagaatattagcaggaatcatctcttactgctttcttctcattgtaaaaatcttcaggccaggcgtggtggctcacacctgtaatcccagcactttgggaggctgagatgggcggatcatgaggtcaagagatcgagaccatcctggctaacacgtgaaaccccatctctactaaaaatacaaaaaaattagctgggcgtggtggcgggcacctgtagtcccagctacacgggaggctgaggcaggagaatggcgtgaacccaggaggcagaggttgcagtgagccgagatggcgccactgcactgcagcctgagtgacagagcgagactccgtctcaaaaaaaaaaaaaaaatcttcaaatggaacccacctacacccaagttttcttttttactttatttcttatttacttaatcacatggtctttcctctcctgtgagaattaaagttgccagaagttggtggggaagaagtcctgcaggaggaaatgtttgtaaatgtataattaatcatgtgtctttttcgttgtaggagaagatttacaaatctctgcctggatgctgtttgtggttaccttgttgagctccagtctatgagctcgtcagtagcagtacaagccatcactgggaattttaaatctcttcaagctaaattagaacggcttcattaattactgtgatatactttcatccgttttatgatctgtaaaataaaaactcagctgggtccagatatcaggtgttctaaatctaagaatgtaagaacaatcttaatagaaatatgtttttaataagtggctaatatctacaaatagtacctttgctaaatgaattcttttttatgactattttgttttttagtaattgggtgaaaaaacaactgaaatgagattatttattattttaacataaggattaaaaaaatttagaaactcttattttgaattgtactgcaggcagaaatttcgaatttatattattcattttcaagttagtccaaggatattggcattaaaactccactaggcggccaggcacagtgacttacacctgtaatcccagcactttgggaggccaaggtgggcgaatcacgaggccaagagtttgagaccaacctggccaacatggtgaaaccccatctctactaaaaatacaaaaaaaaatagccaggcgtggtggcgggcgcctgtaatcccagctactcgggaggctgagggaggcgaatcacttgaacccgggaggcagaggtttcagtgagtcaaaatcgcaccattgcactccagcccaggcaacagggcgagactctgtctcaaaaaacaaaaaaacctcaaataggctaagcagatccattcccataatagtggattctaaaaccgtccttaaataggcaaataactgactttttcaaaactttttttaggtgttgggttcacccttgaaagaactgtcctctaacaactggttttgtcagttaaagcccttgagaattgacatagctatatacctggttgagcaggtgataaaacttgtaactaatgttgtgtcctgaaaacctacacagggaggtactgttttcccttagtgtctacctggctgcttggccttgtgactactgattccattagagcagtggttctcaaagtatgtgctccaaaccagaagcatcagcatcagcatcagcatcacctaggaatttgttagaaatgcaaattctcgagccccaacccagacctactgaatcaaaaacgtgggggatgaggccctgctttctatgttttaacaagctctccaggagattttggtgcatgtcaaatttgaaagccactgcagtaaaggatactgctaccttccatagtttatggactgagctacctatctggctcctcctctgtgaataaccacacacacaaattttgcccaaggcacacaatatataaagcaaaactgttagtaatgtactttttaattattccttaacaaaatagaataaccaaaccaaatgcttcaaagtaatagcaacaagagagaagaagagtgggaatgaccagagctaacaaaacactctattcctttctctcttttttttttttttggagacagaatctcaccctgtagcccagcctggagtgcagtggtgcgatcccggctcactgcaacctctgcctcacaggtttgaagcaatttgcctgcctcagcctctcgagtagctgggattgcaggtgtgcgccaccatacccagctaatttttgtatttttagtagagatgggtttcaccatgttggccaggctggtcttgaactcctgacctcaagtgatctgcccgcctccacctcccaaagtgttgagattacagacgtgagccaatgtgcctggcctattcccttctctctttatgctaccacaaataattaccttctgtttattgtaagtgatgcatgtctaacaatttgtacaatacattttgaatatatttttccttccattattgtcttttcccaagaccatagggttgccttctctacatttgttctcttagaattcagctcccttttccctataatcttctaatgtagaatatttaatagaatgccagaacgtcactcagtgggtactactacctcttatttttcaacttttcagtttcttaagtttagcgttttttgaatatgtaaagtgaatgtatgcgatacattaattcgttttataaatttaaa

SEQ ID NO: 12095 - DNA, 5848 bp, Homo sapiens
tgtagatcaactgaggcatctacttgtgagtaatgtgggaggagatggagaagagattgaaagattctttaaattacatcaggtaattatatatacttttaaaaaatgtgatgctattttaaacaaacagtgggagtcatagtttatgtaaattgggactggaatactgtaataaatatatatatatattttgagatggagtttcactcttgttgcccaggcaggagtgcaatggcgcaatcttggctcactgcaacctctgcctctcaggttcaaatgattgttctgcctcagcctccccagtagctgggattacaggcatgtgccagcactcccaactaattttgtatttttagtagagacagagtttctccatgttggtcaggctggtctcgaactcccgacctcaggtgatccgcccacctcggcctcctaaagtgctgggattacaggccgtgagccaccaagcccagccataaatagataatcttaacaatattcctttctttgcctaagtcactgtatgtgaactgacatttgaaagcaggattaatatgagtcttgtagtgagctttcagatttttattctctgttgttgataaattcttttttttttttgagacagagtctcgctctgccgcccaggctagagtgcagtggcgtgatctcggctcactctaagctccacctcccaggttcattccattctcctgcctcagcctcccaagtagctgggactacaggacccccccaccacgcctggctaattttttgtatttttagtagagatggggtttcatcatgttagccaggatggtctcgatctcctgacctcatgatccacccgcctcggcctgccaaagtgctgggattacaggcgtgagccaccatgcctggcctgttgttgataaattcttattgaagtctgctagtaagagtttcttgttcaggttatatgataaatgccttttcattaaaagcacaagacatttagggacaagttgtttttggtttgtttgtttgtttgtttgtttgttttggcttaatgacctgaggaagaaacctgaggcaacagtgtagagatcttagtatttcagagccacaactggaattgatacggttaaaattgggagtagttcaaagttaagtatacagactctggattcaaagcacctgtgttaaaaatcccagctccaccactgaggtaaattacttgacttctctgggcttcagtttccttatacattataataggatgtggtatgaggattaatatatgctaaactcttaaaatagtacctgacacatggtaggtattcagtgttaccacttaattgttattttctagaaagcagaaagaccacaggaagaaaattggagacataagccggaaactaagtcagaatctaggttaaaaggaaaagagaacatcctgtaatcctagtgcttatgatgaacttaaaaccagtagtgtttacttgtctttttaacactaactgatttcattcagtcagcaagtatttattgaatgcctgctctgtgctagatacagactttaatactgcatctagcagtacacaaatcattttaaaatttgtatttaatataaggccaatattcctctttttacacaggaagaccaggcttgtgcaacttgccttattcttgcttgctccactgctgcctgtgatagagaagtatctgcctgggctactcgggctttctttaggtatgtgaaagtttttcttgtttatttatttgtttttttactgggccactttttaaaatgattttatcaatgtgataaagccttgccaaacagttgagtgactatgtaggcaaattaccaaaattcatttgcaaaagggtgaaatctggagagattataatggtaatagaagcaagtaaattagcatagtttatgcattattactttaactctggattctgttctgtaacttcttgtctactttctacactttgttctacctcagttactgtctcatctatcttttttacttccccaaacactatgccaattctgcttaatatgtatcattagtattgaaggcttctgaattactttaaggaaacttggtaccaaagagatatttctatttagaaaatatttaagaatttgaaatgtgattttgttagaaacgttttttgaagtactatctaaccataacctagtatgaaaattacaatgccatttactcacaaagtaaattctatgcattgcatatctttttcttagaagttatcagagtcccttataattcttcctggtagcagtttcaagtccacatttactgaataaatatttattataagtcttatgcatatactttactgtcagcacaatacattgaagtctctaatgtttaaagcatttacttggaagctaaacaggaaaaggaacaattccagtttttaagatggatggtttgttttactgaataaactcaacctcttgtcataaaaataggtatggtggtgaagcacagatgagatttccaaccactcttccgcctccaagtaatgttggtcccatcttggggtctcctgtctattctagtgagtatggaacattgaaatgaaattgtttctaatcgtttgaatcttagaacctttatagcaatttttatcaataagccttttcattatgttttatttactgctattgtataattgatgaatacatctatagattctgattcttaaaagtgatctattaatattgaatccttaatgtaaggaagcaaaataagatgtaaccaatcatatttacataactcatttggtatatattcagagggaaacagatgaatgatttaataattaactcgcacatcagtgttttccaaggtgggagttgttagaaacttactaggagatcagtccctaattcttgcatatatcgtggacaatgtaactccttatgcttagaaatagcttctgtggccaggcacaatggctcacacctgtaatcccaggactttgggaggccgaggcgggcagatcacctgaggttgggagtttgagactagcctgaccaatatggtgaaaccatgtctctactaaaagtacaaaaagtagccggcctgtggtggtgtgagcctgtaatcccagctactcaggaggctgagacgggagaatcgcttgaacccgggagacagaggttgcagtgagccgagatcatgccactgcactccagcctgggccacagaaagagaccctgcctcaaaaaaagaaaaaggaaataccttctttacctaattttgatcacattcaaaagattgagatgttcttttctaaatctttatattcttctttccctttttaggttctcctgttcctagtggtagtccctatccaaatccatcctttttgggaacaccgtctcatggtacctcttttctttgttttggattggattcattttgaagtgctaacattatgagttaaccttaatgcttagtgtgaaaaagatgaacttgccttattcccttgaaaataaatataattttagaagcgctgtccaagcaagttttggcatttggatgtgaatgcctttatttaggaggaactcctcttataataagcctggaaagcccattatttggctaccaggattaaattgaaccctaaaatctgtgtaatcagttctatttcactgtcagcattacaagcagtactggcaagtttgtttccttttcattctgcattgtgaacacttgcaagtctatctgggagtacccatccacatttaaatctctcttcttattaaggaaaaccaagttaaatatctatgtatttcattgtttttgtaaatacctttgtgtctagatacacaaacttgggttatgagaattctgaattttatgggttctaagattaagagatttatgggttctaagattaagattaagagatttatgggttctaagattaagattaagagatttgtttttcttatgtgtgtacaaggtatacagcctcctgccatgtcaactccagtgtgtgctctgggaaacccagcaactcaggccacaaatatgagttgtgtgactggaccagagattgtgtactctggaaaacacaatggtatttgcatttacttttctcggatcatggggtaagtttgtcatgaaataatgaattattgctcaccttgtcccatcttgagtagttaaatatttttaactctgaatttgggacatcatttattcctattaaattttagttttagctcacttgttgatcaataaaacttttctattattccagtttttgttatctaactatattcattgctgtgttttatttctcttactctctcataatctatttttgtagcatcaaaatacagttgttccttaacacaggggttaggggatgccaaccaccattcctcaaccttcatgtagtcaaaaattcatgtacaacttttgactttcttaattactaatagcctactgtctagaagcctcactgataagtaatcaattaacacgttttgtatgttttttgtgttttctttttttaacttttgcatggtgtaggagtatgggggagtctcgtaaaaaccagaaaacctgctagacaaattctaaaacagccgtaacactgatattttgtgtcatatgtgttatacactatattcttaccataaagtaagctagagaaaaaaaattaagaaaatcataaggaagagaaaatatatttactattcattaagtggcaatggatcatcataaaagtcttcatccttgtcttcacgctgagtaggctgaggagtaggaagaggaagggttggttttgatgtgctggggtagcataggtgggaaaaaaatctgtgtataagtggacccacacaattcaagcccatattgttcaaaggtcaactgtatatctacttacatatgaatgtacagtgttacaaacttccccataactcagtgacatgtgtctacagttcaacagggcagttcttgtcttgctgggctaactcaagaataggcaatcagttgtgaagttaaagagagctatgcttatcttggctagactgtcacatgttcaaggttatattttccagctggtctagaatggcccaagatgaaacagcttggttgttctctacatggtttctcatcccccagcaggccagccaaagattatttagttggtggtggcagagttccttgagaaagagtagacacttgcaaaacctttattctaaactcagaactggcttaccatgcacttttccgccttattcacttggccagagggaagtcacagggccaactcagatttaaaaggtgggaaatagaccaccttttaggggagagacatcaaatcatactgcagaggggatagatatagggagggataaagaaatgtggttgtttttgcaatcagtctatcatgttatcttagttagctatcatgcctaatatatatttctcttagatttgagatgtatgatttcattcatctcatttgcttaaaagtatgaaacagtacagagcccctttataaatttcctgtttacaatttattatacagagccttttgatttttcttcagtaatatttcattatctgaaaaacttaggtacatcaggtatgaaaattttctagtattccactcttctagatagcttagtaaaatgttaaatgaaaccactgcaagttttaaaaactgaataaagccattaagttcctagagaaagaaatttattgtaattgtttttattcatttacagcacaatcattaaaacttttttttttccagaaacatttgggatgcaagcttagttgtggagagaatattcaagagtggc

SEQ ID NO: 12096 - DNA, 595 bp, Homo sapiens
aaaagatctcactctgttgcccagactgctctcaaaactcctggccttaagtgattcccctgcctcagtctcccaaagtgctgggattataggcatgagccaccatgcctgtccattatttctttatagtgactattatatgtaggcaatgtataattggtagaacatagtctatgaaacagtgcgttaattgtgggcagtgaagaatcattgaagttgtgaaatttgtattttaactagatcattgtagtatggcaaaacggttaggaaagagaaagctatcttgactaactacgctatgagatactgactgatgtacatgtacatttagtgtttctttaggtatacctgacttattcattgaacacctatccactgatctcaaaagtattcctcagggtagtctccattcctgtcatttttcctcctattcatgagacggaaaaattatgaccatggtacagagttgtatcaaggaaatgaagaactagaacattgaattgaaaggttttgaaagggttcacaatttcttttcattttctattaatgtcttcttttaaattctcttaagaataaaacttttttctaatatttt

SEQ ID NO: 12097 - DNA, 599 bp, Homo sapiens
aaaagatctcactctgttgcccagactgctctcaaaactcctggccttaagtgattcccctgcctcagtctcccaaagtgctgggattataggcatgagccaccatgcctgtccattatttctttatagtgactattatatgtaggcaatgtataattggtagaacatagtctatgaaacagtgcgttaattgtgggcagtgaagaatcattgaagttgtgaaatttgtattttaactagatcattgtagtatggcaaaacggttaggaaagagaaagctatcttgactaactgtttatgctatgagatactgactgatgtacatgtacatttagtgtttctttaggtatacctgacttattcattgaacacctatccactgatctcaaaagtattcctcagggtagtctccattcctgtcatttttcctcctattcatgagacggaaaaattatgaccatggtacagagttgtatcaaggaaatgaagaactagaacattgaattgaaaggttttgaaagggttcacaatttcttttcattttctattaatgtcttcttttaaattctcttaagaataaaacttttttctaatatttt

SEQ ID NO: 12098 - DNA, 5872 bp, Homo sapiens
atactggagtgtttcctccacactggaaagaggtgagtcatatcattgtgattggtgttttaagtatatttttattgttattttaaatggcattcaagtttagcttcaagttcaacagcagtcttagcctacttcctcccacacaaatactcctgccagtaaataggcactcttaaataaaacagtgcctgcaagaaccttctgacccattgaaattagtcttgccctgtcttcagaggtgtattcgtccctctctgggtgtagagcggtatttaagggtgacactcgggcacgcaggaggtgtggcagggggcggggaatgcaaggtcactgtggctcaggggcgggtgtgggtgcaggcgcgttgggaggaccctgggcgccctgggaagtccgagggcaggcggcagggctggcgggcagcagtgctggcttccgacgtgaggtggtgacggcgggccctgcgcccaggccctgtgctgccgaccgctgtcctggctgcgcagctccccagcaggcgccgggctcaggtcgcgccttcagttagcgctcagcctgcgctactgcgtctcctccgcttgcgatttctggtcggatcccagctggcccagacttgctctgaagtaggaggaaccgctgtcgagcgaaaagtgcacaccgggtgattgatgaactcttaatagaactaacctctcctgcccccaaccctagacacacacagagaaaacctccaccccagccccttctccagtcctcctcgcgggcgagaggggacgcggccgccagccggtagggtgattaactcaccgtctgtctttgcaaaagtgttccaggtggatcaggagcgccagcccaccccgcccgcagcctggccgctcgctgaggcgcggagagcgcggaacgagcgcgcgcatcacgtggcggcgcggacgtttgtgccgcgcgcccgccagaccgcccaggaggcggcggctattgttccccgcaggggcccggggcgccctgaaacggggtccacgtcagcccgctcccgagcgtgtcctcaggtctaaggacgggtggggcttcctttgtgtgttctctggaaggggctgggatggcgtcgttgctgccccaaggggtaaccgagggggattgagggaagatggtaccagctccctagagctcagctcaccagacctactcttccgctcgacccttgcagaggaggtggggacggatatggtatttgtagggcagcgctgtgaacaatggagccatcaaaaaggccttctcccagcctcctcaccaaccacggacattcctggcccaacaagacctcctggccaggttttgagccctgcttcccaggtaaaaacactgcctgtaccagagctctccatgaattttggtttaaattaggatttaaattcttctggcccttactaatgttaaaacccagcttttatgatttctccaggtagtattctttccttaaaataatccagactagctataggaaccaatcaggacattttgcccaagatctaggacagaaagactcatgcagtaactcctgccttacagatctggggacccttcacctgcctctactactgcaaatgattggatattcgtctgacttggctcttccctaatgtgtggaactaattttgttcactctgtttcatgctggacctggcctgaaaatgggcccttatattgtctttgcactttccaacttgccaaggtaggtgtgaaacctgagggaagtttttaggaataggctttaggccaggtacttaaatccatttgttcccaaccttggactccaaagataagggcatttgtagctggagtagaaaagaagggaacaatgagaactaagatttcatcctctgtgatgattcttatcattcaccgtccttcctctccagcatcaccagtgcagaaagtgcagaggacttatgtacccaatctttttttttttttttttttttttttgagatagagtttcactcttgatgcccaggctggagtgcaatggtgtgatctcagctcactgcaaccttgcctcccaggtacaaacgattctcctgtctcagcctcccaatatacccaatctttctcctttctatccaggccttctgcaagagagatctaagaaccagccctcaaagatggtaagggcttggctagtgacagcccagtctcagctccctgtgcccaaagtgtcggaacagggccactcaacccaagccctacatatatactctgggaagttgcagtgcctcgaagtgatcaggccatagtcctgtgaagactggggtcatccatgtcccttcctgcctactcacaaacttctgttcttcctattcttttctttcagtttctgaaagaaggaccaaagtaatgccaagaactcccagatgaagaggaccttccttagacctataacagattcactacttgacttcagagggaagtttcagctaattctcaggaaaaggtcaaaacaggcctgtgactgtcccttgaatactgaaggtataaacaagcttctggctcctccaggtcaagcagaggaacacttttattagaatgaagggttacttctttgttattcaaacacacacccacacacatcctctgtagtctccctaatgaaaaacctcaacagatggagagcctgagctcccaagtccgcaggctgagaagatgcacttcactcaagggccagtgggctggtacagactagggaagagaaaagggacaaaggctgctagtataggtaatcactatcttttaatactcctaacacatagaaattcgaaaaatcttgttcagcaatgttagcagcctgtgagcctcggaaactaatttggctgatgtgtctctgatagggagcttggggctgcaccaaggggaaacattctcctcctgtattctctcctctctctcgtttgaaagcctgtacaaagaaatggtacaaatggatggttaacttaatgattccatcagaggcagatttttctctgtcaggtccctggataaggtggaggtctgaaagccaggagacagaatatgtacttaatcgccctttctgacctgcttaccagtgaccaggactactctccaggcctttcttctgccacttccccattcttcctggctagttcagttgggtctcagcacttcaactcctggctggatcctgagtttttcttggttgcagggaaagctctcactgtctgcatctccttccccacccccacctcccgttttgcagctggccattctggctgcctcacagctatcctgccttaattcatatttgattgcctggacagaaccacctagaatgtccagacgactgccacccctcagccatgggcctgagatcctgccctgacccctttcttcagaccccaggaggacccacaatctccctgatccccaccttccccaaagtagtctctaggaaaaaagcagagctggctaaggcctgagacagagccatttcttccccttgggcaaacgaggtagaccctcccagagaccaatgccggagaggcccggatccgagctccctttatatggcctcccccatcacggatcccgtgggaaaacctgacacacaatggcgcggctgctccgggcaccctcaacccagcgccctgcggcaaggcctggagcagcctggtggtcttggtgcgctccctttgccctccccgcaaccctctgcgagcactcgtcccaggagagagaccctggctagggtggaggttgcctcccgcaaagggcgctgttgctggggcctcccctcccccattctcttgtttttctgcttctgagactcgggagggaggcggcaggcgcctccgcagccgatagagcagctattgtgaccttcccttgcagagcgggaacccagccgagtgtgtaccgccggcggtggcgggggaggaggcgactgtgtgtgcaaacctcagtcggagagggggtggcgctgggaaataaaggtttgcaacctcaggcagttgggcccttcagagggcgtttggttgtgtttagactcggttgctttctaacactaattgcaggctcaaaaggagcggaatttattgcgaaggccaaggcggcttgtttataatttatgaagttttaaatggctgtgccgcgggccccaactttctcctgggctggcagccgcgcggaaacgcgccctcccccggctcgccgcccacccccacccacgcccctcagatgagtctcacgccaatggcaggaacagatccgagctattagaagtctcgggaacctccagagatgacagaaggtggcagatttggtccaagccctcaccccactcgagaggagggcgtcggggaaagctgtggctgcctggagagggagcccctgatcccacacttccttggagcctgagtgtgagaggaagctaatgtcagccgggctagacaccgtttaaagtctaatccatgaaaccctaagccgcaaatgacacttggggctttgcagacacccgcagactcagcagatactcctgcggtaacacactgtgctggaaaacgcctggagccatgacacattacgtatttttattattatttatggtaggaagaggagatgagggaaaatcgggctgaatctaagcagcctgacaattcagctagttaatatttagccagttaagaaaggtggttgtaatccctgcaaggcagtgagctctcctttgatttctctaatagcttaaaaaataatttcttacaagacaattagaaattctgcctatggatgcaaatttcatagaaaacaatgttaagccttgaaagtgggtaaaatgtgccttcgattgaagtcatttattctgttgatacacttctacaacatatatattttaaacctgctcagataaagtgaaatttagcaaaaggatatcccctcccacccccaaatctaacatgccattttaaaaacagcacaaaggaacaaggaaactaaatattattttgagccatcattacttagtgaaatacaaacatccaaatagaaacgattgttgttccaccagaagattagaagttaaattatttccacacaataggaatttcacttcgtgtcatcggggatgtagtaggagttgcattatttgtcaaaccaaatagagatgcgtgggctgactttgctgaaatacaaaagaattgaaccttatctgaaggcgttttctaagtggcccctcccatagaagccgggaagttgtccacccctagcagaagccacattaatatttacaaaatggttataaatccttgaagacatttttgcccattttgtataagaaacaggagtaaacaaggtgtttatacttgttatgtttcattaatgaaatattattactttacatcttggggaatgtttgttttctttagaaatgaactaatgatcactacaaaggaagaattcatgacagcatttcctagagaaaaagcttaggtacgcgtctccaaatgatggtttctttttctacaccttagctttttcatagctcaattcttcttacaacttctcttgtgttttttctttgattgtcagttttctttcaaagtttattttttgttacttaatgcagaaaagtgagctctggtctccccagtgtaaaagtcgattgtgtctagaaagaaggcagtaaaaacagcaaagcaggcgctgctttcaaaaagccctgcccaaatcatcccgcccagaaccttcttaggtttgcatcctcatttccccctcccctaatttcaatagctggaaagtaatcaagtatcccgagaaccaatttatgcactagactccaaataaataaaatatttttttcaaagtgtca

SEQ ID NO: 12099 - DNA, 4754 bp, Homo sapiens
  SITE (99): n equals a,t,g, or c
ggtaaccgagggggattgagggaagatggtaccagctccctagagctcagctcaccagacctactcttccgctaagacccttgcagaggaggtgggganggatatggtatttgtagggcagcgctgtgaacaatggagccatcaaaaaggccttctcccagcctcctcaccaaccacggacattcctggcccaacaagacctcctggccaggttttgagccctgcttcccaggtaaaaacactgcctgtaccagagctctccatgaattttggtttaaattaggatttaaattcttctggcccttactaatgttaaaacccagcttttatgatttctccaggtagtattctttccttaaaataatccagactagctataggaaccaatcaggacattttgcccaagatctaggacagaaagactcatgcagtaactcctgccttacagatctggggacccttcacctgcctctactactgcaaatgattggatattcgtctgacttggctcttccctaatgtgtggaactaattttgttcactctgtttcatgctggacctggcctgaaaatgggcccttatattgtctttgcactttccaacttgccaaggtaggtgtgaaacctgagggaagtttttaggaataggctttaggccaggtacttaaatccatttgttcccaaccttggactccaaagataagggcatttgtagctggagtagaaaagaagggaacaatgagaactaagatttcatcctctgtgatgattcttatcattcaccgtccttcctctccagcatcaccagtgcagaaagtgcagaggacttatgtacccaatctttttttttttttttttttttttttgagatagagtttcactcttgatgcccaggctggagtgcaatggtgtgatctcagctcactgcaaccttgcctcccaggtacaaacgattctcctgtctcagcctcccaatatacccaatctttctcctttctatccaggccttctgcaagagagatctaagaaccagccctcaaagatggtaagggcttggctagtgacagcccagtctcagctccctgtgcccaaagtgtcggaacagggccactcaacccaagccctacatatatactctgggaagttgcagtgcctcgaagtgatcaggccatagtcctgtgaagactggggtcatccatgtcccttcctgcctactcacaaacttctgttcttcctattcttttctttcagtttctgaaagaaggaccaaagtaatgccaagaactcccagatgaagaggaccttccttagacctataacagattcactacttgacttcagagggaagtttcagctaattctcaggaaaaggtcaaaacaggcctgtgactgtcccttgaatactgaaggtataaacaagcttctggctcctccaggtcaagcagaggaacacttttattagaatgaagggttacttctttgttattcaaacacacacccacacacatcctctgtagtctccctaatgaaaaacctcaacagatggagagcctgagctcccaagtccgcaggctgagaagatgcacttcactcaagggccagtgggctggtacagactagggaagagaaaagggacaaaggctgctagtataggtaatcactatcttttaatactcctaacacatagaaattcgaaaaatcttgttcagcaatgttagcagcctgtgagcctcggaaactaatttggctgatgtgtctctgatagggagcttggggctgcaccaaggggaaacattctcctcctgtattctctcctctctctcgtttgaaagcctgtacaaagaaatggtacaaatggatggttaacttaatgattccatcagaggcagatttttctctgtcaggtccctggataaggtggaggtctgaaagccaggagacagaatatgtacttaatcgccctttctgacctgcttaccagtgaccaggactactctccaggcctttcttctgccacttccccattcttcctggctagttcagttgggtctcagcacttcaactcctggctggatcctgagtttttcttggttgcagggaaagctctcactgtctgcatctccttccccacccccacctcccgttttgcagctggccattctggctgcctcacagctatcctgccttaattcatatttgattgcctggacagaaccacctagaatgtccagacgactgccacccctcagccatgggcctgagatcctgccctgacccctttcttcagaccccaggaggacccacaatctccctgatccccaccttccccaaagtagtctctaggaaaaaagcagagctggctaaggcctgagacagagccatttcttccccttgggcaaacgaggtagaccctcccagagaccaatgccggagaggcccggatccgagctccctttatatggcctcccccatcacggatcccgtgggaaaacctgacacacaatggcgcggctgctccgggcaccctcaacccagcgccctgcggcaaggcctggagcagcctggtggtcttggtgcgctccctttgccctccccgcaaccctctgcgagcactcgtcccaggagagagaccctggctagggtggaggttgcctcccgcaaagggcgctgttgctggggcctcccctcccccattctcttgtttttctgcttctgagactcgggagggaggcggcaggcgcctccgcagccgatagagcagctattgtgaccttcccttgcagagcgggaacccagccgagtgtgtaccgccggcggtggcgggggaggaggcgactgtgtgtgcaaacctcagtcggagagggggtggcgctgggaaataaaggtttgcaacctcaggcagttgggcccttcagagggcgtttggttgtgtttagactcggttgctttctaacactaattgcaggctcaaaaggagcggaatttattgcgaaggccaaggcggcttgtttataatttatgaagttttaaatggctgtgccgcgggccccaactttctcctgggctggcagccgcgcggaaacgcgccctcccccggcacgccgcccacccccacccacgcccctcagatgagtctcacgccaatggcaggaacagatccgagctattagaagtctcgggaacctccagagatgacagaaggtggcagatttggtccaagccctcaccccactcgagaggagggcgtcggggaaagctgtggctgcctggagagggagcccctgatcccacacttccttggagcctgagtgtgagaggaagctaatgtcagccgggctagacaccgtttaaagtctaatccatgaaaccctaagccgcaaatgacacttggggctttgcagacacccgcagactcagcagatactcctgcggtaacacactgtgctggaaaacgcctggagccatgacacattacgtatttttattattatttatggtaggaagaggagatgagggaaaatcgggctgaatctaagcagcctgacaattcagctagttaatatttagccagttaagaaaggtggttgtaatccctgcaaggcagtgagctctcctttgatttctctaatagcttaaaaaataatttcttacaagacaattagaaattctgcctatggatgcaaatttcatagaaaacaatgttaagccttgaaagtgggtaaaatgtgccttcgattgaagtcatttattctgttgatacacttctacaacatatatattttaaacctgctcagataaagtgaaatttagcaaaaggatatcccctcccacccccaaatctaacatgccattttaaaaacagcacaaaggaacaaggaaactaaatattattttgagccatcattacttagtgaaatacaaacatccaaatagaaacgattgttgttccaccaaaagattagaagttaaattatttccacacaataggaatttcacttcgtgtcatcggggatgtagtaggagttgcattatttgtcaaaccaaatagagatgcgtgggctgactttgctgaaatacaaaagaattgaaccttatctgaaggcgttttctaagtggcccctcccatagaagccgggaagttgtccacccctagcagaagccacattaatatttacaaaatggttataaatccttgaagacatttttgcccattttgtataagaaacaggagtaaacaaggtgtttatacttgttatgtttcattaatgaaatattattactttacatcttggggaatgtttgttttctttagaaatgaactaatgatcactacaaaggaagaattcatgacagcatttcctagagaaaaagcttaggtacgcgtctccaaatgatggtttctttttctacaccttagctttttcatagctcaattcttcttacaacttctcttgtgttttttctttgattgtcagttttctttcaaagtttattttttgttacttaatgcagaaaagtgagctctggtctccccagtgtaaaagtcgattgtgtctagaaagaaggcagtaaaaacagcaaagcaggcgctgctttcaaaaagccctgcccaaatcatcccgcccagaaccttcttaggtttgcatcctcatttccccctcccctaatttcaatagctggaaagtaatcaagtatcccgagaaccaatttatgcactagactccaaataaataaaatatttttttcaaagtgtca

SEQ ID NO: 12100 - DNA, 9013 bp, Homo sapiens
gactgggaaatttttttattctaaatatttgttccaatagtaccagacaatttgaaatcaataaactgtggtgaggactgtggtttttgagaaatgaccaaagtgtgttgtgccacgccaccgggcttcctgactctacccatgaaggacaatttgcggtcttaatcctttatgtcaactacaaacaccagccacggttacgactgttcaaaactactctctcaactagttcagaccagggggactaaggaggtgaaatgtggcccccacggcctggaagcgaattcctaagctcggctggataaatctacaaatatacacataaatacattcagacaaggataaataatcagggaacgaaatgactcgcttcaaataataaatacagatagtttagtccgatgcaatccttacggcacaggaaggagaatataaattaaggtctctgaaactaagctagacgcgggccaggcccaagactctccaagctctggtccctctgcagggcgcgccgctgatgggtctcagacttacctttgggacaccattaccagattggagtcccttggtccgcagtatgtggcactgtcaaatttacagggaaggatccttgcggctgatttatggcgagtcacccaaaggacgcccatggaggggaggcccggtcgcctgcgcctccgccgctggaggcctgagacccgggaggcggcggcagggcaagagcggggaagggggttcccgaactgccccgcgggccccaccctctaccccaccactacagcaagagaggtaattttgccgcgagttcgggctggcggcggccgctacagatgcgtcagtttgggagcctccggcagtcgtccctgagacgagtggtgggccgagagatctgtgtaggtgggatgagggtcgcaaggtccatggtggtggttgcctggaatctgcgcggcgcaactgtagtccacgctggccgacgacgggtgcgagaggtggcccaggttgaagacaggcccggacgcgggcgccatggactcgacgaagttgccgcccacgtacaccgggctgccctgcaagttggcgctggcgaagccgccgccgttgctcgccatgggatggggctcgaactccggcgctgcgtagcgcttctgttgtggcaggcagctgctgagtggcgccgtgtaggcggccaggccgtacatattgggctgtgatttggcgaaagcaggcggcgagggcgcgtcgtaggccaggccgggcactggcggcagctggccggagtaggccacgtggccagcggcgccgccgagcggtgggctgcgctcaggggactggctagccggcgagtgcaggatgcccttggccttctggtccttcttgtacttcatgcgccggttctggaaccagatcttgatctggcgttccgtgagattcagcaggttggccatctccacgcggcgcggccggcacaagtagcggttgaagtggaattccttttccaattccaccagctgcgcgctcgtgtatgccgtgcgtacccgcttggatgctgggcctggcgggctcttgtcctcgcagctctctcctgggcagggagggagagagggagggcgctgagcgagtgggtggggaccctcaggactggagaggggtgcttccctggttctcttttcctcctccctccccccacctccaatcctggctggggaggggaagggccgtttgagaggtatgattccaagggggaattcacctacctaccaaccccctactaggcctacctatcagtcgcacctgaaacctccatcagccttctgagatccagttcactctgcccaccctctcccctgcagcctagtccatcatcccatacccacccaaaggccatgaaagagtttaatgagagaccaggagcagctggtaaggcctccctctgtcaaagaagggccagactcctttgaacactcctcccagcctctgctgccaggggtggggtatggagaaggaaaggaagaggaaatagctccagcctgccttgcttaggagctggcctctgggcaaagccccccaccaacccccagcaaagtatggggatggagatcttggcgccccactgcagcccaactgcactcaaagccagggaggtgacaaaccaaaaaataaaaaataaaaaaaaaccaaccaaacaaacaaacaaaaaaaaacactgcctgggtattttagggagtccaaggccaggctggaagcattttgagtattcacagtgctaggagcagcagcctcaacactggcttttactaccctgccacctctcagctgcttgtccactccctcccagggaagacaaatggatttctcctgggagggagggcctgagcctgcagctgaggaaggaggggcaggaaaaggaggttgcaggcaggataataccctctccctaggagcagcagccccagaaaacatcaggcaaaccagatccctgatagcaagccacaccccaggccccaaacttgccctggacctggaagcaagttcatctacctgaagataaaccacatcagataccacaaggtcagaaaatttcaggaaccaagcagtctaagcagagagaaggaacagccctcagagttcctggccatgcctatcttctacatgccctgggtggacctagagaaggccccaactggaggggctccccttccagttagagaaatccaaggctgttactgtctcccagaatatcctctcctactaggacaggcacctccccattatggatttgctggagtgggagaattgggctgaggtgggccaaatagagactcatggttatgcttagcagcccctaaagccagactgactggattcaaatccaccactttgcagtttcagaatcttgggcaagttgcctatcctctctaacagttttcttatctgtaaaatggggatgttatcatatacctacctcaaaaggttctttgaaaaattaaattagataatgcttagaaagtacttagtatggtactttctaagactttagtttttatgagtttaagggaatgagattcgtgtgatatgggctatataatcacctaggcttggggattgtaatacctatcttcaaatcttgaagagctgttgggtggaagagggaatggagttataattagcagcccaggaaaacagatatgcccatataaggaagcactctctattaatagctataagacctgtccagcaacagcaccagcagcctggaatggaagggagcaccctgtcactgcaaggtcatgaccccaatcaggaacactaaaaaaaagaacattttgacgtgagtaggagtttagacatatgacctccaaggttgcatttccagccctgactaggcttccttgggtcaatctggagggggcttggtctggcagtaggccacctcagggagctacctgcagtggcacagctgttcttctgcttggagttctgtcgagactctttcatccaggggaagatctgcttgctgatggtggctgaggagctagaagcattgggcccacctttgggcttcttggcaggcactccacctccaggattggtgggtgaagatgggggcagggtcggtggtggaggagggggttgtggtggctgctgctctgagttcagaccaggaggctggctgccaccacccccaccctggctgttcccagtgcccggccgcatgcagctgccattgagttcagctcctttgtgggctggggctctcagaggggcagagctctggatggagcaggcagaacctggatagtcagtgtccagggagctggcagcagcagggggtgggtagggctggtggggggtgctgtagccgtaagtgtccgtagttttgctgtagccatagcctccaaacagtcctgggttttcatagtaagcagccttctgcattgtgcactcaggaagctccagggcctgctgaccctgctcaaataacattgactaccactgtatccttcactgccacctccaatgtctgctgaatcctgagagagctgggccggcccccaggctccaggtgacctgtcagaagaaaagcaagaggccccagagggagtgtcattggcaagaccagtcaatatagaaggactagcccatgctctctgcttcctacccacttcacggcggggagatgggcaaggtgctggatctgagtttatttacttatctatttatttattaatacagtgtcttgcttgttgcccaggctggagtgcagtggcatgaacatggctcactgcagcctcaatttactgggctcaagcgatcctcccactttagcctggtattaatagctatttcagagtatttcaaagtcccagctattctgcagtattaatagctatttcagagtatttcaaagtcccagctattctgcagtattaatagctatttcagagtatttcagagtcccagctactctgcagtagctacaggtgcccaccatgcctggctacatgtcttagtgttttgttttgttttgttttagatggaattttgctcctgttgccaaggctggagtgcagtgtcatgatctcagcttactgcaacctacgcctctgggttcaagcaattctcctgcctcagcctcctgagtagctgggattacaggcacctgccaccacacctggctaattttttatatttttagtagagacagggtttcaccatgttggtcaggttggtcttgaactcctgacctcaggtgatcaacccgcctgggcctccctaagtgctgggattacaggtgtgagccactgcgccagctcttagtttttttttttttttttttgtagagacagggtcttacaatgttgcccaggctggtcttgagttcctgggctcttgtgatcctcccgtcttggcctcccaaagtgctggaattacaggcatgagccactgcgcctggcagattttatgaagttcaacttatttgaacctctggaagtatcagaaggaatttttcctaaatgtaagaagagtttccttctttttagctcaactgtagctgagggaaagggcttccctctacctccagatacaatttactttcttcaagattgtccatttagcctttcttctgtgtggaaaagtacttatagcctcagacattttgttggctgattcgcccactaaactgtaagctccttgcaggcaggggctgtgtcatttgtctactgttcctaacatccagcacagtgccctgcatgtagttagtgcaataaatgcttgttgaataggtgaattaataagtggatcaatcagtcaatcattgggtcagcacaaggttttgatgggaaatgaaagtcctataacatgctcagaacagccagaacttaaaaaaaaaaaaaaaaaaaaaaaaaaaaagggtctccccccacctggtttcaaaatcacagcatcttgcatgaaagtccagatagtccacttaacgatgacagggtgaaaatcagctgagtaagctctatgaatcagcagtgtaaaatctacaatgtagaaaactaggggataaacaccaacaggaggacttgcagacttccagactcattttgaggctagaaaatgtttcttctctttcatttacatttttctagaccttttacttttgacctcccctacttttaaacagataccactggaaatgggcaaagagatctagaatttgaaatgcatggaacatgggtgagtggagaatgctttataactttattatttttgccttggatctattgtataaatagatattattgacatctgctctggataatctattctaccctacctcccacccaaaccacaaccaatgagagaacctttcatgacatgatgaatggacccagaattagaagaagaaaaaaaagctaagaaaaatcctaccccttttgtattcccttctttatgggggtttcccttctctccctgcctccctacttcttctgaaaggctcctaaagagttaaagtataactaataccattcaatcactttgtctgtttgataaagaaaactcataggtcagctccctggtctcaattcttgatctgtctttcaggcaactttccttcctagaaactctccctggcttccatcctggtcatcatgatgtaccacatcatctagacagcttatgtggcctaatggatttgaccacaggtaccagaatgattcactagttttccctccacctgcaccaaacagcctaacccaaattttaaaattcttctaattagtctttggtaggtagtgttgttgccctttttgttttgtcttgttttagaatataagtgagtatgccatttgtcttgatgaggaacaggcccttaataccaagatactatgttgtagaaattgtttccattattgttcttaaatgtatgtaggtaggatatctacttaacaaagctggacttaatttttcttttgattaattttatatatcattctctgttaaaagttactggatatcaaatggacagctaagtcttcattctgtgactaatacttacatatgtttgccccctgctgaagaaagaggcactctggatttggttatgtttcaggcttttctggtatcctgctttcagtcttaaccctctggaggcctaatggtcacatcggacactcagactaccagaacttgctgctgctctgtcattccatttacaactgtggaagcaaaacattcaccctcctgcctcccaagttgacaaagttgatctagataggtgaaccagtcacgttaaaatagcttacttaggaactgaccagttcttctgggacagatggctttatatatatatttgcttctatggcatattcctagaaaaagttctgtgtacagacctcaaaagtacaaacattgggcatcttcctgaaaaaccagagtctgttttcctaactgtttacattgtctcaagaaatttcccactcaatgacaatccactaccttaatgtccatttccccaaaagcaagagccagtgatggtgctgtccttactggaaatggctttgcagtcccccaaaaatgcagtttcccaaaagtgatccctcttaaaacaaaacctgagaatatagttacaaaactggtaaaaaggcttatttcttttcagaaatccctactccttgtgaactctgcttgaacctaaaaagcaggaacgggtcataaatcacttggacaatggtcaactgttcagtggctcatcttttcgatcaccccctcaccctttttttaaagcctttcttttctcgccctttggtacctttgctcatttgggctccaagacccaaatgtcttggggtgaagatgagccagtgttgggggaggggtggtcgagcacggcttctcatttcttccaagtcctcagctgccctttcctctccctcctcctctcctccaccctctagcccggggaactggccagggcagcctccccaaactccgccggcgccatcccctgctcctcctgggaaaggggtgccaaataggtctggctcgccctttcttgcggtgctgggaagttgcccaactcagcttggaggcccaaccgcaggcccggaatacagggccaaacggtctcctgccggaaggaaggtattctctgagcggccaccgcccgcttccccgggcccgccggcccgccgcaaccgctgcgcctccaaagcagccgaaccctgatacttgctcaccgcacttaatgctactagagatcaatacctaatatgataccaaataaataaaaggcgctcacagcgaccaggggacggggttattaagcagctggagctctcacggtgcatatcaatgcacctgtcattgtggtttgtagcaaaatttatgactgcgaccacggcggcagtaaacgcttcggtaaggaatgaaaagaaaaacacttcccaaggcccggcacttttcagcagtggaaagcaggctccgcgtaggaggcagcgcagcaaaagaattccctactccgcacttttcccgctcttgcaccctgcgagcagcaggattatataaagtgaccggcgcctgcttctgctagcagctctgctcggcggtcggaggcgggacgaacgcgcgcagcctcgctggggaccaaaaatctgctgcccgtggtggcctcggacgccgggaggctagtccgacttgcggaggccggctcggcacttgcttgtacgccggtggcagtggaaaagctgagggggcttgggaagggaggggacaccaggcgccaggctgtgactagcgctgcaatcgtcgtaaatcaccgacgggtagagtcagcccatccaagttgaaagagagggggaaggcgatggaggttgcggtcagtttctctcaaaatccgctagtgctcgagctggtctcggcgcctccccctgttttgcctaaaccagggtcagaagcccacggatctctttctggcggccaagacttttgctgagcatccccacgaattcactggaaccgagcaacgattctccctttcctgttggctttgctacttcgggattcgaaaccactggtttttgggtttgctcgaaaggagacttctttacgttccgcccaagttctcccgatctctaagcttgagcctcttttgctctataagaagacctggacgcgccttctaaatcactcttatttagcccagataactcaatactgtaatgcaccctgtatttaaggcactgggcttgccccattaaagcgccataaatttgaaggccaatgatcggttttcatgtaacgggtggtacttcatactgaagtgacccacttcaaagctgccctttgttctatgtcttgatgtatgaattttgagatggccaccttgagttgcagagggaaatgtactggaaattattatttaaatgatgcccactcaccacaattatgtatgtgtgtgttttcttgaattttgtctttatctcttttttttttgtaggctcttcaggtttcttttgatatc

SEQ ID NO: 12101 - DNA, 566 bp, Homo sapiens
gactgggaaatttttttattctaaatatttgttccaatagtaccagacaatttgaaatcaataaactgtggtgaggactgtggtttttgagaaatgaccaaagtgtgttgtgccacgccaccgggcttcctgactctacccatgaaggacaatttgcggtcttaatcctttatgtcaactacaaacaccagccacggttacgactgttcaaaactactctctcaactagttcagaccagggggactaaggaggtgaaatgtggcccccacggcctggaagcgaattcctaagctcggctggataaatctacaaatatacacataaatacattcagacaaggataaataatcagggaacgaaatgactcgcttcaaataataaatacagatagtttagtccgatgcaatccttacggcacaggaaggagaatataaattaaggtctctgaaactaagctagacgcgggccaggccaagactctccaagctctggtccctctgcagggcgcgcccgctgatgggtctcagacttacctttgggacaccattaccagattggagtccct

SEQ ID NO: 12102 - DNA, 18408 bp, Homo sapiens
atgtgatgcatgctcacgtgtctccgcagccggctcgggaaagaatcccccaaggtaggtggccggagacaggctctggagggtggaagtgttagatccccgaggtctgtggagcccctcagtccccgccaccgcggaaaagctcagaccctttccctgcaggggtccagatcctggcgtcctcgccccacgcccgtccctctgttgcgccagctctgccgcgcctttacccagccagagggtctccacccagtcctaggccgggatcgggtcccggagctcctccccaggttaccccacagtagcccacccttctcgctccaggcctgggaatcgccccgccccggcctcctggcccgggtgcgccctggctcacctcacaaagcctcacctcacaaagcagcccaccctttctatctcagggctccaaccccaggctggactgggagcacactccagttgggatctgaggggcctacatcgctggcctgagcatgtgggcatcaggcttctattctggctctgccagctacccactgtgaccttagtctaacctctccctcctgggcctgttttcctatctgtcctgaagctccatttcatgagtaagcgtgagagccgctcagtttcctccagctctgctgaagccagcacagaagtagcccaaactcttccctctgctgacagcaaattttaggcaaagtcttgagaaagaagaaattgggtccagaaagggaagtgaggagaatcagatcccagacctttggggagaaggagcaaccgcctctggcacagcccatcagggagaaagagcaggtaaggtgcaacaatgagctgagtaatttgccagtgagcagtgggggtgccgagaggtcttaaccaaggcagagaatctgcaagaggtgggacccccagcttctgagttccacgaggaccccagcctgcactctcatgtgggtggcaggagaggctggaggatggtgcaggactcgggcaggggtgcccaagggaaacattttggttggagagtcaggaagccgcaccaagccttgtgaccttggacgaatcactctgtagacctctgtctctgtgacgtgagcagcggggaggagatggtcacagctctggcagtggtcactttgcagggttctttctctagctacactggaagcctgggagtcccaagactctgccttcgctgctcactgctttgattttgctgagttgctggttgggtgacaggatgtgtaagaggatgtgtaagccctgtgacatctgacagatctttctgggtttcgagccagcagaggaatgtttcctctggtgccatgtcccttggttccatgcttgataacagatggctgagagcacatgaactttcaccctttccctctcatgagtggatggtccccagctttgtttgtccatcatcaggaggagcaatgggaagtagtccaaggggtcttgttagtcattttaaacccccagtgggctgaaggcatcagagagggtggcccaatggttagggcagtcattatggctgaatatgctcagttccctttttttccctctgggctataaagactaaaccaggctgggggctgtggctcacgcctgtaatcccagcactttgggaggccgaggcagcaggattgcttgagcccaggagttcaagaccagcctgggcaacatagtgagacctcctcatctctacagaaaatttaaacatgacaggcgtggggggcttgtcacgtgggagaagtcacatgggagaagagttgagaattggcctgaattttgaaaggccaattttgttccccacaggaacaaaaaatttaaaaagttggccaggcgtggtggctcacgcctgtaatcctagcactttgggaggccaagggggatcacaaggtcaggagttcaagaccagcctggccaacatggcaaaaccccatctctactaaaaatacaaaaattagccaggcatggtggcgggcacctgtaatcccagctactcaggaggctgaggcaggaaagtctcttgaacccgggaggcagaggttgcagtgagctgagattgtgccattgcactccagcctgggtgacaaagcaagactccgtctcaaaaaaaaaaaaaattttaaaagttagctggctgtggtggcacaaacctgtagtcccaggtactcgggaagttgaggtgggaggattgcttgagcctggtagattgaggctgcagtgagccctgattgcgcactggcactccagcctgggcaacagagtgataccctgtctctaaataaataaagactaaaccagggagggagtagagattaaaatggagttttgtatgagtaccgtgaaatcgggactcaggaatgaggagactctaggagaaggagtctttggcagatttcgccagcctgggtggtaaccagctaatagcagcctctggggaagactgccctggctcctccctgcccccttagttcctgcccttgaaatctggccttcttcctgctctttctcccattagctatcccagggcctctgtgcccattgttacctggccaatagcaccaggctgtggtttgagttttgtttgtttgtttgttttgagatagagtctcactctgtcgcccagactggagtgcagtggcgtgatctgggctcactgcaaactctgtctcctaatttcgggcgattctcctgcctcagcctcctgcacagctgggattacaggggtgcaccaccacacctggctaatttttgtatttttagtagagatggggtttcaccatgttggccaggctggtctcaaactcctgaccccaggtgatctgcccacctcgacctctcaaagtgctggaattacagatgtgagccaccacacccggcccaggctctggttttgatcagtgttctgctccctgcttgcttagggctggagagtctcaggcatggtggtggtgggcaacatgggaaggggcatctgcagaaataacagcagcagtgaccatttattgagtcttaaacccttactgatattaacacacgacccacaggaacatatgatgtaaaggcctaaaggggcgaagtgacttgcccagggtcacacagataggcagcggaggagtcagcattctgacggcagaacctactcggagacccagatcacagccctgcccagggctgctcttgatctgggggtggacttgatgctttaggaccatcatttctctgcgggtctcaggctatgagctgaaccttgagaacactgaagatcctttttcagggctgggctcctcagagcctctcgagattcttggaagaaaaaaaactgcatctcaattgtgtttatccagagagcaaagagaatcagtcaggtgataagcctgttatctgagttctgccatacccaaggtaccatcttggacccaggagtggggcagatacaaacagatggatgccctatggtcagacaggcctgggtttgaatcccagctccaccactgaccgccatatgactgaggggagagtggttatcccctctgggattcagcttcctctttggtaaaatggtgactgtcatgtctaccttttagggctgcattgaggattgaatgagaaagcattccatagctgcagcaatagtggtttatagtgacaaacagcactgcatgtttggcactgatcattgtaatctagcccaggaaagcaagcctagtggccagtgagatgctagcacatgagagagtactgagaagaaaccagctagagtggttctgggcccctacatggctccaagaagagctcagtgagtgacccaggaaatggggaagaaataggacctaaaagggtggcggcaaaggagttgggagcattagaagcatgggatgaatcactgttttcctgaagacgcaaacatgacaggcatgggggcttgtcacatgagagaagagtcgagaattggcctgaatttcgaagggcctcgaaagccacagaattcagactccaggccaccgggaggcgtgctggactgtaatatgttgaatctcagttcttggtaaggggtccttttgggaccctgtggggtggaaacaggctgggaagccagacagatctggatccaaatcctgctatgcaacttgctaatatatgaccctgggtcagtgatgggatctctccgaaccttttgaccacaagaccatcctaaggattgaatgagataaagtatatccatgacacacctgcccgatgcggggcctctatcgagtgctgatgtgttagtacccattttatgttgacatctaactggtccattgagtctgtatgcctgaagcaagcatgatttgcacctgatctgtttctgtgtctgtctccccatactctggcacccagtgcactgtctgcacagaggcatacctgggtttggaccctacccatgtgatcttgggaaagttattacacctttttgtcccctagttcccccatcttaggataacagtagtgcctgcctttgtcccatctaggttgagaagagtcctaagctaacagccccaaacaggtgggtgttgctcagctccctgaggcatgtggttgtaaggcagaacccacagaccttgcaggaagaaggctctcggggccatggcccaggtcagcatcaacaatgactacagcgagtgggacttgagtacggatgccggggagcgggctcggctgctgcagagtccctgtgtggacacagcccccaagagtgagtgggaagcctctcctgggggtctggacagaggcaccacttccacacttggggccatcttcatcgtcgtcaacgcgtgcctgggtgcagggttactcaacttcccagcagccttcagcactgcggggggcgtggcagcaggcatcgcactgcagatggtgagtgcactggccgggagggcagaggtgcagttcagttgggcgctttgcctcaaaagggaggcttcgggtcagggatggccagtaagtgatacacgcactgctctcccctccctcacacatggcagacatgactaatctattctagtattctttcctgtgacccaaatgaggcttcagaagccttccaacaatcagagaaatttgaacatcaattacatctctaattttttaggtgtaacattgattttgtggtatgtttaaaaagagggcccttatcttttagaactacatactgaaatatttattgatgaaatgatatgatagcttatattggcttcacaataaatgcagagtgggagggaaggggaatgatgaaacaagttggccatgcattgatcatttttgaagctgagtgatggatacatgccagttctttttactattctctttacttttttctttgagatggagtcttgctttgtcacccaggctggagtgcagtggcccgatctcggcttactgcagcctctgcctcccagtttcaagtgattctcctgcctcagcctcccaagtcgctggcattacaggcacccaccaccatgcccagctaatttttgtatttttagtagagacggggttttaccatgttggccaggctggtctcaaactcctgacttcaagtgatcctcctgcctcagcctcccaaagtgctgggattacaggcatgagccatcgcatccagcctattctctttacttttgtatgttggcaatttttcaaaaaactttttgtttttaaagaaaatctcaactcggcatcctctagcagtctcttaaaattgcctttgtgagatttgccaagcttgctttgggcactggcccagtaaatgctaggcgagcccagggtgccctctgctgccaggcctttgccacaagctcttgttctgcctctgcctgcagggtatgctggttttcatcatcagtggccttgtcatcctggcctactgctcccaggccagcaatgagaggacctaccaggaggtggtatgggctgtgtgtggcaagctgacaggtgtgctatgtgaggtggccatcgctgtctacacctttggcacctgcattgccttcctaatcatcattggcgaccagcaggacaagagtgagcttctccctcagtccctaccccatctcttcttatcagccccagggatcctggggtggagggaaaaggcactgaacacctctccaggacttacctgggcccagcattcatctgggaatcctccctccaggcagagggaggtcctggggcccagcagagcaggagggccacaccccatggtggcctggcttgacattccctccttcctccctgtgcagttatagctgtgatggcgaaagagccggagggggccagcggcccttggtacacagaccgcaagttcaccatcagcctcactgccttcctcttcatcctgcccctctccatccccagggagattggtttccagaaatatgccaggtttggaggccccagcctgggtcagacagaagctatgatcctgggcagctgtagacccaagggctcctggggaaccctgctcctccatgccacctcaccttggggagcaagagtaggcaaggcagggcagaccggggcttgcagggtttcagataagaccatccttttctgtctccatcatagaaaaaggatgcatccatgagagattcagttctaaatgtccttttgcatccatgagtagttcagttctaagtgcccttgtcaaagaaggaacaggtggtatctgggcggtgaaggcagcctcctggcattccctgggaggaatttgggtctttgagactgtcagcctaccagcatcttacctgcagcttggcatgaaggaaggagactggtttcctgtctcggtgtctgaaaggctgtgggattctaggcttccccgtctgtaagtgcaggggccatgctccgctctctccaaggctcccataaatgttgacacaaaagtgtctgtactctcaaccctcttacctctggcatctcttagttctcaaaggccaggctcagaggatggtctcccacagcccctgcccgggctgggctgctctgattcaagtcccaggtgtgctttggagctctgctctctgcatcgtctctgagccatggagctgaaccagcacttcctgatggccaggaatgctgatcaggtcccctgttggctgtccagctccttcctagctgtggcaggtttctctgaaactacttctcaggcgtttcctgagtctgcttggcatagtctccggttcattcagtggacacttgtggtcgctagagctgaaggtggatgtccctaggggtggaatcagataagaggcagctggggatgaggacacttagtctctccttcccggcagcttcctgagcgtcgtgggtacctggtacgtcacagccatcgttatcatcaagtacatctggccagataaagagatgaccccagggaacatcctgaccaggtgagggtgagggccctaggagacatggggaagaagccaccacttgggccccagcaggtgctgggtcaggaaccagaaggccacacaggtgctcttctcaaggctcatgagctcatcagggctgacttggtcattgtaggaaggaggaaagagcccctgctctgatgttactggaaggaagagcaagaatcagagacaggaggcactttgccacctacatccaacagatgagccagtgtgaggctaggccttgggttgtggaggaacctgagggtggaatcccagggtcgaattgcctgtgtttccagcatctgcttatctgtaatttctgtatctttgagggtgaatttattattaaaaaaaaagggggggggccaggcacaatggctcacgcctgtaatcccagcacattgggaggccgaggcgggcggatcatgaggtcaggagattgagaccatcctggctaacacggtgaaaccccgtctctacttaaaaaatacaaaaaaattagccgggtgtggtggcaggcgcctgtagtagcagctactcgggaggctgaggcaggagaatggcgtgaacctgggaggcagaagttgcagtgagccgagatcgcgccactgcactccagcctgggtgacagagcaagactccatctcaaaaaaatacaaaacaaaacaaaacaaaaaaaacaatttccttcttttgaaaggaacaaaccagtaaagcaaaagccccagtccaggagccaggaattctggattttggccccaggggggcttttctgaacctccaggccccatcccagagggccctgggacataaggatgcctcttctccctgttcccagacttctgtgggttgaagctatggaatcccagttgctggagaccatggtgggctgaccgaagagtgagggcgtggggtgggttgtggctctgaggggttcccaggtggcagcaccatgtgtgtttgttcacaggccggcttcctggatggctgtgttcaatgccatgcccaccatctgcttcggatttcaggtgccagtgccagttgcaaggtccctgctgtccccttagatcaccccaccctgggatggaacccagcaaggaggaggaacccaggcagaatggaggaaatcctggggggaaggatggaacaggggcctcaggacttgccccttgttcctggggtctttgttcccaaggtaccttcctctggaaactggggttgaggtcatttccccaccatgacggtgcccttcacctggacagtgccacgtcagcagtgtgcccgtcttcaacagcatgcagcagcctgaagtgaagacctggggtggagtggtgacagctgccatggtcatagccctcgctgtctacatggggacaggtgagtgctccccccccccaagacctgggactagagtgctctcacttccacaggagtccctaggtcctggggcctagctttcctggggacagccctgcattcccagcatgacttgtataggcattggcttgaacttggcctgcctggagcctcctcctgccaagatgagagtggtgtattcatccattcattcaccagttctaacttggtgcctaggaagtgccaggaacggttctcagcatgggggatgccatggagagagacagaactggtcttgccctcatggagttgacattcttgttggagagacagtcatgcaggagtaactggggaatcagtaaggaattccagatggtggcaagcatcctgatgacagtgaaatagggaaggtgtgttttgttttattctattttattttgttttgagaaagggtctcagaaactgtcgcccaggctggagtgcagtggcatgatgatagctcactgcaacctcaacctgctgaggtcgagtgatcctcctgcctcagcctccagagtagctgggactacagccatgtgccattgtgcccagctaatttttttttttttttttttctagcagagacaaggtctcactatgttgcctagcctggtcttgaattcctgggctcaagcaattctcctgcctcggcctcccaaagtgctggggttacaggcatgagccaccaacccagcctaaaatggggaaggtatgaatgggactggatgggtggctttgggagtggttcacagaaggttcttctcagagaaggcccaaatgatgagaaagagccagaagaggaggagctggggaagaagggttccaggcagaggaaccacaaaacaccaaatcactgaggcagggccaggaagaaagtctatgtggctggagtggtgtgtgatgggggcaggtgaaggcagtgaggccagacaggcactggcagccagatcctgttgggcctcgagggctgctgggagtcatcgaggaagtgttttaagcaggggggtggttcggggaaaggtggctctggctgccgtgtggagagtggttggggtgagggagcaagtctaggagaccctggaagaaggatcccctgagttctttccacggatagaccgtaggagctgcctgggccaatactgttctagcctctgaatacacagccaggaacaagagaggcaaacagccaaatccctattctcctggggctcatgtcctggctggggagacagaaaataagcctgtaaaaattaattactattattattgttattatttttatttgtattattgtttacttaaagaccagtgtgatagtacagttaaaaaaaaattagaaagcgatgaggccagtcacagtggctcacacctataatctcagctatgggaggccaaggtgggaggttctctggagcccaggagttcaagacaggctgggcaacatggtgaaactccatctctacaaaaaatttaaaaattagccaggttatggtaacatgcacctgtggacccagctacttgggaggctgaggtgggaggatcgcttgagcctatgagatcaaggctgtagagacccatgatcatgccattacactccaaactgggcaacagagtgagaccctgtctctaaaaaagagagaaatgagtgttaggggacaggcccagtggatcatgcctgtaatcccaacactttgaaaagctgagatgggagaaccgcttgaggccaggagttcaagaccagcctcggcaacatagtgagactcatctctacaaaaattaaagaattagctgggcgtccgccaggcatggtggctcacgcctgtaatcccaggactttgagaggccaaggtgggtgaatcacttgaggccaggagttcgagaccagcctggccaacatggcaaaaccctgtctctatcaaaattacaaaaattagccgggcgtggtggtggtgcctgtaatcccagctactcgggaggctaaggcatgagaatcacttgaacctgggaggccgaggttgcagtgagccaagatcgcgccgctgcactccagcctgggggagaaagtgagactctgtcttcaaaaaaaaaaaattagccaggcatggtggcatgtgcctgtagtcccagtgacttgggaggccaagtcaggaggaacttgagtctaagaattcaagactacagtggaactatgattgtaccacttcactccagcctgagtgacagagcaagatcctgtctttaaaaaaaaaaaaaaaaacggccaggcactggggctcacgcctgtgatcccagcactttgggaggcccaggcaggcagatcacatgaggtcaggagttcgagaccagcccaaccaacatggcgaaaccccatcttactaaaaataaaaaaattagggctgggcgtggtggctcacgcctgtaatcccagcacttcccgaggcaggcggatgacgaggtcaggagttcgagaccagcctggccaacatagtgaaacctcatttctactaaaaatacaaaaattagtcaggcttggtggcgggcgcctgtaatcccagctactcgggagtctgtggcaggagaatcacttaaaaccagaaggcagaggtggcagtaagctgaaatcgcaccactgcattccagcctgggtgaaagagcaaaactccatctcaaaaaaaaaaaaaaattagccaggtgtggcggcaggtgactgtaatcccagctgcttaggaggctgaggcatgagaacccaggagaccaagatcatgccattgtactccagcctgggcatgacagagcgcgactccatctcaaaaaaaaaaaaaaaaaaaaaaaaaaaaaattagccgggcatggtgtaatcccagctactcaggaggctgaggcaggagaatcacttgaacctgggaagtggaggctgcactgagccgagatcgtgccaccgcgtgccagcctgggcaacaagagtgaaactccatctcaaaaaaataaaaaagaagaaggctgggtgtagtggctcacactctgggagggtgaggtaggaggattacttgagcccaggagttcaagaccagactgggaaacgtagcaagaccccatctctacaagaaaattagctgggtgtggtggcatctgcctgtagtcctagctacctgggaggctcaggtgggagaatcgcttgagccgaggaggtcaaggctgcagtgagccatgatcacactactgcgctctagtctgggtaacagggcaagactctgtctcaaaaaagaaaagaaaaataagacagcgtgatgtgagagagtgcctggggtgggggtcattgtagatggactggcaggaagcattctctgaggaaggacatctaaactgagacccaaatgataaggagatggcatctgaaggtctgccagacagaacagtcagtgccaaggcactgaggtgggaatgtgctgggcaagttcaggctcagaaagctgggggctggagggcttccagcgatgggggatctgagaagtcagggagggaggcatctgatcggagccccatctcccactctgagcctccgtctaagtgtccagagctgctgctgcagcctccaggctgatgttgctcctaggaggagtggacagtccaccccactaccctcccagggttgccctgacccagttgtccctgcccacaggcatctgtggcttcctgacctttggagctgctgtggatcctgacgtgctcctgtcctatccctcggaggacatggccgtggccgttgcccgagccttcatcatcctgagcgtgctcacctcctaccctatcctgcacttctgtgggcggtgagcccccttccactccccagggcccctcctagcccctgtgagcgcttccaacatggtcctttggccttgtgtggaccccatcctgtagaaggagaaactgaagcctgtagaaaagagtcggtgcctaggatgggtccctacatatcccaggccaggtgtcagaagcgccctttgtcctggggtcaccagaacattccgtgagtcctgtaagaatctctatccatggcatggcacggtggctcacgtctctaaacccagcactttgggaggctgaggcagaaggatcgcttgagcctgggagttcaagaccacctgggcaacctagtgagaccccatctctacacaaaataaaataaatagccaggtgtggtgggatgcacctgtggtcccagctactcagccacttgggaggctgaggcagaaggatggctggagcccaggagttcaaggctgcagtgagccaagattgcaccactgcactccagcctgggtgagagagccagaccctgtctcaaaaaaacaaaaaacaaaagaatctctatccagatcctttcctgagctttcacatggacaccctcccctttggatgccccagacagttccttttaaggaaaaaacaatatcagtttccatgtgatgtaaagcaaagtgctaagctctcgacattcaccgtctctagtccctgtggtaaacagagtgctggtggcccattttacagaagaggaaactgagggtcaggaatggggctttccccgcagtctacccagttaggggtctggctcctgtgagctagaggtggggagctgctagcagcaggggcacctctaagcccttctccatgtgggcagggcggtggtggaaggcctgtggctgcgctaccagggggtgccagtggaggaggacgtggggcgggagcggcggcggcgagtgctgcagacgctggtctggttcctgctcaccctgctgctggcgctcttcatccctgacatcggcaaggtgatctcagtcattggaggcctggccgcctgcttcatcttcgtcttcccaggtgcggacccctggcgccccatctcacagccccacagcacagactcccagggcctgcctagcctcagctccctacttgctcaaaacatgcaggagagagtaaccaccagcactaattgatcacctgtctcgcctctgtactagcccctatccaagcattatctcctggaaagaaggtatagttgtgatctccagtttactgatggcacgtggggctcagaaagggtcacagacttgcctagagcttaacaaactcaactagtaaccttttccatcccacgctgtctgggtccagagtctattcttttaaccattcattcaggtgtctgctgctccttgactatgagggatctatctggctggttcagcccattacagcccagagggcagtggggtctggggtggcaccctgacacagacatcagggaacctgggttccagacacagatctaccgccagatccctggagaactgtcctgtctgcccagccatgagttccacccttttccagcttgtctctatccaggaagccaccctgaaagccccagctgctttgcttggagcaggggagccagatctgctgggaagtgtactaggaagacccctggggttgggccaccactgagtcaccattgagtgctgtccctttagctgagtctagcatgctgcccaaggggtcttgtcagatgccagcctgtcatgggagagcagatgccagatgaccccagcaggatgtggtgtgggggcagagatggaatttctagaagagtaaacatgggcctttctccatccagcactgcttcttgggaaaggaggtggctaggagggagggagccctctcccctcacaaatgctcagggccacttcttctctttcagggctgtgcctcattcaagccaaactctctgagatggaagaggtcaaaccagccaggtaaagcaggacccagcccttgatcctctcagggaggtgctggattggaatgtggctttgtgggggccttaaaacagataggagtcagaggcttgtgtacttagaaatcatgggtttttgttttgtttttttttttttgagccggagtctcgctgtgtcgcccagcctggagtgcagtggcacgatctcagctcactgcaagctccgcctcctgggttcacaccattctcgtgcctcagcctcccgagtagctaggactacagatgcctgccaccacacccagctaatttttgtatttttagtagagacgaggtttcaccatgttggccaggccggtctcgaactcctgaccttaggtgatcctccttcctcggcctcccaaagtgctggcattacaggcgtgagccaccacacccagccaggttgttgttgttttttttttaatacttttaaaaattcggtagtgtgctagttgttaacaatttaaacattaataaagggcttaatacaaaaagatggaagtccctcttcccccacaacccactcgcccccacatcctttctgagatagctccatgttaccagtatggtctgtgtcctcaaccacttctgtacatgtgtgcgtgtctgtgtacacatagctatggagatgtatacatagatgcagggctcttgttttgttttatgaaaagtggtttcagccaggtgcattggctcatgcctgtaatcccagcactttgggaggccaacatgggcagatcacccgaggtcaggagttcgagaccagcctgaccaacatggtgaaaccccatctctactaaaaatacaaaattagctgggcatggtggcacctgcctgtaatcccagctacttgggagactgaggcaggagaattgcttgaacccaggaggcggaggttgcagtgagccgagatcacaccattacactccagcctgggcaacaagagggaaactctgtctcaaaaaaaaaaaaaaaaaaaaaaaaaaaaagccatacaaacatgtctaaaaaagaaaaaaaattggccaggcacagtgactcacgcctgtaatcccagcactttgggaggccaagacaggcagatcacctgaggtcaggagttcgagaccagcctggccaacatggcaaaaccccgtctttactaaaaatacaaaaattacctggttgtggtggcgcatgcctgtagtcctagctcgggaggctgaggtaggagaattgcttgaaccccggaggcggaggttgcagtaagtggagatcgcaccactgcactccagcctgggtgatagcaaaactctgtctcaaaaaaagaaaaagaagaagaagaaaaaaaatcaccctttatttcttttttttttgtctttttttttttttttttttttgagatggagtttcactcgttgcccaggctggagtgcaatggcgcgatctctgctcactacaacaacctccacctcccgggttcaagcgattctcctgcctcagcctcctgagtagcttggattacaggcgcccaccaccacacccagctaattttttgggtttgttgttgttgttttgagatggaatctcgctctgtcacccaggctggagtgcagtggcatgatctcggctcactgcaacctccagggtatctgggattacaggtgcgcagcaccatgcctggctaatttttgtatttttggtagagacggggtttcaccatgttggctaggctgatctcgaactcctgacctcaggtgatccgcccaccttggcctcccaaagttctgggattacaggcgtgagccaccatacccagccattttttgtatttttttagtagagacggggtttcaccacgctggccaggctggtctcaaactcctgacctcaggtgatccacctgccttggcctcccaaagtgctgggattatagacatgagccaccacacccagcctaatttttctatttttagtagagatggggtttcgccatcttgcccaggctggtcttgaactcctgacctcaggtgatccatctgcctcggcctcccaaagtgctggaattacagacatgagccactgcacccagcctaatttttctgtttttagtagagatggggttttgccatcttgcccaggctggtctcgaactcctgacctcaggttgcccgccttggcctcccaaagtgctgggattacaggtgtgagccaccacacccggccggaaatcaccctttatttcaattccgttttatccctgttgctgttaattggtacatacatttgcagatgtctgctttttgtttcctttttttaatgaaatagaccacattccatgtgacgtgcttttttctgaacatctttccatcaggatgcctacattcgaatcgtggcatgatgtgaacaatcagttactcccattagatcttggtcttcttacctatggactagggacaatacacctggccccacactacctttgtattgaagtctttgggaagtaggaagtgctctaccaacaggagaagtgcgataattacagtaattaacagttatatatattgaagtctgcagtcatgggatgggatgactgatcagacctctctcaccctctgttctacagctggtgggtgctggtcagctacggagtcctcttggtcaccctgggagccttcatcttcggccagaccacagccaacgccatctttgtggatctcttggcataaccactgcctcccagggaacacaaggcctttgccattggtcgcaggaacccatctcttagagctatggggccattcttagtccacgatcattccaactggtgggatgacatccggacatcctcttccagggactggggcaaactcaggccccacacctctggacagctcaaatccagtccccttcctgctccccagtcctggcagtgccgtggatggcggcaggaagtctcacatcatagaggacccctcctcctctcccagttctcaacttctccatgcctggaatccacgggtgaagagagtcggtagatctcataagaaagaatccagtctgacttccctctggagaatgactatggacagaaggccaccatcctccacagagcaccctgtcctgagtaggggttgtgctcattaccccaggccagtggtagcttcctcaggagcctggccacttccaacggtagcactgaagtcatgcaaatgcatagtcaggtagattcagaccttgtccacaccttcctgggcaacccccaccatgaacctgtcagcctctttcccatagctaatagacatttcccaggccttgaggggccccaccctgtctctttcatcaaacctgatggtccaggctgggcatccctctcctcctccatccccagacatcaccaggtctaatgtttacaaacggtgccagcccggctctgaagccaagggccgtcccgtgccacggtgctgtgagtattcctccgttagctttccccataaggttgggagtatctgcttttgtgtctgagatgggcccctcttttcagaggccgcagggtgggtgatggagaaggctgagaacctttcagaccctctgtgtgggctgggctggtcagaatcagggtgtacctccccgacaccttctttttcagtgatgttttctcttcttcctgcctttcctctgcctcctcccctgccagccctagcgtgactacccagagacaaaaaaaaaaaaaaaaaaaaaaggcagggc

SEQ ID NO: 12103 - DNA, 18408 bp, Homo sapiens
atgtgatgcatgctcacgtgtctccgcagccggctcgggaaagaatcccccaaggtaggtggccggagacaggctctggagggtggaagtgttagatccccgaggtctgtggagcccctcagtccccgccaccgcggaaaagctcagaccctttccctgcaggggtccagatcctggcgtcctcgccccacgcccgtccctctgttgcgccagctctgccgcgcctttacccagccagagggtctccacccagtcctaggccgggatcgggtcccggagctcctccccaggttaccccacagtagcccacccttctcgctccaggcctgggaatcgccccgccccggcctcctggcccgggtgcgccctggctcacctcacaaagcctcacctcacaaagcagcccaccctttctatctcagggctccaaccccaggctggactgggagcacactccagttgggatctgaggggcctacatcgctggcctgagcatgtgggcatcaggcttctattctggctctgccagctacccactgtgaccttagtctaacctctccctcctgggcctgttttcctatctgtcctgaagctccatttcatgagtaagcgtgagagccgctcagtttcctccagctctgctgaagccagcacagaagtagcccaaactcttccctctgctgacagcaaattttaggcaaagtcttgagaaagaagaaattgggtccagaaagggaagtgaggagaatcagatcccagacctttggggagaaggagcaaccgcctctggcacagcccatcagggagaaagagcaggtaaggtgcaacaatgagctgagtaatttgccagtgagcagtgggggtgccgagaggtcttaaccaaggcagagaatctgcaagaggtgggacccccagcttctgagttccacgaggaccccagcctgcactctcatgtgggtggcaggagaggctggaggatggtgcaggactcgggcaggggtgcccaagggaaacattttggttggagagtcaggaagccgcaccaagccttgtgaccttggacgaatcactctgtagacctctgtctctgtgacgtgagcagcggggaggagatggtcacagctctggcagtggtcactttgcagggttctttctctagctacactggaagcctgggagtcccaagactctgccttcgctgctcactgctttgattttgctgagttgctggttgggtgacaggatgtgtaagaggatgtgtaagccctgtgacatctgacagatctttctgggtttcgagccagcagaggaatgtttcctctggtgccatgtcccttggttccatgcttgataacagatggctgagagcacatgaactttcaccctttccctctcatgagtggatggtccccagctttgtttgtccatcatcaggaggagcaatgggaagtagtccaaggggtcttgttagtcattttaaacccccagtgggctgaaggcatcagagagggtggcccaatggttagggcagtcattatggctgaatatgctcagttccctttttttccctctgggctataaagactaaaccaggctgggggctgtggctcacgcctgtaatcccagcactttgggaggccgaggcagcaggattgcttgagcccaggagttcaagaccagcctgggcaacatagtgagacctcctcatctctacagaaaatttaaacatgacaggcgtggggggcttgtcacgtgggagaagtcacatgggagaagagttgagaattggcctgaattttgaaaggccaattttgttccccacaggaacaaaaaatttaaaaagttggccaggcgtggtggctcacgcctgtaatcctagcactttgggaggccaagggggatcacaaggtcaggagttcaagaccagcctggccaacatggcaaaaccccatctctactaaaaatacaaaaattagccaggcatggtggcgggcacctgtaatcccagctactcaggaggctgaggcaggaaagtctcttgaacccgggaggcagaggttgcagtgagctgagattgtgccattgcactccagcctgggtgacaaagcaagactccgtctcaaaaaaaaaaaaaattttaaaagttagctggctgtggtggcacacacctgtagtcccaggtactcgggaagttgaggtgggaggattgcttgagcctggtagattgaggctgcagtgagctctgattgcgccactgcactccagcctgggcaacagagtgataccctgtctctaaataaataaagactaaaccagggagggagtagagattaaaatggagttttgtatgagtaccgtgaaatcgggactcaggaatgaggagactctaggagaaggagtctttggcagatttcgccagcctgggtggtaaccagctaatagcagcctctggggaagactgccctggctcctccctgcccccttagttcctgcccttgaaatctggccttcttcctgctctttctcccattagctatcccagggcctctgtgcccattgttacctggccaatagcaccaggctgtggtttgagttttgtttgtttgtttgttttgagatagagtctcactctgtcgcccagactggagtgcagtggcgtgatctgggctcactgcaaactctgtctcctaatttcgggcgattctcctgcctcagcctcctgcacagctgggattacagggggtgcaccaccacacctggctaatttttgtatttttagtagagatggggtttcaccatgttggccaggctggtctcaaactcctgaccccaggtgatctgcccacctcgacctctcaaagtgctggaattacagatgtgagccaccacacccggcccaggctctggttttgatcagtgttctgctccctgcttgcttagggctggagagtctcaggcatggtggtggtgggcaacatgggaaggggcatctgcagaaataacagcagcagtgaccatttattgagtcttaaacccttactgatattaacacacgacccacaggaacatatgatgtaaaggcctaaaggggcgaagtgacttgcccagggtcacacagataggcagcggaggagtcagcattctgacggcagaacctactcggagacccagatcacagccctgcccagggctgctcttgatctgggggtggacttgatgctttaggaccatcatttctctgcgggtctcaggctatgagctgaaccttgagaacactgaagatcctttttcagggctgggctcctcagagcctctcgagattcttggaagaaaaaaaactgcatctcaattgtgtttatccagagagcaaagagaatcagtcaggtgataagcctgttatctgagttctgccatacccaaggtaccatcttggacccaggagtggggcagatacaaacagatggatgccctatggtcagacaggcctgggtttgaatcccagctccaccactgaccgccatatgactgaggggagagtggttatcccctctgggattcagcttcctctttggtaaaatggtgactgtcatgtctaccttttagggctgcattgaggattgaatgagaaagcattccatagctgcagcaatagtggtttatagtgacaaacagcactgcatgtttggcactgatcattgtaatctagcccaggaaagcaagcctagtggccagtgagatgctagcacatgagagagtactgagaagaaaccagctagagtggttctgggcccctacatggctccaagaagagctcagtgagtgacccaggaaatggggaagaaataggacctaaaagggtggcggcaaaggagttgggagcattagaagcatgggatgaatcactgttttcctgaagacgcaaacatgacaggcatgggggcttgtcacatgagagaagagtcgagaattggcctgaatttcgaagggcctcgaaagccacagaattcagactccaggccaccgggaggcgtgctggactgtaatatgttgaatctcagttcttggtaaggggtccttttgggaccctgtggggtggaaacaggctgggaagccagacagatctggatccaaatcctgctatgcaacttgctaatatatgaccctgggtcagtgatgggatctctccgaaccttttgaccacaagaccatcctaaggattgaatgagataaagtatatccatgacacacctgcccgatgcggggcctctatcgagtgctgatgtgttagtacccattttatgttgacatctaactggtccattgagtctgtatgcctgaagcaagcatgatttgcacctgatctgtttctgtgtctgtctccccatactctggcacccagtgcactgtctgcacagaggcatacctgggtttggaccctacccatgtgatcttgggaaagttattacacctttttgtcccctagttcccccatcttaggataacagtagtgcctgcctttgtcccatctaggttgagaagagtcctaagctaacagccccaaacaggtgggtgttgctcagctccctgaggcatgtggttgtaaggcagaacccacagaccttgcaggaagaaggctctcggggccatggcccaggtcagcatcaacaatgactacagcgagtgggacttgagcacggatgccggggagcgggctcggctgctgcagagtccctgtgtggacacagcccccaagagtgagtgggaagcctctcctgggggtctggacagaggcaccacttccacacttggggccatcttcatcgtcgtcaacgcgtgcctgggtgcagggttactcaacttcccagcagccttcagcactgcggggggcgtggcagcaggcatcgcactgcagatggtgagtgcactggccgggagggcagaggtgcagttcagttgggcgctttgcctcaaaagggaggcttcgggtcagggatggccagtaagtgatacacgcactgctctcccctccctcacacatggcagacatgactaatctattctagtattctttcctgtgacccaaatgaggcttcagaagccttccaacaatcagagaaatttgaacatcaattacatctctaattttttaggtgtaacattgattttgtggtatgtttaaaaagagggcccttatcttttagaactacatactgaaatatttattgatgaaatgatatgatagcttatattggcttcacaataaatgcagagtgggagggaaggggaatgatgaaacaagttggccatgcattgatcatttttgaagctgagtgatggatacatgccagttctttttactattctctttacttttttctttgagatggagtcttgctttgtcacccaggctggagtgcagtggcccgatctcggcttactgcagcctctgcctcccagtttcaagtgattctcctgcctcagcctcccaagtcgctggcattacaggcacccaccaccatgcccagctaatttttgtatttttagtagagacggggttttaccatgttggccaggctggtctcaaactcctgacttcaagtgatcctcctgcctcagcctcccaaagtgctgggattacaggcatgagccatcgcatccagcctattctctttacttttgtatgttggcaatttttcaaaaaactttttgtttttaaagaaaatctcaactcggcatcctctagcagtctcttaaaattgcctttgtgagatttgccaagcttgctttgggcactggcccagtaaatgctaggcgagcccagggtgccctctgctgccaggcctttgccacaagctcttgttctgcctctgcctgcagggtatgctggttttcatcatcagtggccttgtcatcctggcctactgctcccaggccagcaatgagaggacctaccaggaggtggtatgggctgtgtgtggcaagctgacaggtgtgctatgtgaggtggccatcgctgtctacacctttggcacctgcattgccttcctaatcatcattggcgaccagcaggacaagagtgagcttctccctcagtccctaccccatctcttcttatcagccccagggatcctggggtggagggaaaaggcactgaacacctctccaggacttacctgggcccagcattcatctgggaatcctccctccaggcagagggaggtcctggggcccagcagagcaggagggccacaccccatggtggcctggcttgacattccctccttcctccctgtgcagttatagctgtgatggcgaaagagccggagggggccagcggcccttggtacacagaccgcaagttcaccatcagcctcactgccttcctcttcatcctgcccctctccatccccagggagattggtttccagaaatatgccaggtttggaggccccagcctgggtcagacagaagctatgatcctgggcagctgtagacccaagggctcctggggaaccctgctcctccatgccacctcaccttggggagcaagagtaggcaaggcagggcagaccggggcttgcagggtttcagataagaccatccttttctgtctccatcatagaaaaaggatgcatccatgagagattcagttctaaatgtccttttgcatccatgagtagttcagttctaagtgcccttgtcaaagaaggaacaggtggtatctgggcggtgaaggcagcctcctggcattccctgggaggaatttgggtctttgagactgtcagcctaccagcatcttacctgcagcttggcatgaaggaaggagactggtttcctgtctcggtgtctgaaaggctgtgggattctaggcttccccgtctgtaagtgcaggggccatgctccgctctctccaaggctcccataaatgttgacacaaaagtgtctgtactctcaaccctcttacctctggcatctcttagttctcaaaggccaggctcagaggatggtctcccacagcccctgcccgggctgggctgctctgattcaagtcccaggtgtgctttggagctctgctctctgcatcgtctctgagccatggagctgaaccagcacttcctgatggccaggaatgctgatcaggtcccctgttggctgtccagctccttcctagctgtggcaggtttctctgaaactacttctcaggcgtttcctgagtctgcttggcatagtctccggttcattcagtggacacttgtggtcgctagagctgaaggtggatgtccctaggggtggaatcagataagaggcagctggggatgaggacacttagtctctccttcccggcagcttcctgagcgtcgtgggtacctggtacgtcacagccatcgttatcatcaagtacatctggccagataaagagatgaccccagggaacatcctgaccaggtgagggtgagggccctaggagacatggggaagaagccaccacttgggccccagcaggtgctgggtcaggaaccagaaggccacacaggtgctcttctcaaggctcatgagctcatcagggctgacttggtcattgtaggaaggaggaaagagcccctgctctgatgttactggaaggaagagcaagaatcagagacaggaggcactttgccacctacatccaacagatgagccagtgtgaggctaggccttgggttgtggaggaacctgagggtggaatcccagggtcgaattgcctgtgtttccagcatctgcttatctgtaatttctgtatctttgagggtgaatttattattaaaaaaaaagggggggggccaggcacaatggctcacgcctgtaatcccagcacattgggaggccgaggcgggcggatcatgaggtcaggagattgagaccatcctggctaacacggtgaaaccccgtctctacttaaaaaatacaaaaaaattagccgggtgtggtggcaggcgcctgtagtagcagctactcgggaggctgaggcaggagaatggcgtgaacctgggaggcagaagttgcagtgagccgagatcgcgccactgcactccagcctgggtgacagagcaagactccatctcaaaaaaatacaaaacaaaacaaaacaaaaaaaacaatttccttcttttgaaaggaacaaaccagtaaagcaaaagccccagtccaggagccaggaattctggattttggccccaggggggcttttctgaacctccaggccccatcccagagggccctgggacataaggatgcctcttctccctgttcccagacttctgtgggttgaagctatggaatcccagttgctggagaccatggtgggctgaccgaagagtgagggcgtggggtgggttgtggctctgaggggttcccaggtggcagcaccatgtgtgtttgttcacaggccggcttcctggatggctgtgttcaatgccatgcccaccatctgcttcggatttcaggtgccagtgccagttgcaaggtccctgctgtccccttagatcaccccaccctgggatggaacccagcaaggaggaggaacccaggcagaatggaggaaatcctggggggaaggatggaacaggggcctcaggacttgccccttgttcctggggtctttgttcccaaggtaccttcctctggaaactggggttgaggtcatttccccaccatgacggtgcccttcacctggacagtgccacgtcagcagtgtgcccgtcttcaacagcatgcagcagcctgaagtgaagacctggggtggagtggtgacagctgccatggtcatagccctcgctgtctacatggggacaggtgagtgctccccccccccaagacctgggactagagtgctctcacttccacaggagtccctaggtcctggggcctagctttcctggggacagccctgcattcccagcatgacttgtataggcattggcttgaacttggcctgcctggagcctcctcctgccaagatgagagtggtgtattcatccattcattcaccagttctaacttggtgcctaggaagtgccaggaacggttctcagcatgggggatgccatggagagagacagaactggtcttgccctcatggagttgacattcttgttggagagacagtcatgcaggagtaactggggaatcagtaaggaattccagatggtggcaagcatcctgatgacagtgaaatagggaaggtgtgttttgttttattctattttattttgttttgagaaagggtctcagaaactgtcgcccaggctggagtgcagtggcatgatgatagctcactgcaacctcaacctgctgaggtcgagtgatcctcctgcctcagcctccagagtagctgggactacagccatgtgccattgtgcccagctaatttttttttttttttttttctagcagagacaaggtctcactatgttgcctagcctggtcttgaattcctgggctcaagcaattctcctgcctcggcctcccaaagtgctggggttacaggcatgagccaccaacccagcctaaaatggggaaggtatgaatgggactggatgggtggctttgggagtggttcacagaaggttcttctcagagaaggcccaaatgatgagaaagagccagaagaggaggagctggggaagaagggttccaggcagaggaaccacaaaacaccaaatcactgaggcagggccaggaagaaagtctatgtggctggagtggtgtgtgatgggggcaggtgaaggcagtgaggccagacaggcactggcagccagatcctgttgggcctcgagggctgctgggagtcatcgaggaagtgttttaagcaggggggtggttcggggaaaggtggctctggctgccgtgtggagagtggttggggtgagggagcaagtctaggagaccctggaagaaggatcccctgagttctttccacggatagaccgtaggagctgcctgggccaatactgttctagcctctgaatacacagccaggaacaagagaggcaaacagccaaatccctattctcctggggctcatgtcctggctggggagacagaaaataagcctgtaaaaattaattactattattattgttattatttttatttgtattattgtttacttaaagaccagtgtgatagtacagttaaaaaaaaattagaaagcgatgaggccagtcacagtggctcacacctataatctcagctatgggaggccaaggtgggaggttctctggagcccaggagttcaagacaggctgggcaacatggtgaaactccatctctacaaaaaatttaaaaattagccaggttatggtaacatgcacctgtggacccagctacttgggaggctgaggtgggaggatcgcttgagcctatgagatcaaggctgtagagacccatgatcatgccattacactccaaactgggcaacagagtgagaccctgtctctaaaaaagagagaaatgagtgttaggggacaggcccagtggatcatgcctgtaatcccaacactttgaaaagctgagatgggagaaccgcttgaggccaggagttcaagaccagcctcggcaacatagtgagactcatctctacaaaaattaaagaattagctgggcgtccgccaggcatggtggctcacgcctgtaatcccaggactttgagaggccaaggtgggtgaatcacttgaggccaggagttcgagaccagcctggccaacatggcaaaaccctgtctctatcaaaattacaaaaattagccgggcgtggtggtggtgcctgtaatcccagctactcgggaggctaaggcatgagaatcacttgaacctgggaggccgaggttgcagtgagccaagatcgcgccgctgcactccagcctgggggagaaagtgagactctgtcttcaaaaaaaaaaaattagccaggcatggtggcatgtgcctgtagtcccagtgacttgggaggccaagtcaggaggaacttgagtctaagaattcaagactacagtggaactatgattgtaccacttcactccagcctgagtgacagagcaagatcctgtctttaaaaaaaaaaaaaaaaacggccaggcactggggctcacgcctgtgatcccagcactttgggaggcccaggcaggcagatcacatgaggtcaggagttcgagaccagcccaaccaacatggcgaaaccccatcttactaaaaataaaaaaattagggctgggcgtggtggctcacgcctgtaatcccagcacttcccgaggcaggcggatgacgaggtcaggagttcgagaccagcctggccaacatagtgaaacctcatttctactaaaaatacaaaaattagtcaggcttggtggcgggcgcctgtaatcccagctactcgggagtctgtggcaggagaatcacttaaaaccagaaggcagaggtggcagtaagctgaaatcgcaccactgcattccagcctgggtgaaagagcaaaactccatctcaaaaaaaaaaaaaaattagccaggtgtggcggcaggtgactgtaatcccagctgcttaggaggctgaggcatgagaacccaggagaccaagatcatgccattgtactccagcctgggcatgacagagcgcgactccatctcaaaaaaaaaaaaaaaaaaaaaaaaaaaaattagccgggcatggtgtaatcccagctactcaggaggctgaggcaggagaatcacttgaacctgggaagtggaggctgcactgagccgagatcgtgccaccgcgtgccagcctgggcaacaagagtgaaactccatctcaaaaaaataaaaaagaagaaggctgggtgtagtggctcacactctgggagggtgaggtaggaggattacttgagcccaggagttcaagaccagactgggaaacgtagcaagaccccatctctacaagaaaattagctgggtgtggtggcatctgcctgtagtcctagctacctgggaggctcaggtgggagaatcgcttgagccgaggaggtcaaggctgcagtgagccatgatcacactactgcgctctagtctgggtaacagggcaagactctgtctcaaaaaagaaaagaaaaataagacagcgtgatgtgagagagtgcctggggtgggggtcattgtagatggactggcaggaagcattctctgaggaaggacatctaaactgagacccaaatgataaggagatggcatctgaaggtctgccagacagaacagtcagtgccaaggcactgaggtgggaatgtgctgggcaagttcaggctcagaaagctgggggctggagggcttccagcgatgggggatctgagaagtcagggagggaggcatctgatcggagccccatctcccactctgagcctccgtctaagtgtccagagctgctgctgcagcctccaggctgatgttgctcctaggaggagtggacagtccaccccactaccctcccagggttgccctgacccagttgtccctgcccacaggcatctgtggcttcctgacctttggagctgctgtggatcctgacgtgctcctgtcctatccctcggaggacatggccgtggccgttgcccgagccttcatcatcctgagcgtgctcacctcctaccctatcctgcacttctgtgggcggtgagcccccttccactccccagggcccctcctagcccctgtgagcgcttccaacatggtcctttggccttgtgtggaccccatcctgtagaaggagaaactgaagcctgtagaaaagagtcggtgctaggatgggtccctacatatcccaggccaggtgtcagaagcgccctttgtcctggggtcaccagaacattccgtgagtcctgtaagaatctctatccatggcatggcacggtggctcacgtctctaaacccagcactttgggaggctgaggcagaaggatcgcttgagcctgggagttcaagaccacctgggcaacctagtgagaccccatctctacacaaaataaaataaatagccaggtgtggtgggatgcacctgtggtcccagctactcagccacttgggaggctgaggcagaaggatggctggagcccaggagttcaaggctgcagtgagccaagattgcaccactgcactccagcctgggtgagagagccagaccctgtctcaaaaaaacaaaaaacaaaagaatctctatccagatcctttcctgagctttcacatggacaccctcccctttggatgccccagacagttccttttaaggaaaaaacaatatcagtttccatgtgatgtaaagcaaagtgctaagctctcgacattcaccgtctctagtccctgtggtaaacagagtgctggtggcccattttacagaagaggaaactgagggtcaggaatggggctttccccgcagtctacccagttaggggtctggctcctgtgagctagaggtggggagctgctagcagcaggggcacctctaagcccttctccatgtgggcagggcggtggtggaaggcctgtggctgcgctaccagggggtgccagtggaggaggacgtggggcgggagcggcggcggcgagtgctgcagacgctggtctggttcctgctcaccctgctgctggcgctcttcatccctgacatcggcaaggtgatctcagtcattggaggcctggccgcctgcttcatcttcgtcttcccaggtgcggacccctggcgccccatctcacagccccacagcacagactcccagggcctgcctagcctcagctccctacttgctcaaaacatgcaggagagagtaaccaccagcactaattgatcacctgtctcgcctctgtactagcccctatccaagcattatctcctggaaagaaggtatagttgtgatctccagtttactgatggcacgtggggctcagaaagggtcacagacttgcctagagcttaacaaactcaactagtaaccttttccatcccacgctgtctgggtccagagtctattcttttaaccattcattcaggtgtctgctgctccttgactatgagggatctatctggctggttcagcccattacagcccagagggcagtggggtctggggtggcaccctgacacagacatcagggaacctgggttccagacacagatctaccgccagatccctggagaactgtcctgtctgcccagccatgagttccacccttttccagcttgtctctatccaggaagccaccctgaaagccccagctgctttgcttggagcaggggagccagatctgctgggaagtgtactaggaagacccctggggttgggccaccactgagtcaccattgagtgctgtccctttagctgagtctagcatgctgcccaaggggtcttgtcagatgccagcctgtcatgggagagcagatgccagatgaccccagcaggatgtggtgtgggggcagagatggaatttctagaagagtaaacatgggcctttctccatccagcactgcttcttgggaaaggaggtggctaggagggagggagccctctcccctcacaaatgctcagggccacttcttctctttcagggctgtgcctcattcaagccaaactctctgagatggaagaggtcaaaccagccaggtaaagcaggacccagcccttgatcctctcagggaggtgctggattggaatgtggctttgtgggggccttaaaacagataggagtcagaggcttgtgtacttagaaatcatgggtttttgttttgtttttttttttttgagccggagtctcgctgtgtcgcccagcctggagtgcagtggcacgatctcagctcactgcaagctccgcctcctgggttcacaccattctcgtgcctcagcctcccgagtagctaggactacagatgcctgccaccacacccagctaatttttgtatttttagtagagacgaggtttcaccatgttggccaggccggtctcgaactcctgaccttaggtgatcctccttcctcggcctcccaaagtgctggcattacaggcgtgagccaccacacccagccaggttgttgttgttttttttttaatacttttaaaaattcggtagtgtgctagttgttaacaatttaaacattaataaagggcttaatacaaaaagatggaagtccctcttcccccacaacccactcgcccccacatcctttctgagatagctccatgttaccagtatggtctgtgtcctcaaccacttctgtacatgtgtgcgtgtcatgtgtacacatagctatggagatgtatacatagatgcagggctcttgttttgttttatgaaaagtggtttcagccaggtgcattggctcatgcctgtaatcccagcactttgggaggccaacatgggcagatcacccgaggtcaggagttcgagaccagcctgaccaacatggtgaaaccccatctctactaaaaatacaaaattagctgggcatggtggcacctgcctgtaatcccagctacttgggagactgaggcaggagaattgcttgaacccaggaggcggaggttgcagtgagccgagatcacaccattacactccagcctgggcaacaagagggaaactctgtctcaaaaaaaaaaaaaaaaaaaaaaaaaaaaagccatacaaacatgtctaaaaaagaaaaaaaattggccaggcacagtgactcacgcctgtaatcccagcactttgggaggccaagacaggcagatcacctgaggtcaggagttcgagaccagcctggccaacatggcaaaaccccgtctttactaaaaatacaaaaattacctggttgtggtggcgcatgcctgtagtcctagctcgggaggctgaggtaggagaattgcttgaaccccggaggcggaggttgcagtaagtggagatcgcaccactgcactccagcctgggtgatagcaaaactctgtctcaaaaaaagaaaaagaagaagaagaaaaaaaatcaccctttatttcttttttttttgtctttttttttttttttttttttgagatggagtttcactcgttgcccaggctggagtgcaatggcgcgatctctgctcactacaacaacctccacctcccgggttcaagcgattctcctgcctcagcctcctgagtagcttggattacaggcgcccaccaccacacccagctaattttttgggtttgttgttgttgttttgagatggaatctcgctctgtcacccaggctggagtgcagtggcatgatctcggctcactgcaacctccagggtatctgggattacaggtgcgcagcaccatgcctggctaatttttgtatttttggtagagacggggtttcaccatgttggctaggctgatctcgaactcctgacctcaggtgatccgcccaccttggcctcccaaagttctgggattacaggcgtgagccaccatacccagccattttttgtatttttttagtagagacggggtttcaccacgctggccaggctggtctcaaactcctgacctcaggtgatccacctgccttggcctcccaaagtgctgggattatagacatgagccaccacacccagcctaatttttctatttttagtagagatggggtttcgccatcttgcccaggctggtcttgaactcctgacctcaggtgatccatctgcctcggcctcccaaagtgctggaattacagacatgagccactgcacccagcctaatttttctgtttttagtagagatggggttttgccatcttgcccaggctggtctcgaactcctgacctcaggttgcccgccttggcctcccaaagtgctgggattacaggtgtgagccaccacacccggccggaaatcaccctttatttcaattccgttttatccctgttgctgttaattggtacatacatttgcagatgtctgctttttgtttcctttttttaatgaaatagaccacattccatgtgacgtgcttttttctgaacatctttccatcaggatgcctacattcgaatcgtggcatgatgtgaacaatcagttactcccattagatcttggtcttcttacctatggactagggacaatacacctggccccacactacctttgtattgaagtctttgggaagtaggaagtgctctaccaacaggagaagtgcgataattacagtaattaacagttatatatattgaagtctgcagtcatgggatgggatgactgatcagacctctctcaccctctgttctacagctggtgggtgctggtcagctacggagtcctcttggtcaccctgggagccttcatcttcggccagaccacagccaacgccatctttgtggatctcttggcataaccactgcctcccagggaacacaaggcctttgccattggtcgcaggaacccatctcttagagctatggggccattcttagtccacgatcattccaactggtgggatgacatccggacatcctcttccagggactggggcaaactcaggccccacacctctggacagctcaaatccagtccccttcctgctccccagtcctggcagtgccgtggatggcggcaggaagtctcacatcatagaggacccctcctcctctcccagttctcaacttctccatgcctggaatccacgggtgaagagagtcggtagatctcataagaaagaatccagtctgacttccctctggagaatgactatggacagaaggccaccatcctccacagagcaccctgtcctgagtaggggttgtgctcattaccccaggccagtggtagcttcctcaggagcctggccacttccaacggtagcactgaagtcatgcaaatgcatagtcaggtagattcagaccttgtccacaccttcctgggcaacccccaccatgaacctgtcagcctctttcccatagctaatagacatttcccaggccttgaggggccccaccctgtctctttcatcaaacctgatggtccaggctgggcatccctctcctcctccatccccagacatcaccaggtctaatgtttacaaacggtgccagcccggctctgaagccaagggccgtcccgtgccacggtgctgtgagtattcctccgttagctttccccataaggttgggagtatctgcttttgtgtctgagatgggcccctcttttcagaggccgcagggtgggtgatggagaaggctgagaacctttcagaccctctgtgtgggctgggctggtcagaatcagggtgtacctccccgacaccttctttttcagtgatgttttctcttcttcctgcctttcctctgcctcctcccctgccagccctagcgtgactacccagagacaaaaaaaaaaaaaaaaaaaaaaggcagggc

SEQ ID NO: 12104 - DNA, 7071 bp, Homo sapiens
tgcagacgctggtctggttcctgctcaccctgctgctggcgctcttcatccctgacatcggcaaggtgatctcagtcattggaggcctggccgcctgcttcatcttcgtcttcccaggtgcggacccctggcgccccatctcacagccccacagcacagactcccagggcctgcctagcctcagctccctacttgctcaaaacatgcaggagagagtaaccaccagcactaattgatcacctgtctcgcctctgtactagcccctatccaagcattatctcctggaaagaaggtatagttgtgatctccagtttactgatggcacgtggggctcagaaagggtcacagacttgcctagagcttaacaaactcaactagtaaccttttccatcccacgctgtctgggtccagagtctattcttttaaccattcattcaggtgtctgctgctccttgactatgagggatctatctggctggttcagcccattacagcccagagggcagtggggtctggggtggcaccctgacacagacatcagggaacctgggttccagacacagatctaccgccagatccctggagaactgtcctgtctgcccagccatgagttccacccttttccagcttgtctctatccaggaagccaccctgaaagccccagctgctttgcttggagcaggggagccagatctgctgggaagtgtactaggaagacccctggggttgggccaccactgagtcaccattgagtgctgtccctttagctgagtctagcatgctgcccaaggggtcttgtcagatgccagcctgtcatgggagagcagatgccagatgaccccagcaggatgtggtgtgggggcagagatggaatttctagaagagtaaacatgggcctttctccatccagcactgcttcttgggaaaggaggtggctaggagggagggagccctctcccctcacaaatgctcagggccacttcttctctttcagggctgtgcctcattcaagccaaactctctgagatggaagaggtcaaaccagccaggtaaagcaggacccagcccttgatcctctcagggaggtgctggattggaatgtggctttgtgggggccttaaaacagataggagtcagaggcttgtgtacttagaaatcatgggtttttgttttgtttttttttttttgagccggagtctcgctgtgtcgcccagcctggagtgcagtggcacgatctcagctcactgcaagctccgcctcctgggttcacaccattctcgtgcctcagcctcccgagtagctaggactacagatgcctgccaccacacccagctaatttttgtatttttagtagagacgaggtttcaccatgttggccaggccggtctcgaactcctgaccttaggtgatcctccttcctcggcctcccaaagtgctggcattacaggcgtgagccaccacacccagccaggttgttgttgttttttttttaatacttttaaaaattcggtagtgtgctagttgttaacaatttaaacattaataaagggcttaatacaaaaagatggaagtccctcttcccccacaacccactcgcccccacatcctttctgagatagctccatgttaccagtatggtctgtgtcctcaaccacttctgtacatgtgtgcgtgtctgtgtacacatagctatggagatgtatacatagatgcagggctcttgttttgttttatgaaaagtggtttcagccaggtgcattggctcatgcctgtaatcccagcactttgggaggccaacatgggcagatcacccgaggtcaggagttcgagaccagcctgaccaacatggtgaaaccccatctctacttaataatacaaaattagctgggcatggtggcacctgcctgtaatcccagctacttgggagactgaggcaggagaattgcttgaacccaggaggcggaggttgcagtgagccgagatcacaccattacactccagcctgggcaacaagagggaaactctgtctcaaaaaaaaaaaaaaaaaaaaaaaaaaaaagccatacaaacatgtctaaaaaagaaaaaaaattggccaggcacagtgactcacgcctgtaatcccagcactttgggaggccaagacaggcagatcacctgaggtcaggagttcgagaccagcctggccaacatggcaaaaccccgtctttactaaaaatacaaaaattacctggttgtggtggcgcatgcctgtagtcctagctcgggaggctgaggtaggagaattgcttgaaccccggaggcggaggttgcagtaagtggagatcgcaccatctgcactccagcctgggtgatagccaaaactctgtctccaaaaaaagaaaaagaagaagaagaaaaaaaatcaccctttatttcttttttttttgtctttttttttttttttttttttgagatggagtttcactcgttgcccaggctggagtgcaatggcgcgatctctgctcactacaacaacctccacctcccgggttcaagcgattctcctgcctcagcctcctgagtagcttggattacaggcgcccaccaccacacccagctaattttttgggtttgttgttgttgttttgagatggaatctcgctctgtcacccaggctggagtgcagtggcatgatctcggctcactgcaacctccagggtatctgggattacaggtgcgcagcaccatgcctggctaatttttgtatttttggtagagacggggtttcaccatgttggctaggctgatctcgaactcctgacctcaggtgatccgcccaccttggcctcccaaagttctgggattacaggcgtgagccaccatacccagccattttttgtatttttttagtagagacggggtttcaccacgctggccaggctggtctcaaactcctgacctcaggtgatccacctgccttggcctcccaaagtgctgggattatagacatgagccaccacacccagcctaatttttctatttttagtagagatggggtttcgccatcttgcccaggctggtcttgaactcctgacctcaggtgatccatctgcctcggcctcccaaagtgctggaattacagacatgagccactgcacccagcctaatttttctgtttttagtagagatggggttttgccatcttgcccaggctggtctcgaactcctgacctcaggttgcccgccttggcctcccaaagtgctgggattacaggtgtgagccaccacacccggccggaaatcaccctttatttcaattccgttttatccctgttgctgttaattggtacatacatttgcagatgtctgctttttgtttcctttttttaatgaaatagaccacattccatgtgacgtgcttttttctgaacatctttccatcaggatgcctacattcgaatcgtggcatgatgtgaacaatcagttactcccattagatcttggtcttcttacctatggactagggacaatacacctggccccacactacctttgtattgaagtctttgggaagtaggaagtgctctaccaacaggagaagtgcgataattacagtaattaacagttatatatattgaagtctgcagtcatgggatgggatgactgatcagacctctctcaccctctgttctacagctggtgggtgctggtcagctacggagtcctcttggtcaccctgggagccttcatcttcggccagaccacagccaacgccatctttgtggatctcttggcataaccactgcctcccagggaacacaaggcctttgccattggtcgcaggaacccatctcttagagctatggggccattcttagtccacgatcattccaactggtgggatgacatccggacatcctcttccagggactggggcaaactcaggccccacacctctggacagctcaaatccagtccccttcctgctccccagtcctggcagtgccgtggatggcggcaggaagtctcacatcatagaggacccctcctcctctcccagttctcaacttctccatgcctggaatccacgggtgaagagagtcggtagatctcataagaaagaatccagtctgacttccctctggagaatgactatggacagaaggccaccatcctccacagagcaccctgtcctgagtaggggttgtgctcattaccccaggccagtggtagcttcctcaggagcctggccacttccaacggtagcactgaagtcatgcaaatgcatagtcaggtagattcagaccttgtccacaccttcctgggcaacccccaccatgaacctgtcagcctctttcccatagctaatagacatttcccaggccttgaggggccccaccctgtctctttcatcaaacctgatggtccaggctgggcatccctctcctcctccatccccagacatcaccaggtctaatgtttacaaacggtgccagcccggctctgaagccaagggccgtcccgtgccacggtgctgtgagtattcctccgttagctttccccataaggttgggagtatctgcttttgtgtctgagatgggcccctcttttcagaggccgcagggtgggtgatggagaaggctgagaacctttcagaccctctgtgtgggctgggctggtcagaatcagggtgtacctccccgacaccttctttttcagtgatgttttctcttcttcctgcctttcctctgcctcctcccctgccagccctagcgtgactacccagagacaaaaaaaaaaaaaaaaaaaaaaggcagggctgggcgcagtggctcacgcctgtaatcccagcactttgggaggccaaggcgggcagatgacttgaggtcaggagttcgagaccagcctggccaacacggcaaaaccccatctctactaaaaatacaaaaaattaaccgggcatggtggcgggcacctgtaatcccagctacttgggaggctgaggcagcagagccgcttaaacccaggaggcagagactgcaatgagctgagatcgtgccattgcactccagcttgggcaacaagagtgaaacttcatctcaaaaaaacagaaacaaacaaaaaggcagctgggttgtcactgatgggcagcatttgagcctgccacactggcctggaagtttcccttccagtctggattttgtctgctccttccttccccctcaccccgttacctcttcacctcccatctcatttcactgtgtagctcagtctctcccacgcacataattggggacagtgggggctctcttaccagcctcctcagcaacgcacgtccatcaggcctggcctcagtggccagccacattgatgtcacactggaattgttaccccagagagggcgaagagataggctatctccccacctcccaccctactccccactatattcccgttttgaccacctcagcccctcagctgccccctctcactttggccaatcccaggcaccaatcagacttcctcctccacctggagcccctagcatttccttgtcccctcttccccaaaacctctgtaaagggtacgagagggaccccctgccgagccgcccgccactcagggcagtccgatctaagaagcagaagctggttggaggctggctgggcctctgtccagtccccagatggataaactgccttttctcacatcccctcttggtgcctgatcttctctgcccccggggccagacccactgtgctgttttctgtcagtctgtggcacagcaccaagctctgccagcaccagtccctgacagggctaggaggacagcctggtcagcagggctgcagtcccccagtgccgtgtttcgggggtcaagggatgtaagtggagtcattgcacagagacagaccagtcaggagaaggagctggaatctggcctcttgtcctaacctcaggagccccctcccatcctctccccaccctccctatcggggtacttcactgtttcttttctacttgtgtatactcgagaaagggaagatggttaataaaagggatttgtgctgctgagccgtgtcccctgtgtctgatcctggggacagagtccaggccactgccaggaggaagaagggctggggtaggaggtgtagatggcatgtcactgtctctgacccctatctccggaatggcaccgccatgctccctctaccaagcagggacctgcaagtggctcttgccacccctgctttcttccacattctacctatccttctccagtgacttaggaatgtatcgcagtctccaatcctgcgacctctgccttcacttaagccctcactgtctttcctgtgcctttgtggtctcagactgtccccctgacttcagatcttggcaagagctttaaactcctgagtatccacccccatcttttcagaggcgagcgttgagcaggtcccagctgtcttggttatggagccaccagtcaccacgctcagtgctggcaagaaaaccagcaaaggccaggtgtagtggctcacgtctgtaatcccagcactttgggagaacagggtgggcagatcacctgaggtcagaagtgcgagacaagtctggccaacatgctgaaaccctgtctctactaaaaatacaaaaattagctgggcatggcggcgcatgcctgtaatcctagctacttgggagactaagacaggataattgcttgaacccaggaggcagaggttacagtgagccgagatcacgccattgcactccagcctgggcaacaagagtgaaactctatcttaaaaaaaaaaaaaaaaaaaaaaaaaaccagcaaaacagactccagtactgctctcagcctagttgtgggaagactgatgctaagcaagcaatgacacaaatatacacttccaaattgtggttaagtgccaaggaaggaaaatacagtgtgttagtctgggggctggaaagttgtctggggagtcaaggaagacttcctggaggaagtgatgtttgagctggcctgtgactgatgagtaggaattagtaaagagaggtggggagactttgccaagcaatggaaac

SEQ ID NO: 12105 - DNA, 482 bp, Homo sapiens
cagccaagaacagaaccaggactggatgcccgtttcgtcattcaacaaatatttactgagcacctacaatccctcaaaaactgttctagagtctaaaccgatggggtcgtaaccatgcccccagcccactcccttgcaggaaagaccgtggctccaggtcccccacattactgattaaaaaaaaactccagtgctctggccatgggcgtgaaggcaaggacagagaccgggaggataatgaggccaaacagctttggcccaccgccaccgggactggcaaagaggccagacctcctaatgctcttccttggaggaaggagcagtgtttgatttggtcaagaggccaagactaaaagtaagaggataaacacgagctggctggacgcgaggctggctcagggcagtgctgtcgggctgaggattcagggagctggtgttgtccaagcttcacatttgcggaaactacaactcccagcgtgtcc

SEQ ID NO: 12106 - DNA, 1254 bp, Homo sapiens
gggcgcagtggctcacgcctgtaatcccagcactttgggaggccaaggcgggcagatgacttgaggtcaggagttcgagaccagcctggccaacacggcaaaaccccatctctactaaaaatacaaaaaattaaccgggcatggtggcgggcacctgtaatcccagctacttgggaggctgaggcagcagagccgcttaaacccaggaggcagagactgcaatgagctgagatcgtgccattgcactccagcttgggcaacaagagtgaaacttcatctcaaaaaaacagaaacaaacaaaaaggcagctgggttgtcactgatgggcagcatttgagcctgccacactggcctggaagtttcccttccagtctggattttgtctgctccttccttccccctcaccccgttacctcttcacctcccatctcacttcactgtgtagctcagtctctcccacgcacataattggggacagtgggggctctcttaccagcctcctcagcaacgcacgtccatcaggcctggcctcagtggccagccacattgatgtcacactggaattgttaccccagagagggcgaagagataggctatctccccacctcccaccctactccccactatattcccgttttgaccacctcagcccctcagctgccccctctcactttggccaatcccaggcaccaatcagacttcctcctccacctggagcccctagcatttccttgtcccctcttccccaaaacctctgtaaagggtacgagagggaccccctgccgagccgcccgccactcagggcagtccgatctaagaagcagaagctggttggaggctggctgggcctctgtccagtccccagatggataaactgccttttctcacatcccctcttggtgcctgatcttctctgcccccggggccagacccactgtgctgttttctgtcagtctgtggcacagcaccaagctctgccagcaccagtccctgacagggctaggaggacagcctggtcagcagggctgcagtcccccagtgccgtgtttcgggggtcaagggatgtaagtggagtcattgcacagagacagaccagtcaggagaaggagctggaatctggcctcttgtcctaacctcaggagccccctcccatcctctccccaccctccctatcggggtacttcactgtttcttttctacttgtgtatactcgagaaagggaagatggttaataaaagggatttgtgctgctga

SEQ ID NO: 12107 - DNA, 482 bp, Homo sapiens
cagccaagaacagaaccaggactggatgcccatttcgtcattcaacaaatatttactgagcacctacaatccctcaaaaactgttctagagtctaaaccgatggggtcgtaaccatgcccccagcccactcccttgcaggaaagaccgtggctccaggtcccccacattactgattaaaaaaaaactccagtgctctggccatgggcgtgaaggcaaggacagagaccgggaggataatgaggccaaacagctttggcccaccgccaccgggactggcaaagaggccagacctcctaatgctcttccttggaggaaggagcagtgtttgatttggtcaagaggccaagactaaaagtaagaggataaacacgagctggctggacgcgaggctggctcagggcagtgctgtcgggctgaggattcagggagctggtgttgtccaagcttcacatttgcggaaactacaactcccagcgtgtcc

SEQ ID NO: 12108 - DNA, 1254 bp, Homo sapiens; identical to SEQ ID NO: 12106

SEQ ID NO: 12109 - DNA, 1555 bp, Homo sapiens
cagataaccaaaccagactggaagaggataacaagatcccaaagaggaaaaaaaattgttcttccaggatgtcaaacctatctttgagatattcatcatccaaagggtcctggggttctctttttccaaatattaggataatgcaaatattcctgctcatggtggacgcacactgtgtttacatcagtcaacccttcaaacatgagtcagagaaatctttctctaaatgaaggtgccatttctattgacagctcaacttcgtaaaggtatgactttgagttgttttgactagtagaaagaaacatttgcccttttttgctctgtttctgtatttaggctttcacttgtcctagccaagattatttagatccccaatacggaaggtcaaatatgttaaatgctaaataattagattctcttgatttacacaaaaaaccataactaactaaaatagaaacttttaattatctgtattgttgtataaaatgttttatatattaggaatctaaaaatttgttttttgcttgtatcctctgtcataggaagaagacatcatgtctctgtttactgtaaccattaataaaggctaataacagacagtacatgatgatacttttaactagggcaaacaaaagtaatattttaacaatgaggtttggtctttgctatctatacctcatgtctaattttccctacaatgtaaatgtcattcctcctctctacccatttgtaagggtctcagttttctgctcttgcatgacttattttaaagggtcacaataaggccaggtaattcatattttaaaaattccatttagaataattacatctaaaaattcacaagaaagacaatttcaatataaaataataaattactaatattggaatttcaagcattagtcatggcaaaaaagagataatttgtagcagaatattttaatggcaactttcttattctatcacttattgtgttctatttgttatgaccaaagaaattactctatatccactacaattcataaaacaggcatgaggaagtctttttttcttggtgctcatgtctaagaagatgaacctcagaggtatgtcatttttcaatactatgttctgaacagacagcacacattatttttgaatggacaacaaaatctcaaaacatatatagagaggtatggtttgaggtgtgtccagtatgaggataatatgacccagcggatgtaaaattggattttattattaaaggaaaatggggtgtcttcaaaaagataaaacagcgggagttgggatgagtactgagaaaagagcacaaaaacaggcttgtagaggaggaagatctcaacagagctgactcttatctgtgctcacattcaaaactgacttttgaacaaaagctgcatcctttgccctatactatagtcccaactactctggaggccaaggcaggagaatcacttgaacctgggaggtggaggttgcagtgagccgagatcgtgccactgcactccagcccgcgcaacagagcaagactctatctcaaaaaaaaaaaaaaaaaaaa

SEQ ID NO: 12110 - DNA, 115 bp, Homo sapiens
tgaggcaggagaatcgcttgaacctgggaggtggaggttgcagtgagctgagatcgtgccactgcactccagcctgggccacagagcaagattccgtctcaaaaaaaaaaaaaaa

SEQ ID NO: 12111 - DNA, 1555 bp, Homo sapiens; identical to SEQ ID NO: 12109

SEQ ID NO: 12112 - DNA, 8297 bp, Homo sapiens; identical to SEQ ID NO: 5787

SEQ ID NO: 12113 - DNA, 665 bp, Homo sapiens; identical to SEQ ID NO: 5788

SEQ ID NO: 12114 - DNA, 434 bp, Homo sapiens; identical to SEQ ID NO: 5789

SEQ ID NO: 12115 - DNA, 21497 bp, Homo sapiens
aggaactcatggaggctgacaggggcagcatggcaccacagcagtttctaatttaagagcaggtgccgataagcagtctgaaaggagcttttggtacaataaagtgtatgagtaagtcacactgttctgtatatatgagacacacatgaggaattttctggagctattaatacagttcttgaatgttctgaattttttagagatctttctcatgaaaaaactttttcagattgataggttatatgattggaaaaagagtcctgactctgatgtggctgctactttaaagaagcagaaaaagaatacaaaagatgaatttgaggagcgagcaaaggctattattgtagaatttgcacagcaggtaagaaggccttccttctttctgaagagcctatctcagaatatgtattatattatctttataatgaagtcagcattttcattaatactggttcttttcctctgttgacagcaattactttttttaaattcttcttcccttttctcctttttctttgcagtctgaatactttaatttagaaaactgagttgacttagaactactttgctataatacagttaatgcttataggatatacatgatcatttttagtgtttatgaggagtttcaaaatgatgagccatttgctcatccggcttctagtgaggcacacctattccagatacgttttctttacagcctggcattttggatgatttttgctcctagggtttgaatgctgctttgttttatgagaataaagatccccgcacttttgtgtctttggtacctacctctgcacatactggtgatggcatgggaagtctgatctaccttcttgtagagttaactcagaccatgttgagcaagagacttgcacactgtgaagagctgagagcacaggtgatggaggtaatgatcaacttttcagtttattgttttttttttttttaaaaatagcaagttccttgagtggaggatatttactacttttagatttaatgaacatggtgcattgtatgtatgtctttctctttgcattaatgccttttaggttaaagctctcccggggatgggcaccactatagatgtcatcttgatcaatgggcgtttgaaggaaggagatacaatcattgttcctggagtagaagggcccattgtaactcagattcgaggcctcctgttacctcctcctatgaaggaattacgagtgaaggtatgctgaggtgggaagcattgacacgtggggacttgtacagtgtttagaagttctgctgagatggtttcctcactttgaaagctgtttgacttaatacagaacacatacatccctcgctctcccttttattttagttgtcatcatacaggaaggcctgtctgtcagagtagagatgtgtgaaagtacctgcttaccagactgggcctttgccagattctaaactacactgttatggttctacactgctaaatacggttgactcttgaacaacatgagggctaggggcactgactccctggccagttgaaaatccacatatattttttgactccccaaaaacttaactcctaatagcctaccattgaccagaagccttaccaatcacatacacagtcgactaacatgttttgtatgttttatatattacatactgcattcttacagtaaaacaagctagagaaaagaaaacgtgattaagaaaatcataaggaaaatagatttactatttgttaagtggaagtggatcatcataatggtcctcattctcatcttcatgttgagtaagctgagagggaagaaggagaggggtaggccttgctgtgtttggtggcagaggcagaagaaaatctgagtataagtggacatatgcagttcaagcccattttgttcaagggtcagctgtagttttttaacatttttaattgtgaaataaaacattgctcctgaaaagtacacacaacatagaagaaaagtttaacacatttttgggaagcaaccagatggagaatcagaacgctgctggcacccagaagcttcctgtgtgcttcttcctgatcaactcccctgccttcccctcctaccccctgacctttcatagagttaaccatggttgcattttatgacagtaacaaatatccttgctttgctttgtttttgtgtctaagagtacttcccttagaagtgtctgtagactttatgtagaaatggagttattctcagtgtgtacttttatagctggctctttttttttttttttttttggtgataggctctcactgtcacccaggctggagtgcagtggtgcagtcacagttcactgcagcctcaacctccccggggttcaggtgatcctcccacctcagcctcctgaatagttgggactataggtacgcaccaccacacctggctaatttgtttacagatgggactttgtcatgttgcccaggctggtcttgacctcctgggctcaagcaatccacccaccttgatctccccaaagtgctgggattataggcatgagccaccatgcctggcctatatctggcttcctttagtgaaaaaaaaaaagtatataattttaagatttctattccattgtgtgactatatcacaacatatctatctgttctgttgatgggaaatgtaggtgatctccagttttttatgtttattttattttattttattttgagatggagtctcagtctgtcatccaggctgggattacaggtgcacgccaccacacccggctaatttttgtatttttagtagaggtggggttttgccgtgttggccaggctagtctcgaactcctgacctcagcctccctaagtgagccaccgcacccggcccagtttttgatttttgttgttactaataatgctgctgctgtgaacatctcttgatgtgtttgtgccagtttcccagggtatgtatacctaggagtgaaggccacacttgtctacagtgggtgtaacaaattatattctcaactgcagtattttagtttcattgttttacagcttcatcagttcttggatgttaggttttaaattttttttgccattctgctaagtgtgtagctcattgccgtttcagtgtgcatttgcctaattgttaacctggttggtcatttaaaaatgtttattggccatttatttcctccttcgtgagatgtacatttttcttctgcattatctttcttacagatttatatgcgcttatatattcaggataccggtttgttagttggtgtgttttgcaatatcttctactcttgtgactttttttttcctgtggtattttgagaaatggaaatatttaattttaatgttaaatttatcagtcttgtgattattgctttttgtgcctcgtttaagaaacctctctctaatatcatgatgagattctcttatatcatcttctactgctaaccacttttaaagtacatttggtaacaaatgtttttatctctgtagaaccagtatgaaaagcataaagaagtagaagcagctcagggggtaaagattcttggaaaagacctggagaaaacattggctggtttacccctccttgtggcttataaagaagatgaaatccctgttcttaaagtaagttcatttaaaaatttttttccttaaaagctatttgagttctggcatgtgtcagcattgcacatgctagggatggtgaccaaaactggctttgtctttgtgaagcctgccatttcttggcctcttagcaaacttgatgcttttgaattacttcagtttgtacaatcatagaaattggtataatttttatatgtactagaattataaaaataatgcattttattcaaataaaaaaatgagtcaaaagctagaagtcggctgggcatggtgaatgcacacctgtagtcccagctacttgggaggctgaggcaggagaatcacttgaacctgggaggcagaggctgcagtgagccaagatcgtgccactgcactccaacctgggtgacagcaggaccctgtctaaaaaaaaaaaagctagaaattgtatattctttttggcccatgtccattgtagtttcataaaagtggactttgagccatagtttgttcatttgccaaagagaaaatacaactgttcccagcacatggctcttgtgtcctggggccgtgtttattatttaggcagcatcaagtcatgctgttgggaataagctatcttagggccagtgagagaatagggcaggcctgtctcttcacccagtcctgagtatggagtggacttacgtcccttcagtggcattgataaacttgttttacttatttctggttaaaaatctcttcttccatttcccgacaagcagtgatggaggaaggagctgctgagatcatgagattatggtatttcctagttaacacagacaagctgaacttttgggctatcataacacattacgtttatgtggtacttttttaactttaaaaaaatttttcttctctactgtttaattctgcccacccatctactgtatttgccaagtggagcggagattaaacatatttcaaagttagtaaacctaagacaaaggtgaagcgaaatacagttagggtatggccccgaaatctcctccttcattccagcacaggttctgtgatgccttgctctatctaagccttagtttcatatttgcagatgagtacttaaccaaagagagaaacacaatttaattctagactgctgaggatagaggtgtgttgacaaccttatcaaatctgatttcttttcaaggatgaattgatccatgagttaaagcagacactaaatgctatcaaattagaagaaaaaggagtctatgtccaggcatctacactgggttctttggaagctctactggaatttctgaaaacatcagaagtgcccgtaagtaactacaactcgctccacaagtgaatggtggttggtcgtggtttttggtgccatcgccattacctgatacatacagataaacatggaaactcccattttttcagtatgcaggaattaacattggcccagtgcataaaaaagatgttatgaaggcttcagtgatgttggaacatgaccctcagtaagtaatttctcttgctatgaaggctttcatgttacgtagctatcttaaaactgtcctatcttaaaaaactgtcctctgtgacatactctgtttttcactgaatggtctttgatgtgttttaaccttttaggtatgcagtaattttggccttcgatgtgagaattgaacgagatgcacaagaaatggctgatagtttaggagttagaatttttagtgcagaaattatttatcatttatttgatgcctttacaaaatatagacaagactacaagaaacagaaacaagaagaatttaagtaagttactgtttttatttactttgagtctttgttaatgaacatgattgagaattactgaattccagaaagggctgtaaacagcaaaatcatggcatttactcatctaccagaggctgcatcctgaaatggtgtgttacaaaccagaaacccaacatactggggacattccagcagtatgcaaacaagtcttgtctgtgacttcagtttaataatcttggcagacttgggtcttgttaatgggttcgtagttattaaatgtagggactttatgttgctcatctgggattatatagattggaagtaacaaaacttgagtgaggaaaaccgggaaataagagattctgtgggagagaagtccattcctctaccaaactttcactcaagcactcacagtacctacattgctgcagtggtagaggaggcatcagcagagaaccaggccagcctccctcctcctttccctttgagacagggtctcgttctgtcacccatgctgcagtacagtggcatgatcatgggtcaccccaacctctgcctactgggctcaagtgatcctcccaccttggcctcccgagtagttgagactacaggctcacaccactatgcctggctaattttttgtatttttggtagagatagggtttcgccatgttggccaggctggtcttgaactcctgagctcaagtgatccacctgcctctgcctcccaaagtgctgggattataggtgtaagccactgtgcctggtctgggacatgctcttattgcaggacaattgacacatgttgagaagtgctgaaaaaccaaataaagcagggaagggcctagataaggagaggagggactgtgattaatgatgtggtttgggaaggcatctcacctcttcagacagagtaagccacacaggcacatggggagtgtccagagagaacagcagtgcgaggcagagtgaccagaagggacagtgataaatgaggtcagagagggtggcaggacctgtatcgtcaaggatcttacaggccatgggagggattgagcttctctgagttttgcaagaagccattgccaaggctgtgtgttcacaatcagactggttaattgggttgttatgtggaccttgggttgttaggaagtcagtggcaagagcctgtcaggaggctcccacagtccaagcaagaggtctaggtgattcagaccacagtgatgataggagtgatggcgtagtttgggatacatttttaagtggagcttactagtaaatattaggatttagactggtatatgctcactttagatcatgaaacctgaagtgagaagaattctacttaacaagactgctggaaacttttaaagcattttaagcgtgtgctcaataagcagggtagttatgtagtggccttttggatcaatggtttgggaacgtggtggagaaaaggagggtgataatacggtctgatgcctatgtgatcccccagtagcctacatatgtgcctaacgaagacctgcctgtcaccaggtactgcctaggttctaagccccagactgtggctgacatcttcagcagccaagctcagtgttttagactaggaacagaatgctcctgtgatgcagcttcttttggaggtagggctttaaaagagaagaaagcaaagacttgggaagcaacagaatggggaggaggaggttaagaacaaggaagaagcgctctgggcatggggtggccctgggctgcagcaccctgcctgcccctctcctgtggccgctggggaaagctgctttcctctaatgggagaagcctgatgttcagctgcagtttttctttttatgtttaagtgattctgtaagcttaaaattcttttcttttttcctttcaggcacatagcagtatttccctgcaagataaaaatcctccctcagtacatttttaattctcgagatccgatagtgatgggggtgacggtggaagcaggtcaggtgaaacaggggacacccatgtgtgtcccaagcaaaaatgtaagttctagttgtacattctgtgggtcatttcttaaagcactaaatgagtgtccaagagtcgtaccaacacagctttgtgcctgtagttcacagtactgtgctgtgtatttagtgtggtctccaccttcttaacaaatgtttcagtgtttttacctcagtaggaagaaaatgtggtaactttaaaacaagcagagcctgtcaccttctgttgtgcttcagtattggtaaatatcagtgctccatagtcagtgttgactcagtgctgatctcagtgcttcagttaattggggctccaaggcactttacattattgccttttattttattttgaaaggtttcaagcctgtggaaaagtttaaaaactagtataatgaacactcatgtttaccttccctttctgtcagcatacctaagaaaaattaataatatttcaacaatatcctataatttgcagccctcaacattatttcaccagttattccaaagatgttttggtaactctccccaccaatctggcccagtgccctgcaagctgcattgcactggggcttgttttgtggctgagcctcagtcaagaacagtcctccattctttttgaagtgtccctgttgttttgcaaatccctcctccatttggatttatctgtttctctccctcccaactagacacaggttagaattattggaaagacactcatgcagtttccctgtgtgcctgcctcttgcatgacccagcctgtctgactgctgctgatgctctgatttcctggggaaagtgctagacgccaaccatctccattagaaacttgcccctttataattactctgtaatctgtctggtacctggagttcctaatggatatcctgtttctcaacagcctttatcccagtgcctttagtacccactggcaagcgttgcctaagtcaactattacgtagatggttgcaaaattgtggatatacctgtccccccatttcttacaaagaacctcttcccactgacctttttattgagtcatagactcagtgggtttttttttttttaatataatccattacctttattcttttgatactcagattttctattgtggtcagtaggagctcaactggctcctgtatccttgacacacagcagtctgagcatcatcttcctttctggttgagatgttccagcctcatctagtactttccctggcccaaacctggttcttgtaatgggcaatggcacttagaagttgtcattgcttttctaccatttcagtggactaagcctggacatttatttgtgttactttctatgtggctttggcctcctaaaccaaccagagctctccctgttttcactcttactctcctgaatctttttctccacaaaggagtcagggttttttgccccaaactctgagatcacatcactcatctgctcacaggccatcattcttaaaatttcaggattggtcctcactctgacttcattcccatcagccacttcaagctcattcctgactcagaccctttgtgcctgctgatccctcctattacggcacctgtcacgtgaaatggtagagcaaaaataggaaatgacattgggtcaacagggcacttggaatgttttgcaaagcacattatctcctgtcattcttacaaccatcatgaagggaatagggtgttggtggtgccagcctagtttaccaaaatgttacaccgtgagtgatgaaaggatcgcactgccatgacttttaaaacaggcttttgctctagttcttacttcagctatccagccatggcgcctgtgattggcatgaattcttctgcatgcattttaatttgttcttattttatagtttgttgacatcggaatagtaacaagtattgaaataaaccataaacaagtggatgttgcaaaaaaaggacaagaagtttgtgtaaaaatagaacctatccctggtgagtcacccaaaatgtttggaagacattttgaagctacagatattcttgttagtaaggtaagtatttcagcaaaagtggcacactttaagcaacagggaatcactcttcttgggtcacctgtacctgtagctccttgggcttcagtttgattgtagaatctgatgggactggatcccccattagggcttgacctctagctgggccttgtctgttgaggaagttgctctatcaggaaagcagcaccaacagagaaagctaggacttttaggtcccctcgtgcctgacatgcaaaccagatgtgattttggaattctactcccttaggcaggcaagccctgttttttatttctgcttaagctttttagtacagtgagagcgggcatctggggccacagctttctttggcacgtttgttatgttctgtttaccctgtttgtgcctcgggcattgcagatcagccggcagtccattgatgcactcaaagactggttcagagatgaaatgcagaagagtgactggcagcttattgtggagctgaagaaagtatttgaaatcatctaattttttcacatggagcaggaactggagtaaatgcaatactgtgttgtaatatcccaacaaaaatcagacaaaaaatggaacagacgtatttggacactgatggacttaagtatggaaggaagaaaaataggtgtataaaatgttttccatgagaaaccaagaaacttacactggtttgacagtggtcagttacatgtccccacagttccaatgtgcctgttcactcacctctcccttccccaacccttctctacttggctgctgttttaaagtttgcccttccccaaatttggatttttattacagatctaaagctctttcgattttatactgattaaatcagtactgcagtatttgattaaccaagcttctgcagattttgtgattcttgggacttttttgacgtaagaaatacttctttatttatgcatattcttcccacagtgatttttccagcattcttctgccatatgcctttagggcttttataaaatagaaaattaggcattctgatatttctttagctgctttgtgtgaaaccatggtgtaaaagcacagctggctgctttttactgcttgtgtagtcacgagtccattgtaatcatcacaattctaaaccaaactaccaataaagaaaacagacatccaccagtaagcaagctctgttaggcttccatgttagtgtagcttctctcccacaagttgtcctcctaggacaagaattatcttacaaactaaactatcatcacactaccttgtatgccagcacctggtaacagtagagatttttatacattaatcttgatctgttttaatcttgatctgttttagtagagatttttatacattaatcttgatctgttttaatcttgatctgttttgtcctagaaaattccatcatacacacatttcctgatatttgggcttagtgcttctaaattgttgcagacacaaaacttaatgattcattcgtagtagtaatctgtagctagttttagggttttgctgaagtcagtgtggggtgtttgtttgaggaaaaagttccaaatatccactagcatagaattttaaactatttttattttaaagttatggcataacatataacataaaaatattttatatacgtttgaaaaatctataccgttcttttttatcatcaaagtttctcaatggccagtagaagcaaaaagacaacaccacctctgatctacgggacataatgttcccaggaaaaaaatcttcaagtgggtgtgagggtgtttctaattcaaaatatgtagatttctccgcatggaagaagtagtaaagattttcttaacatgctcctgtgttcatgcttggagacaagaataagatggtttagaagctttaccctttcttggaacaagtagaatcccggtctgagacctctcaggaatttcagagcttagcagtctggcctggaggtttttcagccttttagtataataaacagtagttgcttcctagagttgagtttttaaggattcacaaaaaggagcctgtacaaaatatacatacagttctttattaaacaactgtaaacacttcactgtaaaaatccataaaactttataaacaaacattttgtaaatagaatctatgctacagtaaaataattaacacaattatttacatgcaatactgacaaatttggcactttttgaaaagaaatgtacaaaacacttgctttaaaagaaatttaaaattataaaaactccgagcattactatcatgcactttgcaaatacctcacaagcacttatggcacagctatcagagagcatcaggctctctggtaatatttatgtaacttttaatgtgcttccataagtttgttgtaaaaccacctggacattgtcaagaataaagtcaaatgccatattccaaaccgattccaccgattgctgcatcagcctaaaggtggggagagaagaaatgtcattaggaattaggaaaggtccttaagactaattattcctttttatatataaaaattgactttggcaaaaaaaaaaaaaagtcctggccaggtgcggtgtggctcatgcctgtaatcccagcactttgggaggccgaggagggcggatcacctgaggtcaggagtttgagaccagcctggccaacatggtaaaaccccgtctctacaaaaaatagaaaaattaggtgggcatggtggcacatgcctataatcccagctacccgggaggctgaggcaggagagtcactggaacccaggaggcagaggctgcagtaagccaagatcctgccactgcactccagcctgggcgacagagtgagactccatctcaaaaaaaataaaatcctagaacactcaaatttttttttattttgttttgagacaagctgtcgatcaggctggagccatgcagtggtgcaatcatggttcaccgcagcctccacctcccaagtaactgggaccacaggtgggcaccaccacccccccagattatttattttttgtatttttcagtagagatggggttatgccattttggccaggctggtctcaaacgatccacccaccccagcctcccgaagtgaagtacaggcgtgagccactgtgcccagcccacttcctatggttttttaatcacatgtaagaccttgagggcaacatatttggaaccttatttgctacttagtcaacatggcaaaataaaggatatcactttctcattaaccctaatgagtacagtttcccagaaagtttaaaacaactcagtacaccctcagccattgtgacatgccattttttcccatttgataaaagtgatgaattactaccttttcatgtattttataactagatccagtttttccaaatctttttcttctattagatcagtacagtatttcacaacttggagaatgtcttcttccattggatctaggaagggggaaaaacttcaaatgaggaccagtctttttgaaggagaaagtcagagatctgcatggataaaggaaaactgcatttctacaactatgtcactaacagctatcaaaggaatgggctttgttacttttcaaagcaagtcccagaatttaaaagatttgggggtagctgctttaagcttatcagagttagagaaatgggttaaatctgcatagtttagtctgtttatgttctcaaatcatgagacgactacatctcagccttgggccatctaacacaggccaagccaacctgaaattgtagttatccattctctgagcaaggtcttcacatcattgaattcaacagctccagctagattgggtgctggaggtctcacacagccagctgggtcagactgcaaactagaaaggcctggcacacctgaagtagaagcagagagttcttcctgttaagaaaacaaaggataaaattgctatattcacacattatccaggtatattaagatctcataaaggtcaaagttaaggaattaccaggggtttctctgcaggaggtccttcatgttttagaaacccatcaattaacttctggggactgccacaggcccctggcagagtttttgcaggactgttaagcagcttgttattcaaaggactctgaatcctttttggtgaaccaatggtttttttcttcttgtttcttttcttttctttcactgctgcctttagatgaagtaaaggattctttggcactaagagcagatggatataagatcctcaacaaaatgatagtatggatagtctggatgacagtattgggttctcttttctcctcccaaatacaacaggctccctagcctacacctcccctcctgccccaagtgagaggcagtgaatggcaatggcccaaagtacaggctctccaattctctctttgctttgccacttactaatttgacctttggcatgttgctcatctatgatgggtagtactaaatgtgggtttgatgtttgtgatgcattttgaaccaacatcctttaatgtattcatctcaaaggacaactagctgaacaagtatttaagacatttgtggtaatgtcctattccaactttttaaaaagtaaaaagtggtgtgtttaaatcctgaaagtacagacacaaatccaactagaaatatgatgatatttactcatactgtatacttcagatattatcccaatatgaagagctcttaatgcaacagcttagactttgcccattatatactgcaataattagacaacagtgactccattactctttgtcttcatttttgttacatgccacttccaaggctcaccagatgcgctggctgactgctggtgagtgctgttctcgccctgcctttgtctttgatcatacgctgctttcagctccctctgaagttcagcaggaagggcagcaaatacctcagggtccacctagtggaaaagacgaggtcaaagtcaaacctgagctaattgtagatggtagctggtttctctttttcacaaaacagactttgttttcaaatctcacttttctgatctgtacgaattcttaacagttccccaatatcaaagctgattaaatcttcaaaatggttagagcaagaataaggaattaagagcaagaataaggaattaagagtactaacttaaagaaacccactacaacagcagaacctgggcaaaatgcactagtagaaaatgggaagcaaaacattgaaacagggactcaggttgttactgtcccccatgcaggattatacatctccgctctgttgtattcaagtgtggccattgatgtgtttgccccagatcagtgtgtttctgtcttagcatgccctcccccgtctcttccctgctgcttcagcgggaggctgctctgtgtctacatcctgcagatgcaggagatggagacaagcccactctcccctcccctcccctcccctccccagtggatgtggtgtcagatacagaggagaaagggaagtgagacaggtcctaagttggagcaggggggtgagaatattgaaactacagcagagggttcccatatttaacttacctgtgaaaatgctggaagggctattaaatttattcctgcgtcactgttcgattcttgaggttctggtatttgcaacaagactgtcccaactggttgtggcaaaattcctgtattacagccatttactggttctttctttttgtcgccatgtgactctgcttgctggacagcacagacttgctctacttgttcccggagatcaggtggaagtgcttctaaaacagactgatccagctataaaatgccaaacatatgagtaggaagttaaagcatgctcagagatgaggtgtttgggagttaacacgccactttaaatttcaatttgaatactgtggataatcaatgtaaggtacagaccatcaagctaggaaagccacctccaaatcagcacatttttggaacgtcttggccttttgtcattgaagcctgaagtactatgtgtagtctggaaagaagtgtatatatactaccagccactatcacatgaccaggtaagtccaaatatactcacagaatgtcctgcaattggggccaacagatatgaatagccttggtgaagctcaaattagatcccaccccagggaggggtgaaggcctgaggcacatgttaaaattctggacaggtaacagtcctgggtcaaaagttcacctttcagatgagagactgcccaaaaatacaaataattctactctgagagcagcacactggaagaaagggtttctagaagctgaattttctctaacttacaggacagaatccactgttcctttggccagggcctacctgtgcatccacatctggccctttggaaacatgcaatcccatcaactgggtggaccaatcttatcttgccaggagtaactaattgtgggtatctgtcgccatacaagcatatcagcattgccctttcccctagttttgcagccagtatttaacatctccttccgcctccttccatgcagggggagcagaggcacaaataaacttgcccaatatagcttaaggtgctaccttactttcaaggaccagcagtatatcacatgtacagcccacacacgctgaattaaaccatccaaatctccagagacctgtttgcaaatactgcaaaaacccttcgacataaggcctctacttcaccactaatcaccaaagctgccttgctgaatacagtaagtctgcatgatgaccactgtcacagacaatggcagtccacaggaggactgcctttcagctatgctttacaacttgcaagagtggcaaatctttgcaaaagcactttcactcaacccaaatattgcttatttagaatccaacatcatgatctacccaaacaagtggcccgttctccctttcttggttaaacggatgaagaaataaaaatgccattttcatttgtaaacttgtatttttgtatttatatttaggagtataaaatgtacttatatttaggactacaaaaatgtacctgggaaggtgacgggacctctatactcaggttaagtctcgactgcacactgacaggagtatgtagaccattccatttccctgaagactcagccttgttagtatcaggactggtcggcagatgtgcaggaaaaggtggcaagaaagtgcaagttctagaagcagatgatatttccagatccacagcagcccgaaatactacaaaaagaaaatatataaaatagcctcttcagatcatcgggcagggcctttaatcctctgtccattacaaataaaaaaactttattactgattcatcataatgaagaatataaatttttaaaatcacataaagctgtgtcaattttaaaaccaactgccgtctttccaaggacataagcagcacctaaaaaagaaccacattgatgaccaccaaccttctttgtgctcctcttcggtggatttcttagctttctgaacttggaagacatcacggacagagtatgacccactaggaaagtggcttgactgaactgatgggcgactgggacatgtggaagggttcagattagttggaaccaactgattcacgtgaatcccaacctagaacccagaataaagagtatgcttctaggaaaactaaagtgaaaatatgaattcagctaagcaaaatcctcagcaaatccttttcactatctcctggatcctgtttctagaataaaggtaaatgaaagtattcaaacagcattctatatgacttattacaaaaacaatttctaaagtagctagtgagtggtcattcatctcaaacttcagagtatccaattctcccaaaatataccaaaagatctttaaaatcagaaaatccaaacaagtggaatactgtattccactgatgttctcgtcaactaaggttttaaattaggataaaaaaaaattaagagaggacagtctacttggaaacttcactatttttatcttttttaaatgaaatacttctcaaaaaatattggcgggagtgatgaacagcaggtacactgcagacccctccataaagtgccattataacagtatttcagggagaaatcacaattacggctggcttagtgactaatctttcaacaaagcccacatcaagccagaacaaccctttacttacatatgcacacataaaactaaacctacaaaggttctttttttttttttttttttttttttttgagacagagcctcactgtgtcactcaggctggagtgcggtggcacgatcttggctcatgcaagctctgcctcttgggttcaagtgattctcctgcctcagcctcccgagtagctgggactatgaggcatgcaccaccacacccggctaatttttgtatttttagtagagatgggggcaagtgcctgtaatcccagcactttgagaggctgaggtgggtggatcacctgaggtcaggagtttgaaaccagcctggccaacatggtgaaacctcatctctaccaaaaatacaaaaaattagctgggcgtggtagcgggtgcctgtacccccagctactcgggaggctgaagaaggagaattgcttgaacccaggaggcggaagttgcagtgagccgatacaacgccattgcactccagcctgggcaacagggcaaaaactgtctcaaaaaaaaaaaaccccacacaaaaatctatggttttgacattttgatgcctcttgcctgtttcaaaggcatcttgatgtgcctgtggtttcactcccttctaggtcatcatacagcagatgcagagtatgtttctgattaaaaaggaacttaaaggtacaaaatttatgtattcatattcctcacagtcatatctacttctaggaaacaagaacagggaagacatgtatattagcccctggttaatcaggggtaccttggaaaagtacagtaagaatctaagaaaattattctaaaatgaaggaggtcaaaatggaggaagtcaagaatttttgtttctcttttccttgtattacaaagcagctaaagacctacatataaagtccctatacaccagcaataacccttttgagagcaagcctcaaaaatgagagatacattacacaaagtcagaatttacaatgttactatatacttacccctctcatatctgatatatttagtttcattgtatgaaacatgtttagcatcgcctttccaattatttttgcattatctgttgcctggtcaagagttacagtcctgtaagtgatagaattaaaaaacaaaagcttcattccatatgtattcactagtactaaagtagtatggaactgtttaaaagagttatagaaaagttgtaaacagttacaaagaagattataaaagtgaatgccatagtctcccttcaaggaagccagaaataccaaattagttacactggcaaccaagggggaaagaaaaattatggaacactagaactttaaggtaaaaaccgtaatggacacttaggtcaactaaaaataagttgagaaatttagaaaaaggtagattttagctaacatatgcacaaataaatacatattttccagctaaagcacaagtgaatggtaaacacaatgttcttgattccaagagaagttttaggttccaagattatgtatgctgaggtatagcaaatattcagaagagaaagataaattctctgtatgttgtttcttgactctcctttcattgtgtttacagtacagccaataaacaattcttagatctttaagaactcttgaaggaggaccaaatggtccatcagcattattaggtctcaaagatgtgctgacctcacccaccatttccttcagagccttttgagcttctctggcatgagcgggctgtcccattgcaaacagaattactaactcagtaacagattaacaaattactaccagttctctttccaaaggaaagttatttcgtgttttggatgatcctttccatgtataatgaacaaatgaagttccaggccattaaacaagaaatattcccagaaaaaattattataaattgaattggattttcccatagaaatgtttaagaagataatcacattacttcatctgcttatagaaataaccactaaaagctgagcacagtggctcacacctgtaatcccaaaacgctgggaggtcaaggcaaaaggattgttcaaggccagcctgggcaacagagcgagatcctgtctctacataaataagtttttaaagtaaataaataaatgaccactatttactatttgagatacatgtgtatcataacaggtaggtaaatataattcaagataaccaactgataaaaaatgtattttataaattatgttctctaattgtaatttataattcctgctttcatggtaacttgggagtttctctgtttaagagcagtcgtctcacgacttagcaatatcatcatatacatgaatgcaccatgtatggttggcatgagctaatctttaatgaaactatacttcatattgtaagtagctttcagtgtcaaaagtctcaaaattttggtttcacagatgaaatacagtgcaatataaaatgacatgtaaaaccacacatcttcatattggtcacgaatcttacatgaagtttaatattaagtagttggccctgacataaaagacgagtgtttcagaccgggcacattggctcatgcctgtaatcccaacactatgggaggctgcggtgggcggatcatttgaagtcaggagttcaagatcagccttgccaacatagtgaaaccctatctctactgaaaatacaaaaattcgctgggcatggtggcatgccccataatcccagctacccaacaggctgagacaggaggattgcttgaacccaggaggtagaagttgcaatgagccgagatcgcaccactgccctcaggcctgggtgacagagccagactctgtctcaaaacaaacaaccccccccccccccaaaaaaaacagcgtttttaaatgcttttaccagttttcagacattacagtgattcattcatctttttaccaattaaatgtatacacctatgtaaatgaagttgctctccttcaccatcatttttctagctactatagtctgcctttgtgtatcatttttttgagacagaatgttgctctgttgcccaggcaggagtgcactggcgcgatctcagctcactgcaacctctgcctcctgggttcaagcaatcctcctgccccagcctcctgagtagctgggactacaggcgaatgccaccatgtccggctaatttttgtacttttagtggaaatggagtttcaccatgttggccaggctggtctcaaattcctggcctcaagtgatccagctgcctcagcctcccaaagtgctgggattacaggtatgagccaccacacctggcctgtatcattgtttttaagaactacattgaaattttcctcaggaaaaaagtttcaccaagtcccgaaactatagcagtccctttggtctgcagccttgccctttctttctgtccatgcagtaaagttaacagcccaaagatgccaagcaaaggctgccaaggtcagcaatgccgtcaaaccaacctcctgtgtgtgggcctcgctgaaaccaagtgcattaacctaagctgaatgccttgggctgatgcctgcttctacagaataccagattaacgggtttacaggtctttattcaaactcctccttggttttcttcattttctattacttacaacaacctgtactgaaatataattaccaatatcatttctgaggtgagcttacctggcaatgttatcacaaattccatggcctccaaattttgcagtttctacaggagccccaggctttcgtaccatgattttgagagttagacgtttacccttcatgccagtggcttctagtcttctttgaatttcttctgaaagactcagaagaaaagcttctgcctcttttggctatggaaagacaaacgtggagaaactaccattccactttcctatatacctaataattgttctcaagtattttaactttgaatattaaacatgttggttactcactatcacgctcagc

SEQ ID NO: 12116 - DNA, 181 bp, Homo sapiens
aggttgcagtgagctgagatcatgccactgcattccagcctgggcgacagagggagactccgtctcaaaaaagtaaaactacaacaacaaaaactgtttggtataccctcaactattaaatacaaatacccaccttcccaacaaagtgaaagtaatgagtacttttaaaagatatttttcc

SEQ ID NO: 12117 - DNA, 2293 bp, Homo sapiens
cagtctaggaacatatgcatctttacatggaagaatctattgtaagcctcacttcaatcaactctttaaatctaagggcaactatgatgaaggctttgggcacagaccacacaaggatctatgggcaagcaaaaatgaaaacgaagagattttggagagaccagcccagcttgcaaatgcaagggagacccctcacagcccaggggtagaagatgcccctattgctaaggtgggtgtcctggctgcaagtatggaagccaaggcctcctctcagcaggagaaggaagacaagccagctgaaaccaagaagctgaggatcgcctggccaccccccactgaacttggaagttcaggaagtgccttggaggaagggatcaaaatgtcaaagcccaaatggcctcctgaagacgaaatcagcaagcccgaagttcctgaggatgtcgatctagatctgaagaagctaagacgatcttcttcactgaaggaaagaagccgcccattcactgtagcagcttcatttcaaagcacctctgtcaagagcccaaaaactgtgtccccacctatcaggaaaggctggagcatgtcagagcagagtgaagagtctgtgggtggaagagttgcagaaaggaaacaagtggaaaatgccaaggcttctaagaagaatgggaatgtgggaaaaacaacctggcaaaacaaagaatctaaaggagagacagggaagagaagtaaggaaggtcatagtttggagatggagaatgagaatcttgtagaaaatggtgcagactccgatgaagatgataacagcttcctcaaacaacaatctccacaagaacccaagtctctgaattggtcgagttttgtagacaacacctttgctgaagaattcactactcagaatcagaaatcccaggatgtggaactctgggagggagaagtggtcaaagagctctctgtggaagaacagataaagagaaatcggtattatgatgaggatgaggatgaagagtgacaaattgcaatgatgctgggccttaaattcatgttagtgttagcgagccactgccctttgtcaaaatgtgatgcacataagcaggtatcccagcatgaaatgtaatttacttggaagtaactttggaaaagaattccttcttaaaatcaaaaacaaaacaaaaaaacacaaaaaacacattctaaatactagagataactttacttaaattcttcattttagcagtgatgatatgcgtaagtgctgtaaggcttgtaactggggaaatattccacctgataatagcccagattctactgtattcccaaaaggcaatattaaggtagatagatgattagtagtatattgttacacactattttggaattagagaacatacagaaggaatttaggggcttaaacattacgactgaatgcactttagtataaagggcacagtttgtatatttttaaatgaataccaatttaattttttagtatttacctgttaagagattatttagtctttaaattttttaggttaattttcttgctgtgatatatatgaggaatttactactttatgtcctgctctctaaactacatcctgaactcgacgtcctgaggtataatacaacagagcactttttgaggcaattgaaaaaccaacctacactcttcggtgcttagagagatctgctgtctcccaaataagcttttgtatctgccagtgaatttactgtactccaaatgattgctttcttttctggtgatatctgtgcttctcataattactgaaagctgcaatattttagtaataccttcgggatcactgtcccccatcttccgtgttagagcaaagtgaagagtttaaaggaggaagaagaaagaactgtcttacaccacttgagctcagacctctaaaccctgtatttcccttatgatgtcccctttttgagacactaatttttaaatacttactagctctgaaatatattgatttttatcacagtattctcagggtgaaattaaaccaactataggcctttttcttgggatgattttctagtcttaaggtttggggacattataaacttgagtacatttgttgtacacagttgatattccaaattgtatggatgggagggagaggtgtcttaagctgtaggcttttctttgtactgcatttatagagatttagctttaatattttttagagatgtaaaacattctgctttcttagtcttacctagtctgaaacatttttattcaataaagattttaattaaaatttgaacttttcaa

SEQ ID NO: 12118 - DNA, 308 bp, Homo sapiens
tttggccgggtgcagtggctcacgcctgtaatcccagcactttgggaggccgaggcgggcggatcacgaggtcaggagatcaagaccatcctggctaacacagtgaaaccccgtctctactaaaaacacaaaaaattaagccgggcgtggtggcgggtgcctatggtcccaattactcgggaggctgaggcaggagaatggcatgaacccaggaggcggagcttgcagtgagccgagatcgtgccactgcactccagcctgggcgacagagcgagactccgtctcaaaccaaacaaacaaacaaaaaa

SEQ ID NO: 12119 - DNA, 2293 bp, Homo sapiens; identical to SEQ ID NO: 12117

SEQ ID NO: 12120 - DNA, 308 bp, Homo sapiens; identical to SEQ ID NO: 12118

SEQ ID NO: 12121 - DNA, 922 bp, Homo sapiens
ggctgaatggccttttattaaaaatgtaagacattttaaataaaagaagttaaaaagtctgtggaagtattgagggtgagaatctctgctagctagatctctatattaagtgatgagataagctttattaaaaatgagaatcagttcatacttaacctaagcctgacagtgctgggcagagagtcctgctgtaccactaccaatggagccaggcaaggatgcctctctgctagacacagcacatatggacaaagccacaagctatggctcatcccaatagaatcttactagttccctggtaaggttagctataatgtcttctaactcacatcatttgcattaaaaaaagaaagaaacagatgatgactgatacacatgttggttggtagagctttcaggttcctctttccatgtagttgaggaaattcctcagcccattgtcacctcggatctcatgctgcaactccatccttagctcaacacccactggcccctgctttcaaactgttgctggtcttcaggtagagcaggttctgcagatcaaaggacatttttcactaaaaatctctgacatcagagacagagactacatatctataatgaacctttccgaaacctgtccattagaaagccacttctcagtacagaggtggaccttggagactttccaggattttcacatccatctgcgaagaggaaaagaactcctgaaactgggctgacttcataaccagtttaatttcacacatctcacctttctggagctgccttgtttttcccttcttgcatcactgcagagaaaattcatggacttcctaaaggtgagactctgacccattagtaagaaagtcttgctttatgttaagttggctttctctggagatctcctaactgctttataaacattctttcacacctccaa

SEQ ID NO: 12122 - DNA, 98 bp, Homo sapiens
tagtagagatggggtttcaccatgttggccaggctggtctcaaactcctgacctcagatgatccacctgcctcggcctcccaaagtgctgggattaca

SEQ ID NO: 12123 - DNA, 57649 bp, Homo sapiens; identical to SEQ ID NO: 7000

SEQ ID NO: 12124 - DNA, 5541 bp, Homo sapiens; identical to SEQ ID NO: 7001

SEQ ID NO: 12125 - DNA, 296 bp, Homo sapiens; identical to SEQ ID NO: 5450

SEQ ID NO: 12126 - DNA, 101 bp, Homo sapiens
ccagcactttaggaggccgaggcaggtggatcacgaggtcaagagatcgagaccattctggccaacatggtgaaaccccgtttctactaaaaataccaaaa

SEQ ID NO: 12127 - DNA, 126 bp, Homo sapiens
taatcccagcactttgggaggctgaggcaggtggatcatgaggtcaggagttcaagaccagcctggccaacatggtgaaaccctgtctctactaaaaatacaaaaattagccggacatggtggcac

SEQ ID NO: 12128 - DNA, 275 bp, Homo sapiens; identical to SEQ ID NO: 8582

SEQ ID NO: 12129 - DNA, 170 bp, Homo sapiens
aaaagactgggccacgtggctcatgcctgtaatcccagcactttgggaggccgaggtgggtggatcatgaggtcaggagatcgagaccatcctggctaacatggtgaaaccctgtctctactaaaaatacaaaaaattagctgagcttggtggcaggtgcctgtagtctc

SEQ ID NO: 12130 - DNA, 5125 bp, Homo sapiens; identical to SEQ ID NO: 8039

SEQ ID NO: 12131 - DNA, 107 bp, Homo sapiens; identical to SEQ ID NO: 9060

SEQ ID NO: 12132 - DNA, 131 bp, Homo sapiens; identical to SEQ ID NO: 9073

SEQ ID NO: 12133 - DNA, 8432 bp, Homo sapiens
aaaacctgggcacaaaattgggttgactgtgaatcattgtgatgcctgatcactctcctgagacacccaccatcattggtactggttgcctgctcttgacaccggaggccactttgtgtacttagcagttagaaaggtgatgtgtgaggcccggcagctgttggtgttacagctattgtgtgggaaacaaaagccattctgttctgttccccagcctgcctttgtatcacggatagaggagctgtttcataaatgaggtataattctttactggagaatttcattactgcccatgtttcaatgttagcttacacttccaacagcagaggggaatgtctgaacatatctccttttgaaaagaatcttggcttctgacctctgtcaagatgcttgcattttaaatctgttaactagacctgcgattagatgccatcattacaacacatatgcttcccaccttccttgctctagaccacccaacctaaggctggctagagtgtatttgctgtcagcctgcctgtcttggaaattaagcagagtacagtacacactggcacccaggtgaaccagtaggaactagatttctcgcacaattcctcatggatctgtgctaggaaattctcatagagcaaatcagaactgacgtttatttgaagaacatgcactttttcacccaaatggtatatttattattttcatttagaaactatatcaatctaggaagttttcagtagcatataaaaaacaaactggcctaaacaatcaaggaagtgcagtgggctgtgtggttcttcccagccttcatccctccctgggctgtgtcatttgctgtgtgattttgaggttcctccttctaaaggtgagtatatttccctaactcatggatgttaggctcagctacatgacttgctttggccagattttaaaagtattcctattttcacttacctttcacttttctgccattgccgtgagaagaacatgctctggctctcttgcatcaaataagagaaatgtgaggcaggtttggaatctgcaaattggagccagacccacctgagtccaacctagatcagcctacttccagctgacctagaattgcatgagccagaataagtgacagttgttttaagccaatgcattttgaagtggtttcacagccctattgtggcaatatctgactgatatgtattgcttatataactgaagagtccaaaggtagtatgggtttcgggtagggtttgaaaagaattcctgttctatttctgtgtgattctcttggggcttcaacctgggatggtttccctcttggcatgatgaccatagccatttcaggtttcacgtttacaccacgtgccatctagaaaacaagaaggcttctcttcttcaactatcatgcaaaagtcctgggcttcactctgatgaggtcaacttaggtcacatgtgtatcctgacccagtcactgaggaaagagagtgggagtatgccacgtggtttacgtgaatcagagtccctcttgaaaatgggagtgagtccaatctcttccgaaatctgtgttgtgccaaattaaaggtgggagttgtagggtggaacagatgttgagaggtacaagcaatgttaattatggagtctgaatctcccacttttgttttaaatttctatcaatatattgtttggctcaagccattttccttcctccatgttgctaggctatctagagacagagaaatgggatttaagctctagatctgagatgttacctttaaatggcaaagcgcatggccacacccatacccctacagtactggaaagtgggtgggaacccaaataagactttaccattattctgtcagacttccaactcctggtatcccagggttttaagaaaatccaaagcaggtttgacctatcagaatgcggagatttctgatgtagaggatgaagttaatgctgatgtaattaacagcatgggatgaggtgataagaatatctttccactgacttctggtcaccattgtttccaatgagaagtcagctgtaatctttgtcactgtccagacacatagtaagcaccaaaaaatgtgtgttgaatcaatggattaaaaatagaaccaagatcttttggcacatatcccaatgttcttccaagactactctatcacttctttgtaaaactttactttgcacatttaatgtaccccttgcagcttctgcagggaagtaaatgaaatcaatgactaattcaggtaatttttgtaaacatggacattaacatgatcaccagttactttctgtgcttctgagaggcctcctgactctgaagtatctgaaaggttgaacaaccctaataattgaatgcatttttgccatttaataaatgtttgccattttacaaatattattgagcatctactgtccacaagacaccgcgttaagtaacgtgagggacagagaattgaacatgagctaaaacttgtcttcaagtacccaactaatataatttgtcactcaaggtttcagggaaactgtggacagaagaaaagacttgggacctttcatggaactacagattctcagggagtagcttgcctgtctccttgtagtgttacttactagttgtctctaatcattaaggatctcagttctgtatgaaacatctgtcagcattaagacaacatcttgaaaaccagcattttgatgtgacctagctgggatgtcaggcatatccacatgttcttacattaatttcttaaaaacatcttcccatgcattttatggtggctgtacatgggcactattaggtttgttttggtggtaatgtcctggttagataattctacatagttgcaaatttgagggtatgaacactgctacgttttctttgactccttctttgtcttcgtattttttttccagatgagttatgctttaaaccatacaaacagaaaactaacattggaacctaaaattactgtcaatgccaagatcattgtggttggtgcatccagtgttggaatttccttcctagagacattggtattttggtgagttgtttcactctattgattgattggtttttaaataataaaaattatcttcctacatctgaagagaacaccatcagagaacagacctgagattgtttggtactccacacaccctgcctatgtggatggatgaatcagtagaagaatattctagatcaggggttagcaaactatagccctgaggccaggcctggcttgccaactgcttttgtaaataaagctttattggaacacagccacactcatttatgtgttgtctgtggccatttttgtgctacaatagcagattagatggcagactcctctgctgagtagttggaacagagaccatatggccttcagtgcctaaaatatgtacagtctcacccttcccagaaacagcctactgaccccttttctaaaggaatgttttccttactggcccgatcacaaaaaccacctgcagcatttgttaaagatgtagattccaagatcctgcacccaacttacagaatctggactcctggggaatggtctaggaatctgtatgtcaatagacactccacataatcaggcaggtttggcaatgagttttgacttcatacattacaaatacactttcagaaatggcatgtgggccaggacctttcttccagcccttgaattttggatcccctggaacaggtaaaacccttcagggaatatggaggcctgtgcatctcttctgatgctgttttctcatccccctcaaagcactaaacaaggtttcctttcagagcccatttttctgatgggtgatgctcagggatttccagcatccccagtctctctctccatgtgctcacttgagcacctctttaatagaaaacaccctggattagggtctgagagctcgggatcatggcctggcatcatcagcacctaacatggagccctcagtgtattgtctagcttctctcaaactcgctatcttcatttattttttaaaaagtttcatagatgttttaaaaccctgactttgggaaccacagaaccctgaattaagagtccagtttttccaaatcttttgctcaggatcacatgaaaaactttagctaccattcaaaactacaggtgctgagaggtaagcaggagatgggaaaatgcagcctaccatcactcttctggaagccagcagagttcttagctcaggacaggtggggccttgtgaagggctgggtaagcaaatggatggaggaaatgaccctcaaaaggtgtatgtgcctggttaacgtggagacgagctaatcccaagtggttattttgctcatttaacatcacattaaccagataaaaaaagaattgattttttcactttctagccagtttgttcagttctccagaacatactcttaggtaactagaaataaattatgagtcattactgaagttagtaacagagttcatgtgctttgaataatgtggtcagtctgcagcaatatttcactgcaagcatgaaatgatgagaagcacctaggaatattccattcccagggtatgccacgttatagtctgagtgctttacttgttctgatgggtctcttcctcgaaaacttttgaacagcaagttttatgcaaccattttcgaatgatgaattattaaggtggagctgtgaaattatagcagttaagaagttataaacaggtcttaaatcttaattcagctatatacttagtcataatgttttatttaaatgattacattgagacatatacaagtaattttctttttgtggagtcaacttagatctaataaagacaagtataaattttgatgtaagtattgggtcgattaaatttcccaatcaaacagagctttttaaagcattctaaaatactcataattctctatcatcattacacagattacgtacactaaaaatagactggtatcagtttacagatctctaatccttaagagaggaaatagttttctcattattttctctaattattttaagtcagcaatcaccatggtaacctactgcgtattttactttcccagtttaactgccatttgaacttaattttatacatgatttgagctgaaatgaagaaatacagttttcacccaacactgaccaccaatgaggattgaatctacattttggaagcaaaatttaggagaatcagcctccttgtagtcttttttggtttgtttttgtttttgttttgagacagagtctcactctgttgcccaggctggagtgtatggagcaatctcggttcactacaacctccgcctccccccaggttcaagcgattctcttgcctcagcctcccaagtagctggtactacaggtgcaagccaccatgcccgactcatttttgtattttcagtagagattgggtttcaccatgttggccgggctggtctcgaactcctggcctcaagtgacctgcccgccttggcctcccaaagtgctaggattacgggcaggggccacagcgccctgctgcctccttgtagtcttgagctgcattgtcagactcagcaggggcatcatcattcctggaaaatccactcgaggctcaggacagtaacctctttctccagaaaatctggtaattctgtcatctgacaacaaaacaaacacaactttgttcttgtattatttccatgcaagaaattataaaacacatttggtctcctcttcaaaggacaccaaaagcagtttgtgtaaattcctatcctttcttccccaagtgctgaggtgctactgggagagctgaagtgctttgcccaaactcactccctgatattccctaggatgtaagctccatgtgatgaggcaatactgtggtggtgttctgactttttatttttttaagtatgctattttatctgctagctgtgtgcagttaatctgcacagacacatctccttgtctgtggttgtcaggcctgagtcctgcgtcttgtccttcctaggaggagcctgttgggccctccagcaccgggagacatgcatggcaggcattttcctggggtgtcccaggatcccagtcttttacttcccctgctgtcctccgtgccctcctgctcctggccctggtgatccccagcagagccgaggagccagtggccctgctctcagaggcttctacagtctccctcagccctgcgggagacctccaggggtggagatgggcaggggcgtagcgtcatccagggtggggtgggctcagctaattggttccctccccccttgtctggtgcacttggcctctgaggggagcccaggaggaaaggacccagccttctttcctgtcacctgcccagccagcgcaggagcatgcgtgtttgtggcaaggatcaggagctgggcagggcaaggctagggctgtggggtggtgctcttgcattgcagggcattgaggaagaaaacaccagcttgtactatggggtagagggccgtgaattggaggggaaagaacagatcttaagactgtgtgttcttcataatgcccaagacatttaagtgatagatttggattatttttaaatgactgttcttgtgattggtgggttgtgttcatttggccaccccgttctttgggactgaaagttcctggctcggacactatgatgtcacatgtgcattttccttctcggtgcttccattaataagactatttaaaacctccaaccactggagaaagcagaaagagcttggcctcagccgttagcccacctctgctgccaagcagtgttgcagccctgagggaggaactgtcctcatctgtgctgaaggagagtcccagcaggggcccccaggtcctgccagcctgaaggcgccaccacggtagaaactccacaaaccctctcagggtgagatctgtaaagtgaactcactataaagtgaactcccaccaagtctagcattgctgaactcctcaactgcagtgctttgactctttcaggtttccacaaagatattccagaatcctttttttttaattatataaatgctatagcaaaatagaaaaaaaaaagaagaagaagaagaagagaaggagccggaaccaggtgtatgcacctctcttctgtttctgcatcctttcactcctggtgtggcgcgtggaccagcagcattgatatcacctgtgagttcgttagaaatgcacaacctcaggccctgccccagtgtcccaaacaggtttttttccagaattatgcagaacagcatcttgactgtctcctgggcctgcgttcatagagctgaggcagttgctgtccccttctgtttcagcacgagtctctatgcttcagtgttttatagtatttactcctaattatgggaaagttcctttttaatccattatttttaactctttcctaatttaatcccgacgtaaagaatcttttgaagagcctgtaatggcactagaaaaatgcttactggagtcatggatgacagtgactgaaagcagcccagctggtgtccccgcgaccctccgtgtgactagagagaaacactgattcataggaagcaccggtgggcactggaaagcccgggttccccttgtcttccacttccaccactcagaagagttttctcgaaaactgaccaaatcatccagcaaaagatgcagcctcagactttcagcctagacactgatcccctcatctggttgaatgtgtcgaggtaactaagaatagcttggaccaagcagggcatgtttctaaagctgcaattgtggcaatgaccacaactcctgttatcgggccgtgcagttccgcacaatatccggcacagctgtgggctctggcagcagccagcctagcgctggcggcttaattaggctttttatctttacatttgtctgaggacatctgaaaccttcagtgtggcctgtcactaattaggtgactaattaaatagtcagtgcttccttgctgatctcagagctcaaccgcaatggacaggtttgtgattgtgactccccgtcctgtcggtctctgcacgtgtgcgcctcgcaattgccctgttcattgcgctgtgcaaaaacggcatgggagcgaggcccagggcatgtgcagggccgtcctccgatgtgcccaagcagcaggcagcacggacatccacaggggggcatatgggagatggacatccacagggcatacgggacatcagttctggtgcagaggctggtctggtggccagagcagaggggacggtggaaggagctttacctgccaggctcagagtctcagtctccccaggcagcaagagttgacattctgccaccagagaataaggatccagaactcaccctggtgtcactaatcacaatggggtttcctattcgactccaatatttaaatgtaattaatgttaaataaaagcaccttcatttactgaaa

SEQ ID NO: 12134 - DNA, 8432 bp, Homo sapiens; identical to SEQ ID NO: 12133

SEQ ID NO: 12135 - DNA, 3471 bp, Homo sapiens
gctttctcatccggccggcttgctttcccctgcggtcgtccagactattgggcgctagcgagacgaactattggtacggggctagagaggaaggctttgggattgccggggagcagcgagcgaccgacttccgtttccagttaccaaggcacgaggatccggtgttccaacccagggggaaaaatgcggcctttgactgaagaggagacccgtgtcatgtttgagaagatagcgaaatagtaggagcgcgcggggcggacgcgggagtgtgtgggtgtggtggccaagggtggagtgggggcgcggtgccggagaccggttcgttcgggcgcggtctccagtcctctttttgccctcagcattggggagaatcttcaactgctggtggaccggcccgatggcacctactgtttccgtctgcacaacgaccgggtgtactatgtgaggtgaggcggggccgggcaggcagcatggacccaggggagaggggtcctgggtcccacgagcctccttcatccgcaaccttgctccccctttacccttttagtgagaagattatgaagctggccgccaatatttccggggacaagctggtgtcgctggggacctgctttggaaaattcactaaaacccacaagtttcggttgcacgtcacagctctggattaccttgcaccttatgccaaggtttgtggggcggtttccaattctgccacgggcgatgaagtcaaggattaggcagattgtccggcagcttctctcccacagagtccctgacagtgtgcttggaggagtttcagcacatggagatgtgtagaggtcttgcagcttgagcatggtcagggctatgggataggaatgctatgtggctgcgtagggttagttttctccagcgaagtagaagagcctagggagacccagctagagatcagaaagcaaataagtggcagcaatgaagacaccggggtccagaaaaagagctgttaacctggccatggaggatgatccttgtagagttgagaaaataactttttctatttttttctttttctttcttgctctgttttttcttttcatttctctttctctttcttcctgacacagtttcactctgtcgcccaggctagagtgccgtggtgcgctctcactgcagcctccactttccagtttccagtgattcttgtgcctcagtagctgggattacaggcatgtgccaccacacctggctgatttttttgtgtgtttttagtagagacagtgtttcactgtgttggccaggctggtctcgaactcctggcctcaagtgatccacctgccttggcctcccaaagtgctgggattacaagcgtgagccactgcaccgggcaacttcctgcatttctgttcaggagatagacagtttgaggaaaacatgagtctctctgtttcccttaaaattatttcagaaaattattcacagatccagcagctagcttgtctgcatggatagaaatagtaacgtttttatgtctcttggattttaattctcttatagtataaagtttggataaagcctggtgcagagcagtccttcctgtatgggaaccatgtgttgaaatctggtctgggtcgaatcactgaaaatacttctcagtaccagggcgtggtggtgtactccatggcagacatccctttggtgagtagagatggtagctgttacagaactcaagtactcttattcaagaagggtatgtcttcaatctgagtgcttgagagaataaattctcagcacgttttgaatcccagaaagaccagaactgtattttttccgtctttgttatttccagccctcaatatgggcatattgaatgacttcagtgagttagtgtctcttcttttgaatcccagggttttggggtggcagcgcaaatctacacaagactgcagaaaagtagaccccatggcgattgtggtatttcatcaagcagacattggggaatatgtgcggcatgaagagacgttgacttaaaacgaagccattccaaggacagacggctgtatggaaaggccgagctttgtttcctgtgtttgtgtggactccaccatcatgttgaattttgtcaacactctggcctcttcagggacttcttatttactgtactctctatcactgacaaatgcaggctggattcttattatatacagagatggctcaaaaatggggtttcagatctttgtgacgaaatagaatactgtttcatatttgaatcagagggcttcttgttctgagaaataggttcaaaatcattggaaccaggaacaagaatagcttattgttatctgtgataacactgttttctaaacacaaggattttcttttttattaatatgcaacatagacattgccataacagaataataaaccacatgtggggttttaaaaatgaaatttggctaataggagcaattcagctatttttctatacagtaattggtgtgtggtatagaagaaaaacgggttcaaaccccacttctgccacctaccagctatatggccttgaatgagtcattcagctttaataaggttcattttcttctgtttaaaaagacacaaaacttgaaaatcagctttggccatctacctgagaattagaaagtctgatttttggaattagaaatcatgattgtaggctgggcacagtggctcgcgcctgtaatcccagcactttgggaggccaaggcggacggatcacttgaggttaggagtttgagaccagcctggccaacatggtgaaaccccatctctactaaaaaaaaaaaaaaaattaggtgtggtgacacatggctgtggtcctagttacttgggaggctgaggcaggagaatggcttgaactggggaagcagagcttgcagtgagccaagatggtgccattgcactccagcctgggcgtgacagagtgagactccatctgattgtaaagcatctagtacagtgtacagtgccttggaaatgataggtatggaataaatggtaattatttttatattatatatattatgtattcctgttattaagtgtagagttttatgagtataatttgattttattaccttcttttttacaagctgttttctcagtatttttcttggatgggatgacgctaggctggaaagtttttttcatcactatgattttataaaacaattttttctatgaacctttacttacttgactggattggactaaaagcactgatcagaggccacgacataaaaattcagtccctttgtccttccccgtgcctcccaaagttactttaagatccttagaatatttctttaaatattttatagacaaaaaatttaaagactatctgtattgcaaaattaaactatttctttaatgaatatattgcttattttaagttccaaaggtgaagtctttaagaataaaacattaccaactcctgcttttatatgtaagcaaacttga

SEQ ID NO: 12136 - DNA, 3470 bp, Homo sapiens
gctttctcatccggccggcttgctttcccctgcggtcgtccagactattgggcgctagcgagacgaactattggtacggggctagagaggaaggctttgggattgccggggagcagcgagcgaccgacttccgtttccagttaccaaggcacgaggatccggtgttccaacccagggggaaaaatgcggcctttgactgaagaggagacccgtgtcatgtttgagaagatagcgaaatagtaggagcgcgcggggcggacgcgggagtgtgtgggtgtggtggccaagggtggagtgggggcgcggtgccggagaccggttcgttcgggcgcggtctccagtcctctttttgccctcagcattggggagaatcttcaactgctggtggaccggcccgatggcacctactgtttccgtctgcacaacgaccgggtgtactatgtgaggtgaggcggggccgggcaggcagcatggacccaggggagaggggtcctgggtcccacgagcctccttcatccgcaaccttgctccccctttacccttttagtgagaagattatgaagctggccgccaatatttccggggacaagctggtgtcgctggggacctgctttggaaaattcactaaaacccacaagtttcggttgcacgtcacagctctggattaccttgcaccttatgccaaggtttgtggggcggtttccaattctgccacgggcgatgaagtcaaggattaggcagattgtccggcagcttctctcccacagagtccctgacagtgtgcttggaggagtttcagcacatggagatgtgtagaggtcttgcagcttgagcatggtcagggctatgggataggaatgctatgtggctgcgtagggttagttttctccagcgaagtagaagagcctagggagacccagctagagatcagaaagcaaataagtggcagcaatgaagacaccggggtccagaaaaagagctgttaacctggccatggaggatgatccttgtagagttgagaaaataactttttctatttttttctttttctttcttgctctgttttttcttttcatttctctttctctttcttcctgacacagtttcactctgtcgcccaggctagagtgcagtggtgcgatctcactgcagcctccactttccagtttccagtgattcttgtgcctcagtagctgggattacaggcatgtgccaccacacctggctgatttttttgtgtgtttttagtagagacagtgtttcactgtgttggccaggctggtctcgaactcctggcctcaagtgatccacctgccttggcctcccaaagtgctgggattacaagcgtgagccactgcaccgggcaacttcctgcatttctgttcaggagatagacagtttgaggaaaacatgagtctctctgtttcccttaaaattatttcagaaaattattcacagatccagcagctagcttgtctgcatggatagaaatagtaacgtttttatgtctcttggattttaattctcttatagtataaagtttggataaagcctggtgcagagcagtccttcctgtatgggaaccatgtgttgaaatctggtctgggtcgaatcactgaaaatacttctcagtaccagggcgtggtggtgtactccatggcagacatccctttggtgagtagagatggtagctgttacagaactcaagtactcttattcaagaagggtatgtcttcaatctgagtgcttgagagaataaattctcagcacgttttgaatcccagaaagaccagaactgtattttttccgtctttgttatttccagccctcaatatgggcatattgaatgacttcagtgagttagtgtctcttcttttgaatcccagggttttggggtggcagccaaatctacacaagactgcagaaaagtagaccccatggcgattgtggtatttcatcaagcagacattggggaatatgtgcggcatgaagagacgttgacttaaaacgaagccattccaaggacagacggctgtatggaaaggccgagctttgtttcctgtgtttgtgtggactccaccatcatgttgaattttgtcaacactctggcctcttcagggacttcttatttactgtactctctatcactgacaaatgcaggctggattcttattatatacagagatggctcaaaaatggggtttcagatctttgtgacgaaatagaatactgtttcatatttgaatcagagggcttcttgttctgagaaataggttcaaaatcattggaaccaggaacaagaatagcttattgttatctgtgataacactgttttctaaacacaaggattttcttttttattaatatgcaacatagacattgccataacagaataataaaccacatgtggggttttaaaaatgaaatttggctaataggagcaattcagctatttttctatacagtaattggtgtgtggtatagaagaaaaacgggttcaaaccccacttctgccacctaccagctatatggccttgaatgagtcattcagctttaataaggttcattttcttctgtttaaaaagacacaaaacttgaaaatcagctttggccatctacctgagaattagaaagtctgatttttggaattagaaatcatgattgtaggctgggcacagtggctcgcgcctgtaatcccagcactttgggaggccaaggcggacggatcacttgaggttaggagtttgagaccagcctggccaacatggtgaaaccccatctctactaaaaaaaaaaaaaaaattaggtgtggtgacacatggctgtggtcctagttacttgggaggctgaggcaggagaatggcttgaactggggaagcagagcttgcagtgagccaagatggtgccattgcactccagcctgggcgtgacagagtgagactccatctgattgtaaagcatctagtacagtgtacagtgccttggaaatgataggtatggaataaatggtaattatttttatattatatatattatgtattcctgttattaagtgtagagttttatgagtataatttgattttattaccttcttttttacaagctgttttctcagtatttttcttggatgggatgacgctaggctggaaagtttttttcatcactatgattttataaaacaattttttctatgaacctttacttacttgactggattggactaaaagcactgatcagaggccacgacataaaaattcagtccctttgtccttccccgtgcctcccaaagttactttaagatccttagaatatttctttaaatattttatagacaaaaaatttaaagactatctgtattgcaaaattaaactatttctttaatgaatatattgcttattttaagttccaaaggtgaagtctttaagaataaaacattaccaactcctgcttttatatgtaagcaaacttga

SEQ ID NO: 12137 - DNA, 3470 bp, Homo sapiens; identical to SEQ ID NO: 12136

SEQ ID NO: 12138 - DNA, 564 bp, Homo sapiens
aaaaagataaaaaaggaataacagtacctatctcgaaggctgttgtgaggtttaaatggattaataaagcgctcagcagagaacctggaacgtggtaaacgctttatgtgttagttatttctaccatcgtaaatgtcagcttttacagttataaaacccctttagcgccaggcgcgtcgcacctgcagctctgctggaagctgggcaaacggtcgagcaggcggccgagcgacgcctccacgtcgccaaacaggcggtggatgcgctcggtgcactcggcgccgcggatgaaggtcttgtagttagcgaaggccaagtcgcgcgtctgctgcagcagctgcgcccgctcctccgccaggcgctcgggctcgcgccgcagccgctccagccccgagccgctcaactcccggaggtagcggcccacatcgggccgctcgcgccactgggcctcggggaagcggtcccggaacagcgacgccaggagcccttcatcctccacctcgccgagagccgctgctgtggccgtggctaccgatgggatagtcgccgcggtcgccatcttcc

SEQ ID NO: 12139 - DNA, 4600 bp, Homo sapiens
gaactttttcactgttatgattttattgccattttgcttttttagatgtgtgcagcagactaaaacattaatgagataattgatttttgtcccataacattacaaagctgattcgactaagccccagaagaaaacagccagggtgctatagtcaccttagcttagcatcttggcttctttgtatctgtagttgttggaacattgaagagacgcttcaagaaatacagttgcaggatcccagaaagaataataacaaggctctgggctgtcgaccaccagttcacgtagttatagtttgattggataaggaaaaagtcagccattttcctcatccgggcaaagttgtagtatcgccacatgtgaaagatattgttctgcaccttttgtgtgccgtcctatgagagggacaattttaagggggattcttccaaacccccatctagcctcacctgagcgctcactagcactaacctatctcaagtcaaataatttacccatatgattttaagatgtacaatacaatgatagttgttaaatgttgtgtttgctatgtatgaaatatggtctggatttgagtttaaaatttttgtttttgttttatgagacagggtctcacttgtttgcccaggcaggagtacagtggcgcagtcacagctcactgcagcctcaaccttctgcgctcaagtgatcttcccacctcagcctccctagtagctgggactacaggcacatgccactacacccagctaatttttttttttttttattgtagagacagggttttgccatgttgcccaggctcatctcgaactactgggctcaagagatccacccacactggcctcccaaagtgttgggattatggtcatgagccactgccccggccttttgttttgtttttaaataatggaaaacttcagtactcaaactagagagctcttccagaggacctctagatttagatgtactcagcatgtcgttaccattccaggtgatgttttatgttctctgtatatggtagaagacaagggcctgtggactttttattaaaaggccagatggtaaatatttttggctttgcaggcccctgtgactgctgaactcttgccattgtagtacaaaagcagccacagacaatatgtaattgtcaaatgagcatggctgtgtttcaagaaaacttccatttacaaaaacaggcagtgagcttttgtgcatttaggagagactattaagaaagtgaaaagtggccgggtgcagtggctcatacctgtaatcccagcactttgggaggccgagacgggcggattacctgagatcaggagtttaagatcagcctggccaacatggtgaaacaccgtctctactaaaaatacaaaaattagccaggtgtggtggcacacgcctgtaatcccagctactcgggaggctgaggcaggagaactgcttgagcccgggaggcagaggttgcagggagctgagatcgtgccactgtactccagcctggccgacagcacaagactttgtctcaacaaaaaaaaaagaaaaaaagaaagtgaaaagtggccgggcacggtggctcgttcctgtaatcttagcactttgggaggccaaggtgggcagatcacctgaagtcaggagttcaagaccagcctggccaacatagtgataccccatctctactaaaaatacaaaaattagccaggcgtggtggcacccgcctgtaatcccagctacttgggagactgaagcataagaatcacttgaacccgggaggcggaggttgcagtgagccaaaattgtgccactgcattccagcctaggtgacaaagcgagactctgtctcaaaaaaatataaataaataaataaataaaaatacaaaagttagctgggcattgtggcacacgcctgtagtcccagctactcaggaggccgaggcaggagaatcgcttgaacctaggaggcaaaggttgcagtgagccaagatcacgccactgcactccagcctgggagacagaatgaaactccgtctcaaaaaagaaaaaagaaagtgaaaagacattgccagaatgggagaaaatatctgcaactcacatatcttaggagggatttgtatccagaatatataaacaaaattcaacaataaaaagacaattcaggcagggtgcggtggctcacgcctgtattcccagcactttgagaggctgagctggacagatcacaaggtcaggagttcaagaccagcctgaccaacatggtgaaacccccgtctctactaaaaatacaaaatgtaggtgggcgtggtggcacgtggctgtaatgccacctactcaggaggctgaggcaggtgaatcacttgaacccaggaggcaaaggttgcagtgagccgagatcacaccactgcactccagcctggacgacagactgactctctcaaaaaaaaaaaaaaaaaaaaaaaaaaaagtaaaatgggcaaaggattttcatttttatgagatagggtctcactgtcacagccttgacatcctgggttcaagcaattctacctaagcctcccgagtggctgggaccacaagtatgtgccaccacacccgggtcatttaaaaagttgttttgtttgtagagacagggtcttaccatgtttcccaggctagtctcaaactcctgggctcaagctatcctacctcagcctcacaaagtgctgggattacaggtgttgggccaactggcctggcctaaaatgggcaaaggactcgaacagacatttctccaaagaagagagatggccaatacgcacgtgaaaagatgctcaacattattaatcattagggaaatgcaactcaaaaccacaagataacatttcacacccactaggatgactgtaacaaaaaataagtgttgatgaggaagtagagaaattagaaccttcatacactgctagcaagagtttaaaatggtttagccactgtggtaaacagtctccagtaattccactttcaggtatacacagatgaaaacatgctaacacaaaaacttgcatgcaaatgtccatagccacgttatgatagccaagaggtggaaaaacctaaatatccatcatgtccattaactgatgaatggataaataaaatgtgtatccataaaagagagtattattcagccataaaaagaaaagtactgatacatgctacaacatggatgaacgttgagaacatgctaaattaaagaagccagtcttggctgggcgcggtggctcatacctgtaatcccagcactttgggaggccgaggcgggccaatcacctgaggtcaggaatttgagaccagcttggccaacatggtgaaaccctgtctctactaaaaatgcaaaaattagccgggcatggtgagaggtgcctgtaatcccagctacttgggaggaggagaatcacttgaaccctggaggcagaggttgcagtgagctgaggttgcgccattgcactccagcctggacaacgagcaaaactccgtctcaaaaaataataaaaataagccagtcacaaaatcccatgtactgtgtgattccatttaaataaagtgtatagaggccagccacagtggctcaaagtgctgattaatctcggcacagtagctcataatgctgagtaatctcagctcagtggctcaaagtgctgaatctgagcactttggcaagccgaggtgggaggattgcttgagcgcaggaggttgaggctgcagtgagctgtgatcaagccactgcacactgcagcctggacaagagtgagaccctgtctcaaaaattaagtatagaataggtaaatctatagagacagtagaacagtgataggcaggcctggggtaatagaatggagaatgactaatggggagtgggattttgagggtggggtgggtgataaacttccagaattagatgctgatagttgcacagccttgtgaatatactaaaaaaccactgacttacacacttttagatggtgtacggtgtatgaattatatctcaatttaaagaaaaacaggcaatgggccagatttggcctgtcagccatacatagtttgccaacccttggtataaaacgaagatggaatttcaagagcttcaagtcgtaatttattttgagacggtgtcttgctgtatcccagactggagtgtagtggcgtgatctcggcttactgcaacctctgcctcccagggttcaagcgattctcctgcctcagccttccgagtagctgggattacaggtgcgcaccaccacgcccagctaatttttgtatttttagtagagacagggtttcaccatgttggaaaggctggtttcgaactcctgacctcaggtgatccacccacctcggcctcccaaagtgctgggattacaggcgtgagccaccgtgcccagccaagtcataatttatgaagaaattcacatccccttgcctgtttggtttctacctaaatgaagtcatcttccctctgaagttaaaaatcagtttccacagatgtttctcttccacaaaacacttccttacctcaattgcatccagagtatcattcagttgttttctttccttctgtttgtgatcagtc

SEQ ID NO: 12140 - DNA, 8523 bp, Homo sapiens
gaactttttcactgttatgattttattgccattttgcttttttagatgtgtgcagcagactaaaacattaatgagataattgatttttgtcccataacattacaaagctgattcgactaagccccagaagaaaacagccagggtgctatagtcaccttagcttagcatcttggcttctttgtatctgtagttgttggaacattgaagagacgcttcaagaaatacagttgcaggatcccagaaagaataataacaaggctctgggctgtcgaccaccagttcacgtagttatagtttgattggataaggaaaaagtcagccattttcctcatccgggcaaagttgtagtatcgccacatgtgaaagatattgttctgcaccttttgtgtgccgtcctatgagagagacaattttaagggggattcttccaaacccccatctagcctcacctgagcgctcactagcactaacctatctcaagtcaaataatttacccatatgattttaagatgtacaatacaatgatagttgttaaatgttgtgtttgctatgtatgaaatatggtctggatttgagtttaaaatttttgtttttgttttatgagacagggtctcacttgtttgcccaggcaggagtacagtggcgcagtcacagctcactgcagcctcaaccttctgcgctcaagtgatcttcccacctcagcctccctagtagctgggactacaggcacatgccactacacccagctaatttttttttttttttattgtagagacagggttttgccatgttgcccaggctcatctcgaactactgggctcaagagatccacccacactggcctcccaaagtgttgggattatggtcatgagccactgccccggccttttgttttgtttttaaataatggaaaacttcagtactcaaactagagagctcttccagaggacctctagatttagatgtactcagcatgtcgttaccattccaggtgatgttttatgttctctgtatatggtagaagacaagggcctgtggactttttattaaaaggccagatggtaaatatttttggctttgcaggcccctgtgactgctgaactcttgccattgtagtacaaaagcagccacagacaatatgtaattgtcaaatgagcatggctgtgtttcaagaaaacttccatttacaaaaacaggcagtgagcttttgtgcatttaggagagactattaagaaagtgaaaagtggccgggtgcagtggctcatacctgtaatcccagcactttgggaggccgagacgggcggattacctgagatcaggagtttaagatcagcctggccaacatggtgaaacaccgtctctactaaaaatacaaaaattagccaggtgtggtggcacacgcctgtaatcccagctactcgggaggctgaggcaggagaactgcttgagcccgggaggcagaggttgcagggagctgagatcgtgccactgtactccagcctggccgacagcacaagactttgtctcaacaaaaaaaaaagaaaaaaagaaagtgaaaagtggccgggcacggtggctcgttcctgtaatcttagcactttgggaggccaaggtgggcagatcacctgaagtcaggagttcaagaccagcctggccaacatagtgataccccatctctactaaaaatacaaaaattagccaggcgtggtggcacccgcctgtaatcccagctacttgggagactgaagcataagaatcacttgaacccgggaggcggaggttgcagtgagccaaaattgtgccactgcattccagcctaggtgacaaagcgagactctgtctcaaaaaaatataaataaataaataaataaaaatacaaaagttagctgggcattgtggcacacgcctgtagtcccagctactcaggaggccgaggcaggagaatcgcttgaacctaggaggcaaaggttgcagtgagccaagatcacgccactgcactccagcctgggagacagaatgaaactccgtctcaaaaaagaaaaaagaaagtgaaaagacattgccagaatgggagaaaatatctgcaactcacatatcttaggagggatttgtatccagaatatataaacaaaattcaacaataaaaagacaattcaggcagggtgcggtggctcacgcctgtattcccagcactttgagaggctgagctggacagatcacaaggtcaggagttcaagaccagcctgaccaacatggtgaaacccccgtctctactaaaaatacaaaatgtaggtgggcgtggtggcacgtggctgtaatgccacctactcaggaggctgaggcaggtgaatcacttgaacccaggaggcaaaggttgcagtgagccgagatcacaccactgcactccagcctggacgacagactgactctctcaaaaaaaaaaaaaaaaaaaaaaaaaaaagtaaaatgggcaaaggattttcatttttttgagatagggtctcactgtcacagccttgacatcctgggttcaagcaattctacctaagcctcccgagtggctgggaccacaagtatgtgccaccacacccgggtcatttaaaaagttgttttgtttgtagagacagggtcttaccatgtttcccaggctagtctcaaactcctgggctcaagctatcctacctcagcctcacaaagtgctgggattacaggtgttgggccaactggcctggcctaaaatgggcaaaggactcgaacagacatttctccaaagaagagagatggccaatacgcacgtgaaaagatgctcaacattattaatcattagggaaatgcaactcaaaaccacaagataacatttcacacccactaggatgactgtaacaaaaaataagtgttgatgaggaagtagagaaattagaaccttcatacactgctagcaagagtttaaaatggtttagccactgtggtaaacagtctccagtaattccactttcaggtatacacagatgaaaacatgctaacacaaaaacttgcatgcaaatgtccatagccacgttatgatagccaagaggtggaaaaacctaaatatccatcatgtccattaactgatgaatggataaataaaatgtgtatccataaaagagagtattattcagccataaaaagaaaagtactgatacatgctacaacatggatgaacgttgagaacatgctaaattaaagaagccagtcttggctgggcgcggtggctcatacctgtaatcccagcactttgggaggccgaggcgggccaatcacctgaggtcaggaatttgagaccagcttggccaacatggtgaaaccctgtctctactaaaaatgcaaaaattagccgggcatggtgagaggtgcctgtaatcccagctacttgggaggaggagaatcacttgaaccctggaggcagaggttgcagtgagctgaggttgcgccattgcactccagcctggacaacgagcaaaactccgtctcaaaaaataataaaaataagccagtcacaaaatcccatgtactgtgtgattccatttaaataaagtgtatagaggccagccacagtggctcaaagtgctgattaatctcggcacagtagctcataatgctgagtaatctcagctcagtggctcaaagtgctgaatctgagcactttggcaagccgaggtgggaggattgcttgagcgcaggaggttgaggctgcagtgagctgtgatcaagccactgcacactgcagcctggacaagagtgagaccctgtctcaaaaattaagtatagaataggtaaatctatagagacagtagaacagtgataggcaggcctggggtaatagaatggagaatgactaatggggagtgggattttgagggtggggtgggtgataaacttccagaattagatgctgatagttgcacagccttgtgaatatactaaaaaaccactgacttacacacttttagatggtgtacggtgtatgaattatatctcaatttaaagaaaaacaggcaatgggccagatttggcctgtcagccatacatagtttgccaacccttggtataaaacgaagatggaatttcaagagcttcaagtcgtaatttattttgagacggtgtcttgctgtatcccagactggagtgtagtggcgtgatctcggcttactgcaacctctgcctcccagggttcaagcgattctcctgcctcagccttccgagtagctgggattacaggtgcgcaccaccacgcccagctaatttttgtatttttagtagagacagggtttcaccatgttggaaaggctggtttcgaactcctgacctcaggtgatccacccacctcggcctcccaaagtgctgggattacaggcgtgagccaccgtgcccagccaagtcataatttatgaagaaattcacatccccttgcctgtttggtttctacctaaatgaagtcatcttccctctgaagttaaaaatcagtttccacagatgtttctcttccacaaaacacttccttacctcaattgcatccagagtatcattcagttgttttctttccttctgtttgtgatcagtctcaggcccctcatagaagaccccaaagttgaggtacacttgcacagaaccgaagtgattatgctgattacttagacaaagctgataaaaacctgtaggaattcttagatcattaccaagtctttggtctcctcccctttgttaaggattccctggaggtatctgtcctctagttttggaattctactacaggaccttctttttacttagaaagtacaaagatcccgtttttgacatggaagacacggaccttatgttaaacttatactaaatattacttattatatttggccaaattttagtaactcgttctttccatactgggtagtggcaaacaatgttttctctttaacatataattcccacatcttgtattaaggaactcctgctcaacagattgagttgaagttaagagcatggtgtttgcctggtccttgtatacaattaaagctagggacaccatcttgaacttgaaattaggaaagacaaaaaaaaaaaatagatgcatagtgcatgaaagcagctctcctggagtgattgcctccaaggcggtgtgtacagtgactcatggtttggttatatctgttggggctggggttgcctccctttgtgtgtgcgggggggaggggggcgcggggtggggagcgggtgggaaggagcaaggtggagaggaccggtagaagatgggtggggtgggattagaaaggtgtggcagtgtttgaaagtcaaaatgattggaaggcactactggcatgtaggggccaaagatgttcaagatcttttttttttttagacgagtctcgctctgttgcccagaccggagtgcaatggcgcgctctcggcccactgcagtctctgcctccaggttcaagcaattctcttgcctcagcctcccaggtagctgggattacaggcgcctgccaccacacccagctaatttttgtatttttagtagagacggggtttcaccatattggtcaggctggtcgcaaactcctgacctcaggtgatccgcccaccttggcctcccaaagtgctgagattacaggtgtgagccaccacgcccagcctgttcaagatcttttaacactgatacacatgctgtgcttcatagtgaaggactgtctgatgcccctgttgagaaaatgtcttttttagtgcagctggctattaaagagggcagttaagacactgctgctctccaaagtgggacaggcttgacctggctggaggagtgctttgctgtggagtgtggatatctcacatggatatcatgcattttcttttgttctgaatctgcttttagtaactgactcaaatattctgatgactggaaagacatgcttccctgtaatccatttgttaattggaattctgtattataaatgggtctctgttttttggtcactttcccagaatctgattaactggagatgatgagataaaattgagcggctgaaccctagacttagaatgctcacctggagtgttgcccccaaatcgtcagtagactgccacttggcatccttggaggtcagcagcctccaggaacactggtttttggtgttaaaggctgaatttttttcctactgttaaaacatctctgtatacttcctcattatttctgtaatttcataggaccctatgattattataatagccatggtaatgaaaacagacctgtctcttgggtagagaagttaatctggccccgaacaccctgggaggtgtctatgagaaatccctgtgggttatgtgccgtggcagcaacatgccggtcatgtgacatccccactgtccgctgaacctgccaagacacattaaataggtagcagaacccctgctacatcacgaggaagccagctgagtggtaagattgacgtcccacggtcatcagcacagcggtctctgtctggggtgggactgcccaaccccctgctggggtttggagttgattggaggattctgaggtatcacagtgatggtgttaaggggaggcagcacagcattgctgaacgtctgcaatgtaagaaacagtacagcaggacaaagaactgcccagaatgccaacagcacccgtgtgaagaagacatgccttgctcggaacacacagctagtgtggatccactaaaatgtatgattctgggccgggcgcggtggctcacgcctgtaatcccagcactttgggaggccgaggtgggcagattacaaggtcaggagttcgagaccagcctggctaacatggtgaaaccctgtctctacttaaaaaatacaaaaattagcctggcatggtggcgtgcgcctataatcccagctactttggaggctgaggcaggagaattgcttgaacccgggaggcaggattgcagtgactcgagatcatgccactgcactccagcctgagcgacagagcaacactctgtcaaaaaaaaaaaaaaaaaagtacgattctggctgtagaattttttattttttttgagacggagtcttgctctgtcacccaggctggagtgcagtgatcttggctcactgcaacctccacctcccaggttcaagcgattctcctgcctcagccacccaagtagctgggattacaggcacatgccaccaagcccggctaatttttgtatttttagtagagatgcgttttcaccatattggccaaggtggtctcgaactcctgacctcaggtgatccgcctgcctcagcctcccaaagtgctgggatgacagatgtgagccaccgcacccggcctggctgtagagttcttgaatgaacttgcttggtggttgagctccccaatgatgtcccagatttgggcatttgctgcttggcagtgcacacctacaacaagcactccatggacacttgctcccaagctagatcttgattaggccaggccacagtgagcttagtagtggctgctgttctaatagaaattcagaggtaagaaaagtctctgataagtttatttaaaataaatgttgttacagtggagtaagatcaacaaagtctattactatgtaaacaaaaattagaaagttaaccgatttctaagataaagaacaaaggaaatgaacagcctctaactttcatactgagttcaccatccttggacagcatgatataagaccatagtatgggtaaaagtacttgacctttgaataagtaacttgaaaacacttaccgtcctaaaaaaaaaaaataggattaactggccgaatacaaaaaacttgacctagtgaatctctgacttgccagaattgctcctaaaggcagcagaacctttactcccccaccccataagctgaagcagccttctttgaaatctctggatcagtctccaaagcaccattatccaattttgttttaatatattaaaaatgtattctctcccctctcatccccaaatccgagtacatgtaatgattacctcttcagggagaggcaccccgtctgccccatggctttgagcatggcccctgatgtaagaagccaaaccatatgttttagctcctgttggtgattattcacccagctggagtttccctctaactgcaggtccatttcattaacaggtggggaatcacagcataataaagacaaccagaccttgttttggcctaaaacctgacccactttatgagtaaaggagaaaaaaaaaagccccccagtatggccagtcacccacatacctcgtaactgaaatagaagtatccagtctggtgggcaaattgccaaaagcattccgtgcctcctggaggtatcatgatggcaaagtcatatcgatcagctccacggaagagtggctggtccccagagccacttagaggttctgtcttctggctcctggcagacgtcactagattcagaacgaccagcccagccccaaagagcaaaggggacatgccgctttctggagcc

SEQ ID NO: 12141 - DNA, 6960 bp, Homo sapiens
attctaaaattggattcatatttactaaaaaacactgacttacacaaatggatgaattatttagtatgtgaattacacatcagtaaggcagtttacagaattttcattctcttacctaaagtctgtgctatctgagctggtggaaaaaggacttggagacagcgatttaaatacggaacaaggtcttccaggaagacagtgcagaactggacaaagagctcttgctccccgctgctgaaggcagcctcttcagcgcgatggaaggccaggattattttagttacctaagagacaagggcaccgtcaattactgggacagcctatcaccactgggacagcagtgcatgaaactaggcaaaaaaatgtatgcccctccagttttcctgaacaaagtaatttaacagtacattattttactgtctcatttaaactcagaattatggtcattgtccacaattgtgtcactttattaatgtgaagttcagacccaacttgttacattacgggtatagtttccggttccagtggaggagtgtcataaaactatagagagaatacatggttttggtttttttttttttttttttagagacaggattttgctctgtcacctaagctggagtgtagcggcacaatcagctcactgtagcttcaaactcctgggctcaagggatactcccaccttagcctcccaagtagctgggactacaggcgtgcaccatcacgtctggctaagttttaaaattttttgtagagacagggtcttgctttgttgcccaggctggtctggagcccctggcttcaagagatcctcctacctcagcctcccaaagtgttggcattacaggcgtgagccactgcgcccggcccaatacatggttcttaacttccacggaggaccaaccagaactgtgctggatccaggaaaatgaagcaaaactatacaagctttctactaagccccgaggtttcagaaagctagaaccactggaaaactgtaagaaaacagctaggaaagagaagtttcaaaaccaacagagcagcctagctgacactacagatatgtggcatagcgacagggtaagaacacagactctgatgctggacttcccaagttcaagtgactcacacctgtaatcccacactttgagggtctgtagcaggaggatcacttgagtccaggagtttgagaccagcctaggcaacatagggagacactatctctctgtaaaataaaacacttttaacaataaaaataaaagaatatgctaaaggtaaagggttttgtagatgtaattaaagtccctaatcatctgacttaatcaaatgaagtttttaaaaggaggtacctaaaagaagagactcaagagagtagctctcctgctggccttgaggaagcaaacagccatgttgtcagctgcctatggagtggacagcctctaggagctgaggcttcagttctgcaattgcaaagaactgacccctgccaacttgcatgagtctgaaatggagccccaacctccagatgaggccatagtccagccaacaccttgatggcaaccctgtaagaccctgagcagagaggacccggttgtgctgtgcctggactcctgacccaccaaaactggaaggtaataaatgtgttgctggaagctactaagtttgtggaaatttgttatgcagcactagaaagctaatacgtgtattaccgaattgttactataggcaaatcacttcatggactgtcctaggtcccatgaagggcaactggccagagcttctcaatcaggagaacctccaaaaccacactagacctctccatgtcagcagacaccgtcaaatagacgggtttattacaaaaatctggccacccattaccagagaaggcccagggtagcagaaaaccaacagaatgtgctcaccttggcaagggcatcttccaaggccccagtcacatcctgcgccagggccacagggcagcagaggcgcagatcattgaaggcaaccagaatattgttgagaaagcaggcgaggggtgggaaatctaggagcaccatgggtggctgcagcgtccccggctgggtggctggcacagcagcaggcatgttactggtgcccaggatggctggagccgagatgagcatgtaggagttcatttcttcctggaatttctccacggtgttcctgaattgctttctggaaagtgctgatggccacccgctggaaaacaggagccaactgaccccggaaatcagctcccacccggctgaaggacagcccaaagtacatgcactggcccagcagagagtccaggtggccgcctatgccccggtaaaggtcggtctccagcacctgcaggaattgtgagaccttctgtagcacccagccatggaagatggcactctcattcacagtgtgctcacccatggcagggggcagcagtgggtcctcgtctgagaagatggcacggtactgggtgatgatatcaaagagatggacacgggaggcctcgatggtttttgtaatatggaaatagggatcatcattaggaatggcagtcaggatggaccggagccaagcatctcgggcctgaagaaacttcaccctcaactcagcctcagtgaagacgtccatgcgccgcaggtagccaatgacacggaggcaggcaggaagctggatgttggtcctcagttgctggatcagctggctcagcatcagctgcatggactggcgcacttcgttcacgatgccctgacaatacacagagagagtcacactgcgctgggaaggatgctctctagaacccattcccctaactctgaagactgcagaccaacattcccatggctttcctgaaatgtgaagtaatttcctaaagctgatgcctgtaggttcaccaacaaagatcaggttagttaactctcttgcttaaaaagcttaaaacctggccaggtgcagtggctcaaacctgtaatcccagcaccgtgggcaggcaggtcacttgaggtcaggagtttgagaccaatctggccaacatgtgaaacctcgtctctactaaaaatataaaaatcaggtgggtgtggtggtgcaggcctgtaatcccggttactcgggaggcagaggcaggagaatcacttgaacccgggagataaaggttgcagtgagccaaggtcgcaccactgcactccagcctgggggacagagcgagactctgtctcaaaaaaaaaaaagaaaaaaaaaaaagcttaaaatcctccagtgacttcccactgcaatcaagaaaattccaaccacttgttgggacttacactggtggccctacctggctctccatcttcacctgcttcctagtgctctcccgctgctacaatccattaaccctggctgcctctgtatcccttaaacacctcaatttctgcccacttcagccctctctacttgttcttcacactttctggtttgctctctccccagatctttgtgggctggcacctccttctcatttaggtctcagcttaaatgttacctccctagaagagtccttcttgatcaccctacctaaagaaacctaccctagactcccttaccccattccctgtttttttcttcagacaccactatctgaaatgatatcatttctttgtcaattatcagacttcccattagcacgtaagctgcatgagagccaggaccactttattcacactgtatccccagcatatagagcagtgcttggcacatgattaatatgtattttgaataaatgaatgttttctgttcaggcatacctggctggcagaaactgatgtgaaacatgcaagagtttctacctaaagcttcagtcctgaccacagaataaatgattacaagaacattactttgagtcctctctgggcaaggtggctacctggatgacagggatggaagagtatttcctctccagtcggcgtacgtaggctgcaagctccagggcctcttcataataactgttccggacacaggtgtccatgagctgaggaatctccagtatttccaaaatttctgtgtgccggtttagggtcaggctattcatccggcggttggagctgatctcctcggcttccttcacaaagttcctagtaataatcagaagaatgttgatccttcactgctctgtacccaaaccttagctacagttaccaagtacctgctatgaacattgggctggatgatctatctgatttattcctcacaccccacctataaggtaagtattattacaattgaggaaatttttaatcccagagaggttaagcaacttgtccaaaaacatacaattaataaatctaacagatggagatccagatatgccacttgctggctgtggcaaggtacttggcctctctgaacctatttcctcattagtaaaacggtatatagggccaggcgcagtggctcacgcctgtaatcccagcactttgggaggctgaggtgggcggatcacttgaggccaggagttcaagtgaaaccccatctctactaaaaatacaaaaaattagccaggcatggtggtgcgcgcctgtagtcccagctactcaggaggctgaggcaggagaatcacttgaacccaggaggtggaggttgcggtgagcagagatggcgccactgcactgcagcctggccaacaaagcaagactccgtctcaaaaaaaaaaaaaaaaaaagtatataggaccctcctcataagggtgtaagaactaaatgagatgatgtgtgtgaagcatttaacatagaacttgaaacagagcgaatgcgtcaaagtaaaaatagtaaaagagacacagttaaatatttaacagtagctatcattattttcaaaatgaagcactaactgcctagaatccacaatctttcccctcaggtcttcatcttctcctatgctaatgttcaaccatagttcctgccacagtctactttcaacacttctccatatttgcagagacctgctttatcaagtcccctatctattctggagcatggaagggtacaaaagctgctgtcaaatatccaaaggctcaaaagaaaaattaaactttaatcatgaaaggctggaaggcagaactagggataatggagacagaatatgactcacaaaggacttttttttttttttttgagacggagtcttgctctgtcaccaggctggagtgcagtggcacgcatcatcttggctcactgcaacctccgcttctcaggttcaagtaattctcctgcctcagcctcccgagtagctgggactacaagcgcgtgccaccacgcccagctaattgtatttttagtagacatgggggtttcagcatgttagccaggatggcctcgatctcttgacctcgtgatccgcctgccttggcctctcaaagtgctgggattacaggtgtgagccaccgcacccagcctttttttctttttttaagagagtttcactttgtcacccagtctggaatgcagtggcacaatcacagcccaccgcagcctcgacctcccaaactggagtgcggtggcacaatcatggctcactgcagcctcaatctcccgggcccaactgacccccccacctcaacctcctgtgtacctgggactacaggcgcacgccaccacgaccagctaattttttattttatagagacagggttttgccatgttggccaggctgctctcgaactcctgggttcaagcctcaggctcccaaagtgctgggattacaggctgagccaccacatccagccatccaaatggagagactttttgatatctgatgccctcaaatgcgaggatttccttgtcaccttcccgtcaatggaagttttgaagcagatgacctccggtccacgctttcgtataaaataagtatataaatgtgcacatatattcagctcacacctataatgttaactgtgtcagacccgataataagagctttgcatgaatcctttttctttgtgcccacaactgcccttcgagggagggacgtgcttctgggtaaccagttctgaattcgaaacctcctagctgtgtccttggacgtcactaatctctgtcttgacttgctcatatgtaaaatggaaataacagggctgggcgcagtggattatgcctgtaatcccagcgctttgggaggccgaggcggacagatcacgacatcaaaagatcgagaccatcccagccaacatgctgaaaccccgtctctactaaaaatccaaaaaaattagctgggcgtggtggcgcgcgcctatggtccctgctactcaggaggctgaggcaggagaatcgcttgaacccaggaggcagaggtaggttgcagcgagccgagatctcgccactgcactccagcctggcgacagggcgagactccgtctcaaaaaagataaaaaaggaataacagtacctatctcgaaggctgttgtgaggtttaaatggattaataaagcgctcagcagagaacctggaacgtggtaaacgctttatgtgttagttatttctaccatcgtaaatgtcagcttttacagttataaaacccctttagcgccaggcgcgtcgcacctgcagctctgctggaagctgggcaaacggtcgagcaggcggccgagcgacgcctccacgtcgccaaacaggcggtggatgcgctcggtgcactcggcgccgcggatgaaggtcttgtagttagcgaaggccaagtcgcgcgtctgctgcagcagctgcgcccgctcctccgccaggcgctcgggctcgcgccgcagccgctccagccccgagccgctcaactcccggaggtagcggcccacatcgggccgctcgcgccactgggcctcggggaagcggtcccggaacagcgacgccaggagcccttcatcctccacctcgccgagagccgctgctgtggccgtggctaccgatgggatagtcgccgcggtcgccatcttcc

SEQ ID NO: 12142 - DNA, 10940 bp, Homo sapiens
gccagtcacatgcttacctgcatttttaaagacagctttcaggtatttggggactacattattaccaaaccttggctttgggagattatacaggtccgaggaactcgtgtctactgcagacgaatgcaattaccccaccttcctccatacagaattgttaggaaatgtccactcctttgggggtgatttttctcctcaagttgtagccaacattttgtccgtaactgatttcagggcaaacatttctgacatcttcctccagctcagtctgccatgccttggcaatccagtttcctgtcatatgcgagccatccaagttgatgccaagtaagatttgcccagctcaaagtgaaagtgtttgcgtcttggtatccggaatcctcagccccagtagcaaagctttagtcattcaccttcatccaatagacgtttgtgaacgtcctgctgtccattttgtcaataaacaggcagccctgcaggtggtccatctcgtgctggatgatgcgggctgcccacccgctcgcctgccacaccacctgttctccattggggtccagccctgcaaaggaagttacagccctggtgagtgggaacagctgaactgcatcatcctcaacctccctacccctgcccccggtcctggctgttcccattgacaagaggcaacagcagatggcaaatgtagacagcagctcctcttctaactggaaaacgtccctcatctcggtccattaccaagcgttcaacctggttcccaactctggtaattaggttatcgagctcactgtagagctgagatgagaaatcatctttctacggtgcgacccttccgaacactcctcccacttctgaggtacctgtgggctcccaactcctaacagaggttctgcagcttgagaccccacttgtttttctgaccatcttgaaccgacgggcttgctgtgcaggaacaatcaccccgaccccagcagagcccgcattccgcgaggcatcctgtggtaccacgggggaatggcctagccccctgggctgggtcaggctggcgggggctaacccccacttctccaactccaccgtggcggatctaactggggccgaagagcgtgtttgcctcagagagcaagggagcagaaagcagacgccaggctgtcaggtaacagcggaactaggggacctctcctcgcccctgcgtcctatctgagcgggctctaccccacaggagcttctatccgtcctgaggcctctccgctcccgcatcccacttcgctcctgcgggaggtccggcgtatgaaccgcgaccacttctgcgctctcgcggagtcgggcagaagagacgcgcgcgctgctccagcagccccggtccccgccgcccgcacctgagatctgcaccgcctggaagcggggcacgcaggccaggaagccggcgacgctctcgcagccctcgggaaaggtgaccaggcggctgtcaagcactcgcaggctggggttcacgaacacgcgcagggggaagggctccatttggcggagcgcgcgctggcggggcgggcactcccgacacagcgcctcggggagctccagcgccagcacctgccgcggcacccccagctgcggcgcgcttaggcccacgcagcgccgccgccgcatcacctggaccagccgttgcgtcagccgctgcagctcgggcccgcctagctgcgcccgctccaccggggccgccacgccgcgcagcaccgggtccccgacttggcacacgtgcgagaacggcggttcgggaggacccagcaccagacgcctcaggtggcgccaataggagcgccgcagcgccgggccctcgacgccgtccggggcggccgtggagctgcaagcccggacaccgacggctgccgccccgccccacggcacggccgcccacagtggccaaagactcagcgcgccccacagccgggccatggcggcccccttaacagtgacccggcccgccccttccggccgcagcgcggggcacgccgggaagcgccgtcggccagcacacagcgaagccgcgactggatccccgccttcctgcttagactggcagtgagcaccgcccccttccgctctcctcccgggagcgccttcccgcctcccgaacccgccccggaccttccagggcgaggcagtcctggccaccccgcgccgggaacctcacgcaccgcgttctggaggcaggggacgccggctagggccccacgctgggcggttcggcctgcgtctccgctcgccctccctccgggcaggctgggcccgcgggctccaggcgtggctcctcggcgggaggctctggtgctggagctgtgagctcgggccccagcgcctggtcatccagggtgaaaagcgtctctctctttggcaggataaaggcgaggggctcctgaatggcgccgatgttcacatgccctaggttaccgtacttggagagctgagtgggaggaatgcctaacccagacgtggggaaagcaaaatggaaaacagttactaataaaactcaatatagaaattttaagggaggcgggcgcggtggctcacgcctgtaatcccagcactttgggaggccggggaggggggggcggatcacctgaggtcaggaattcgagaccagcctgacccacacggagaaatcccatctctcttaaaaatacaacattagccgggctttggtggcgcaggcctgtaatcccagctacttgggaaggctaaggcaggagaatcgcttgaacctaggaggtggagattgcagttagccgagatcgcgccattgcactccagcctgggccacaagagcaaaactccgtctcaaaaaaaaaaaaaaaaaaaaaaaaggaaatttaagggaaaaaaaacgagccattactatttttttttttgagacagtctcgctctgtcgccccaggctggagtgcagtggcgtgattgctgctcactgcaacctctgcctcccaggttcaaacagttctcatgcctcagcctccgtggtagctgggattacaggcgccccggccaccatgccaggctaatttttgtatttttagtagagacggagttactatgttggccaggctggtctcaaactcccaacctcaggtgatccatccgcctcggcctcccaaagtgctgggattacaggcatgagccactgcgcccagccatcaattactatgttttaatacagcaaaaaccacctttgttacagggaatgggaagctatactgtgaagcagaacgtaacggaacagcagtgtagggtgcctgcagcaggaacccagacctcaggcagcaccagggaaaaagcagagggcagccaggctttgcacgtgtgatgcactgacccattgccctttgggaagctgtgcctcaaccaagcccctctcctaccacaaagggacaaggacgtgaaagtgaattggaaaaaagactttaggacgggcgtggtggctcacgcctgtatccgagcactttgggaggccgaggtgggcggatcacaggtcaagagatagagaccatcctggccaacatggtgaaaccccgtctctactaaaacacaaaaattagctgggcgtggtggtgcgagtctgtagtcccagctactcgggaggctgaggcaggagaattgcttgaacccgggaggtggaggttgcagtgagccaagactgtgccactgcactccagcctggcaacacagcgagactccgcctcaaaaaaaaaaaagactgtaaaaaccatttctctagatatttcacataaatggaatcatacgtatgtagttcttttgtgactggcttcttccgcttagccagatacagccacataatgtatgattccatttttatgaaatgtccagaagaggcaaatctatggcaacagaaagtaggttgccagggactaaggatgctgtcgaggaatgactacaaacgtgcatgaaggatctttttggagtgatggaaatattctaaaattggattcatatttactaaaaaacactgacttacacaaatggatgaattatttagtatgtgaattacacatcagtaaggcagtttacagaattttcattctcttacctaaagtctgtgctatctgagctggtggaaaaaggacttggagacagcgatttaaatacggaacaaggtcttccaggaagacagtgcagaactggacaaagagctcttgctccccgctgctgaaggcagcctcttcagcgcgatggaaggccaggattattttagttacctaagagacaagggcaccgtcaattactgggacagcctatcaccactgggacagcagtgcatgaaactaggcaaaaaaatgtatgcccctccagttttcctgaacaaagtaatttaacagtacattattttactgtctcatttaaactcagaattatggtcattgtccacaattgtgtcactttattaatgtgaagttcagacccaacttgttacattacgggtatagtttccggttccagtggaggagtgtcataaaactatagagagaatacatggttttggtttttttttttttttttttagagacaggattttgctctgtcacctaagctggagtgtagcggcacaatcagctcactgtagcttcaaactcctgggctcaagggatactcccaccttagcctcccaagtagctgggactacaggcgtgcaccatcacgtctggctaagttttaaaattttttgtagagacagggtcttgctttgttgcccaggctggtctggagcccctggcttcaagagatcctcctacctcagcctcccaaagtgttggcattacaggcgtgagccactgcgcccggcccaatacatggttcttaacttccacggaggaccaaccagaactgtgctggatccaggaaaatgaagcaaaactatacaagctttctactaagccccgaggtttcagaaagctagaaccactggaaaactgtaagaaaacagctaggaaagagaagtttcaaaaccaacagagcagcctagctgacactacagatatgtggcatagcgacagggtaagaacacagactctgatgctggacttcccaagttcaagtgactcacacctgtaatcccacactttgagggtctgtagcaggaggatcacttgagtccaggagtttgagaccagcctaggcaacatagggagacactatctctctgtaaaataaaacacttttaacaataaaaataaaagaatatgctaaaggtaaagggttttgtagatgtaattaaagtccctaatcatctgacttaatcaaatgaagtttttaaaaggaggtacctaaaagaagagactcaagagagtagctctcctgctggccttgaggaagcaaacagccatgttgtcagctgcctatggagtggacagcctctaggagctgaggcttcagttctgcaattgcaaagaactgacccctgccaacttgcatgagtctgaaatggagccccaacctccagatgaggccatagtccagccaacaccttgatggcaaccctgtaagaccctgagcagagaggacccggttgtgctgtgcctggactcctgacccaccaaaactggaaggtaataaatgtgttgctggaagctactaagtttgtggaaatttgttatgcagcactagaaagctaatacgtgtattaccgaattgttactataggcaaatcacttcatggactgtcctaggtcccatgaagggcaactggccagagcttctcaatcaggagaacctccaaaaccacactagacctctccatgtcagcagacaccgtcaaatagacgggtttattacaaaaatctggccacccattaccagagaaggcccagggtagcagaaaaccaacagaatgtgctcaccttggcaagggcatcttccaaggccccagtcacatcctgcgccagggccacagggcagcagaggcgcagatcattgaaggcaaccagaatattgttgagaaagcaggcgaggggtgggaaatctaggagcaccatgggtggctgcagcgtccccggctgggtggctggcacagcagcaggcatgttactggtgcccaggatggctggagccgagatgagcatgtaggagttcatttcttcctggaatttctccactgtttcctgaattgctttctggaaagtgctgatggccacccgctggaaaacaggagccaactgaccccggaaatcagctcccacccggctgaaggacagcccaaagtacatgcactggcccagcagagagtccaggtggccgcctatgccccggtaaaggtcggtctccagcacctgcaggaattgtgagaccttctgtagcacccagccatggaagatggcactctcattcacagtgtgctcacccatggcagggggcagcagtgggtcctcgtctgagaagatggcacggtactgggtgatgatatcaaagagatggacacgggaggcctcgatggtttttgtaatatggaaatagggatcatcattaggaatggcagtcaggatggaccggagccaagcatctcgggcctgaagaaacttcaccctcaactcagcctcagtgaagacgtccatgcgccgcaggtagccaatgacacggaggcaggcaggaagctggatgttggtcctcagttgctggatcagctggctcagcatcagctgcatggactggcgcacttcgttcacgatgccctgacaatacacagagagagtcacactgcgctgggaaggatgctctctagaacccattcccctaactctgaagactgcagaccaacattcccatggctttcctgaaatgtgaagtaatttcctaaagctgatgcctgtaggttcaccaacaaagatcaggttagttaactctcttgcttaaaaagcttaaaacctggccaggtgcagtggctcaaacctgtaatcccagcaccgtgggcaggcaggtcacttgaggtcaggagtttgagaccaatctggccaacatgtgaaacctcgtctctactaaaaatataaaaatcaggtgggtgtggtggtgcaggcctgtaatcccggttactcgggaggcagaggcaggagaatcacttgaacccgggagataaaggttgcagtgagccaaggtcgcaccactgcactccagcctgggggacagagcgagactctgtctcaaaaaaaaaaaagaaaaaaaaaaaagcttaaaatcctccagtgacttcccactgcaatcaagaaaattccaaccacttgttgggacttacactggtggccctacctggctctccatcttcacctgcttcctagtgctctcccgctgctacaatccattaaccctggctgcctctgtatcccttaaacacctcaatttctgcccacttcagccctctctacttgttcttcacactttctggtttgctctctccccagatctttgtgggctggcacctccttctcatttaggtctcagcttaaatgttacctccctagaagagtccttcttgatcaccctacctaaagaaacctaccctagactcccttaccccattccctgtttttttcttcagacaccactatctgaaatgatatcatttctttgtcaattatcagacttcccattagcacgtaagctgcatgagagccaggaccactttattcacactgtatccccagcatatagagcagtgcttggcacatgattaatatgtattttgaataaatgaatgttttctgttcaggcatacctggctggcagaaactgatgtgaaacatgcaagagtttctacctaaagcttcagtcctgaccacagaataaatgattacaagaacattactttgagtcctctctgggcaaggtggctacctggatgacagggatggaagagtatttcctctccagtcggcgtacgtaggctgcaagctccagggcctcttcataataactgttccggacacaggtgtccatgagctgaggaatctccagtatttccaaaatttctgtgtgccggtttagggtcaggctattcatccggcggttggagctgatctcctcggcttccttcacaaagttcctagtaataatcagaagaatgttgatccttcactgctctgtacccaaaccttagctacagttaccaagtacctgctatgaacattgggctggatgatctatctgatttattcctcacaccccacctataaggtaagtattattacaattgaggaaatttttaatcccagagaggttaagcaacttgtccaaaaacatacaattaataaatctaacagatggagatccagatatgccacttgctggctgtggcaaggtacttggcctctctgaacctatttcctcattagtaaaacggtatatagggccaggcgcagtggctcacgcctgtaatcccagcactttgggaggctgaggtgggcggatcacttgaggccaggagttcaagtgaaaccccatctctactaaaaatacaaaaaattagccaggcatggtggtgcgcgcctgtagtcccagctactcaggaggctgaggcaggagaatcacttgaacccaggaggtggaggttgcggtgagcagagatggcgccactgcactgcagcctggccaacaaagcaagactccgtctcaaaaaaaaaaaaaaaaaaagtatataggaccctcctcataagggtgtaagaactaaatgagatgatgtgtgtgaagcatttaacatagaacttgaaacagagcgaatgcgtcaaagtaaaaatagtaaaagagacacagttaaatatttaacagtagctatcattattttcaaaatgaagcactaactgcctagaatccacaatctttcccctcaggtcttcatcttctcctatgctaatgttcaaccatagttcctgccacagtctactttcaacacttctccatatttgcagagacctgctttatcaagtcccctatctattctggagcatggaagggtacaaaagctgctgtcaaatatccaaaggctcaaaagaaaaattaaactttaatcatgaaaggctggaaggcagaactagggataatggagacagaatatgactcacaaaggacttttttttttttttttgagacggagtcttgctctgtcaccaggctggagtgcagtggcacgcatcatcttggctcactgcaacctccgcttctcaggttcaagtaattctcctgcctcagcctcccgagtagctgggactacaagcgcgtgccaccacgcccagctaattgtatttttagtagacatgggggtttcagcatgttagccaggatggcctcgatctcttgacctcgtgatccgcctgccttggcctctcaaagtgctgggattacaggtgtgagccaccgcacccagcctttttttctttttttaagagagtttcactttgtcacccagtctggaatgcagtggcacaatcacagcccaccgcagcctcgacctcccaaactggagtgcggtggcacaatcatggctcactgcagcctcaatctcccgggcccaactgacccccccacctcaacctcctgtgtacctgggactacaggcgcacgccaccacgaccagctaattttttattttatagagacagggttttgccatgttggccaggctgctctcgaactcctgggttcaagcctcaggctcccaaagtgctgggattacaggctgagccaccacatccagccatccaaatggagagactttttgatatctgatgccctcaaatgcgaggatttccttgtcaccttcccgtcaatggaagttttgaagcagatgacctccggtccacgctttcgtataaaataagtatataaatgtgcacatatattcagctcacacctataatgttaactgtgtcagacccgataataagagctttgcatgaatcctttttctttgtgcccacaactgcccttcgagggagggacgtgcttctgggtaaccagttctgaattcgaaacctcctagctgtgtccttggacgtcactaatctctgtcttgacttgctcatatgtaaaatggaaataacagggctgggcgcagtggattatgcctgtaatcccagcgctttgggaggccgaggcggacagatcacgacatcaaaagatcgagaccatcccagccaacatgctgaaaccccgtctctactaaaaatccaaaaaaattagctgggcgtggtggcgcgcgcctatggtccctgctactcaggaggctgaggcaggagaatcgcttgaacccaggaggcagaggtaggttgcagcgagccgagatctcgccactgcactccagcctggcgacagggcgagactccgtctcaaaaaagataaaaaaggaataacagtacctatctcgaaggctgttgtgaggtttaaatggattaataaagcgctcagcagagaacctggaacgtggtaaacgctttatgtgttagttatttctaccatcgtaaatgtcagcttttacagttataaaacccctttagcgccaggcgcgtcgcacctgcagctctgctggaagctgggcaaacggtcgagcaggcggccgagcgacgcctccacgtcgccaaacaggcggtggatgcgctcggtgcactcggcgccgcggatgaaggtcttgtagttagcgaaggccaagtcgcgcgtctgctgcagcagctgcgcccgctcctccgccaggcgctcgggctcgcgccgcagccgctccagccccgagccgctcaactcccggaggtagcggcccacatcgggccgctcgcgccactgggcctcggggaagcggtcccggaacagcgacgccaggagcccttcatcctccacctcgccgagagccgctgctgtggccgtggctaccgatgggatagtcgccgcggtcgccatcttcc

SEQ ID NO: 12143 - DNA, 397 bp, Homo sapiens
gaactttttcactgttatgattttattgccattttgcttttttagatgtgtgcagcagactaaaacattaatgagataattgatttttgtcccataacattacaaagctgattcgactaagccccagaagaaaacagccagggtgctatagtcaccttagcttagcatcttggcttctttgtatctgtagttgttggaacattgaagagacgcttcaagaaatacagttgcaggatcccagaaagaataataacaaggctctgggctgtcgaccaccagttcacgtagttatagtttgattggataaggaaaaagtcagccattttcctcatccgggcaaagttgtagtatcgccacatgtgaaagatattgttctgcaccttttgtgtgccgtcct

SEQ ID NO: 12144 - DNA, 3738 bp, Homo sapiens
gaagtgagaggtgacaacgtgctggcagccctcgctcactctcagcgccttctctgcctcggcgtccggtctggccatgcttgaggagcccttcagccctccactgcgctgtgggggcccctctctgggctggccgaggccggagccggctccctctgcttgcagggaggtgtggagggagaggccaggcgggaactggggctgcgcacagcgatggcaggccagcatgtgttccgagtgggagtgggctcagtggcactcggagcagctggccagcgtggctgggccctggcagtgaggggcttagcacccgggccagcagctgcggagggggcgccgggtaccccagcactgccggcctgcctgccccacgctcgaattctcgcagcgcctcagccgcctccccgccgggcagggctagggacctgcagcccgccttgcctgagtccacccgcggtgggctcccagcggccaagcctccctgacgagagccgcccctgctccgcagcaccaggtcccattgaccacccaaggactgaggagtgcaggcgctcggcacaggacttggcaggcagctccatccgctatctcaagggaaaaaaaattaaatagccaaatccccaaacaagttaattttagctaggattaaggaggtcctctctgctttaatctttacaaggaaagcaactgaaaagaacaatccacattctgttctctgtttctgctttccccagcccttattctttctataaagccaacctcctctgcttagctctatggaacactcattctattttaaagaatgaggtgttgtccgattataaatcacaaaagctaattaagatgtttaactaaatttgatataattttttttttgtcttttgacagcccttcctctgacgtgcacaggatatgaaaatgtctgatagtgttgtggctgcagtgagacctgggagtggcagtttctttcactgcagttgtctgtccaaagcgaagtgaactagcaagtctcttacaaaagggcaagctctgaactgcgcacagtgtgagcacagacacagtggggctaatctacaggggcagtgttagcagcaatgggttgtccaagatttctgagaggattagcacctagaaaataatcttattttgctttgtggtgtcagacaaaggaactgaatgagaaaattattgaagggcatattgtagctgatatgcagatccaaggctgactttcttcctctcccttgaatccacttatcacaaaaatatggaatgagcagaacttatgggcataaccataaaccaattttcctttgtttcctactgtctctttaaagttttctcagtgggagaaatcttctgtgtccttggatgaagacttactcagtaaattactttatgatcactgataggtaataaaagatcctatggtcatttaaaaataaaccatagaattttaattcagaaattattatcctagttccatataataatctagactccaaacttgatttaaaggtaaattttctctaccttcctaagttagagcttcctgcagtctttcccttctatctctcctcctgcctactaacctgttttctgacctgttacattttatttgccctgataaattgggtgaacagggtgattactaagcagctgcttcaacttgtcagaggacagttgaccagcctgggtctcaccctttgtattccctgtcatacctcaatccactttgtttctcccattgtagatggtacttatgctattggagtccccctgacgttctctctcttgacttgagatgaagggaatacaccttatacattgcacctctacttccatcccactagcagctttctacaaataagtcttgtctaaataagtttcctctgatgccccacaacccaattcttttttattctcaaggtcaatgaggggtatagtgaaacctgacacataactggtttttggttattttcttggaaaatttttcatttttgtttaacacctcacttgagtacctggctaatcaaaatgtgggcccgggatgggcagcattggcatcacctgggagcttgttagaaaagctcaggccccagcccagacctacaaaatcaaaatctgcattttagggagctctccaggtgattcgcatgcacattacattttgagaagccctgcttttgaagtcctttcaactgtttcttggtgtctcaatcttcctatttactttcctgttacacatttagagtccaatgtcctaatgtagctttgtgggttctattttcagaaaggaggagtgccagtgtctgtcctttgcaattgcagatctcaaactatttataaacctattaataacttaaatgtctttttactgaattcaaatgttctattgtcacatcaagttcagtatatcctacgtcaaatccagcattttcccccaaatccgacacctattctaactccttttacccattctttgatatctaataatggacagtcttctccaagactatttccttgaccactgaagcacagggtgatcactcaactcttgtaccgtgccagcctttagcacttatgacagcctcttttttatttatgtttatactggcttgaactaacatttaatttttcattcattcagcatttcttgggcactttctatgttccaaccaatgtttaaacagctgttaaagaacaaaacaaattagtcttctgtcctcttgaaagttacattttcagggggagaaagatacaaaaaatagataaatatgtaatttcataccacaatgacggctttcaaattgataatgtcaggctcaacctctccttttaattgtaattcatgtaaccagtgtctgctcaatatctttacttaaatatctagtatgcacctcaaacttactgtatccaaaaccgaattcttgattttcacttcaacaccctcttttcctaatgctctccatctcaatgtacaacatcaccatctccacaaaaatcctctttctttcataccccacttttaatccatcagaaaatccctataattctactttcaaaacatacccaaattattgctacttctctccacttcctctgcaacagctctgtggaggtctccaatgtctcctctggactgctataccagccacctgacagccatcctgcctccctcatccctctactacagtacgtactctaccagtactctgagccatctttcacagagttagtttgagcattccctagctcaaaactctcccattgcttcctgttgcactgagaattaaatctaaagacttcacagagtccctcaaggccctacagactcttggtccccatgctgcccctctgactcacctcctccctaccactcttgccttcctttctcatccccgtcactttggcccacttgatgttctttgaacacacacatctggctatctccccaagtctttgcaattgcttaaaccactcttcccagatacccagaagacttgctttctcattttcttaaattatctctgtattcaaatatcaccccctcaagaggtctatcctgactttctctctcaccttctccttttctttatgatatttagccataattcgccccccatacacatgcatttgtttattcatctgttggtttattgtctgtctcctcactaaaatgtaattactccaaaatgtaatttccacaatagcaataaatttatctttttattttaa

SEQ ID NO: 12145 - DNA, 309 bp, Homo sapiens
tttgtgttttttttgtttttgttttttgagacggagtctcgctctgttgcccaggctggagtgcagtggcgcgatttcagctcactgcaacctccacctcctgggttcaagcgattctcctacctcagcctcccgagtagctgggactacaagtgcccaccaccactcccggctaatttctttttgtatttttaggagaggcggggtttcaccgtgttagccaggatggtctcgatctcctgacctcgtgatccacccgcctcggcctcccaaagtgctgggattacaggcgtgagccacggtgcctgg

SEQ ID NO: 12146 - DNA, 1361 bp, Homo sapiens
ccgtcggactgcggccgcccttggctcaactgggtcgccgaccttgttgaggggcgaccactgcggggagaccgagagcctgcggctggcgtttgaggcggatggcagtgccctgagcgcggcggctgggtctcggtgacactgacgacgggaggcgcggtcggaagagcgcggggccgtcgcctctggcttaacatagcagatgcgctgagactccaacaggtggctccgtggcgcaatggatagcgcattggacttctagaggctgaaggcattcaaaggttccgggttcgagtcccggcggagtcgtaacgcttttttccctcccccctacaatttattttctgcctccatcatgtctcttattttttttttttgctaaacggtttaacttctctctcattccctgctctcgcagttcactgcattcggttcttgcggtcctttcttaagcggctcgcagggtcccgagcccctcagctccccgggcctcggtggcccagggcccagctcagccgactgggcagtcgatgtaggtcctgagaagagcggcggcggcggcggcggcggcggcgaaggaaaagcgacactgaagcgaaggctcgcggtttcggcctaaaggaaagtgcaggggaggcccgggtctcgggtgacacccccacgccttgagcgggactgtggttgcgagggagggacgagaaaacacgcctacgccctgcgtgcgctgtgctgactacctctccagcatggaggcttccagatgagcagacacccgaatcccagcgggagcccgtcaaaaatggagatttctgccgtcactctgggactcttaattcggtccgtctggggtggggcccaggaatctgcatttctgataaggtcacccgctcccctcccccattattccagtgcaaagaggtcctaggcccagtgcccatcagctcctcaagacaggaattactatatctttttctgacaactgttaactttgtacaaggttagcaaataaatccaggaatgaatggaatcttaaaactcgtaaaacaacaatgaaaggtaattcacacaaaagatacaaaatccaaaattgtcaaaaaagatacagggaaaagtaaacatccatgttattcctatagtccagccttgcaattctctccacaagccattagtggtaatggtttcttggaaatattttcagatttattttatgcccatatcagcatttttaacatcttttgtcataaatatgtcgtaaataacaatgttattgatacatatccttttaaaaacacaatggtagtatgctatactggcttgttttacttatgaatatatgtagagctgcctcgttccattgtacg

SEQ ID NO: 12147 - DNA, 372 bp, Homo sapiens
aaaagacagctgggcctgcgggaccactaccaccaagatgcggagaccagtagtggcccgaaatgccaggctgcgctgatatttattggatacaagacaaagggacagggtaaggagtgtgagccatctccaatgataggtaaggtcacatgggtcacgtgtccactggacagggggcccttccctgcctggaagccgaggcagagagagagggagagaggagacagcttgtgccattatttctgcatatcagagacttttagtactctcagtaatttgctactgctatctaaaaggcagagtcaggtgtacaggatggaacatgaaagcagactaggagcgtgaccagtgaagcacagcatcacagggaga

SEQ ID NO: 12148 - DNA, 403 bp, Homo sapiens
ctgactcagaagtctggtgtgttctgtcagcattcatgaaaccgtgaaagctaacgtgttagtttgcaaacataacaaaatatgattcatcacagttctccacgctcactagctgggcgtccctacacgagttttttaacctctcttagctgcagtttcccttctttatattataaaggggacggtggtgtgtatgtacccgccccatagcttcgtcttggggttaagtaagactgtaaaatccctaccacactggactcttcccaggacttccctttccctctttgaactctgccagagactattctgcatttgaggcctggcgatgctgggcaggggcgggtatgggtgaagcacagggtgggccgcggctggcgggtttggtgcagaaacgggctgtggc

SEQ ID NO: 12149 - DNA, 1098 bp, Homo sapiens
ctgacgcgatatgcctctcctgcgtgggcgctgtcctgcccgccgccactaccgccgcttggccctgctcggcctgcagcccgctccccgcttcgcccactcggggcccccgcgccagcggcccctgtctgccgcggtgagttgaggcccagccatcatggtgggcgggaagcgcgtggccctggcggggcgccccgacgggtggggagaagggaggacacggcgtgcaggcctcgcgtgggaggctcttgtggcttggtcgccgttgggggaggttcctgtggcttggtcgcctttgggggaggttcctgggagagggtcgcggtgaggatgccgtcgtcgggcacaggggcggaaagcccgggaccctgaggaacgcgcggggattgggcctccttcgttgttaccctttaccggcacctggctcgggggcggggctgtggtttcgcggaggaatgatttaccatcctcggacgtcctcggcactgcgaagatctagcgttttcgataaaatggtggaaatcctgggccacatcgaagttccagagtgcgaaggttggaaccggagaccccttagatgaaaaatgaattaaaaaaaaaaatcaggtgatccatgaatcgattttcagcattttagatttcactaggcgcctgtttctaggacaacggtctaggtgctcaaaatgttttttttaagcactttttgttaggcagcaagtcactggcctaggaagccatactcagcagcgcgtgtcatcttctcttccaggaaatggctgttggacttgtggtgttttttacgaccttcttaacaccagctgcatatgtgctaggcaacctgaagcagttcagaaggaattagatggaagatgatgttgaacagctgttaacgtccaaaaaactttcagaaaaagctgtgtttttgttaacgagcaaaattgcctagttgagttgatgcaaccattgtggtattcactttcctcatgtttatgatgaatattttgcacttttttagtactgtgcattatatagatgtatagtcaaaaatgttctgcttaagtgttaaataaaacggaaacacttattcgtgcttggtaa

SEQ ID NO: 12150 - DNA, 1098 bp, Homo sapiens; identical to SEQ ID NO: 12149

SEQ ID NO: 12151 - DNA, 1097 bp, Homo sapiens
ctgacgcgatatgcctctcctgcgtgggcgctgtcctgcccgccgccactaccgccgcttggccctgctcggcctgcagcccgctccccgcttcgcccactcggggcccccgcgccagcggcccctgtctgccgcggtgagttgaggcccagccatcatggtgggcgggaagcgcgtggccctggcggggcgccccgacgggtggggagaagggaggacacggcgtgcaggcctcgcgtgggaggctcttgtggcttggtcgccgttgggggaggttcctgtggcttggtcgcctttgggggaggttcctgggagagggtcgcggtgaggatgccgtcgtcgggcacaggggcggaaagcccgggaccctgaggaacgcgcggggattgggcctccttcgttgttaccctttaccggcacctggctcgggggcggggctgtggtttcgcggaggaatgatttaccattcttggacgttctcggcactgcgaagatctagcgtttttgataaaatggtggaaatcctgcgccatcatgaagttcagagtgcgacggttggaaccggagaccccttagatgaaaaatgaattaaaaaaaaaaatcaggtgatccatgaatcgattttcagcattttagatttcactaggcgcctgtttctaggacaacggtctaggtgctcaaaatgttttttttaagcactttttgttaggcagcaagtaactggcctaggaagccatactcagcagcgcgtgtcatcttctcttccaggaaatggctgttggacttgtggtgttttttacgaccttcttaacaccagctgcatatgtgctaggcaacctgaagcagttcagaaggaattagatggaagatgatgttgaacagctgttaacgtccaaaaaactttcagaaaaagctgtgtttttgttaacgagcaaaattgcctagttgagttgatgcaaccattgtggtattcactttcctcatgtttatgatgaatattttgcacttttttagtactgtgcattatatagatgtatagtcaaaaatgttctgcttaagtgttaaataaaacggaaacacttattcgtgcttggtaa

SEQ ID NO: 12152 - DNA, 410 bp, Homo sapiens
actatatgggagtgaatgtatctagtgacatcacccttaaaagattagatgtgtagctgtgaggtaatataagtttagctaaatggtttttatgttctattagtactgccatgccacacttcacaatttgctgtgagaagtacaaccatttctttgcctctttaaatgactacacgtcagaatgtgaagaatgagtacatctcctattttaatgattttattatcttctcttagtcttctgtgaggtttgaagaatcatacacatctttgaactgtcttagctgttgatgatgctgttatcatgggcaacatagttcaactctgagtcttggtttccttatctctgtaatggggacttaaaattgctgtcttgaagtgatgttgtggaaataaaacattgaacaaagaaa

SEQ ID NO: 12153 - DNA, 410 bp, Homo sapiens; identical to SEQ ID NO: 12152

SEQ ID NO: 12154 - DNA, 410 bp, Homo sapiens
actatatgggagtgaatgtatctagtgacatcacccttaaaagattagatgtgtagctgtgaggtaataaaagtttagctaaatggtttttatgttctattagtactgccatgccacacttcacaatttgctgtgagaagtacaaccatttctttgcctctttaaatgactacacctcagaatgtgaagaatgagtacatctcctattttaatgattttattatcttctcttagtcttctgtgaggtttgaagaatcatacacatctttgaactgtcttagctgttgatgatgctgttatcatgggcaacatagttcaactctgagtcttggtttccttatctctgtaatggggacttaaaattgctgtcttgaagtgatgttgtggaaataaaacattgaacaaagaaa

SEQ ID NO: 12155 - DNA, 4082 bp, Homo sapiens
aaagactcgaacagacatgcgagacctctaccaactgaaggtttcgtgagcgcactcctttgccaagatcttggtgaatagtctttcactgtgcaattttatcttagaaattgttttacgtttgatcatgattgtgcttggctggatgttttttgttggacttgtgtgttacatgggcacgtttccagagttgatggtaagtaatggctctgcctgtaaatccctggtggtcagtcctgtgctggctcatcttcctgtctgggttttctgaccaaatgggaaagatagttgaggtctcaccactaactggaagtcagaatgtgatgggaacaaagttagtgtcccaggctaccgggctacttcccatcccactagggacatccttttttattttttatttattattattattattttttgagatggagttttgctcttgttgcccaggctggagtgcagtggcgcgatctcggctcactgcaacctccgcctctcaggctcaagcgattctcctgcctcagcctcctgagcagctgggattacaggcatgcaccaccacgcctggcgaattttgtgtttttagtagaaacagggtttctccatgttggtcaggctggtctcaaagtcctgacctcaggtgatccacccacctcggcctcccaaagtgctgggattacaggcatgagccaccacgcctggctggggacatcctttttttttttttttttttttttttggagacggagtcttgctctgtcgcccaggctggaatgcagtggtgcgatctcggctcactgcaagctctgcctcctgggttcatgccattctcctgcctcagcctcccgagtagctgggactacaggctcccaccaccatgcttggctaatttttggtatttttagtaaagacggggtttcactgtgttagccaggatggtctagatctcctaacttcgtgatccgcctgcctcggctccccaaagtgctgggattacaggcgtgagccactgcgcccggccaggacatccttttaagtctttttttgtttccccctcccttgcatatatagctgtacttgtttcaaagcactatggaatttgcaaggggtctgctggagaccgtatttgacttgcggattgcaggccaagtggatcagtggttattggtaggaagggggacggtagggattggtgggaccttttagcagcccttctggtcaccacacagagtggttacccactgggccaatgagtacagccatctctgccctcaaattttctttttgattcagcctccaactctaaagtggcaggaaaggtggcctgttcaggagagcaaaacacaactgaggaggcgggctttaggtgaagatttgctgcagtaagtgggtggtcaggtttggtgggttggattcctccctttccaaagtacttggtagcaccctgaagtttcagtggagaatgtttattcctttggaaaatataataaactgtggaaggggaaatgatttggtgagtactgctgaggacagcaggccaaagttgtctattaataaccatgtctcataggtgttgttttgaagactgttcccatctattatttttctcctcacaaccctgtaatatattatactattaaaagcattcttttttttttttttttttctgaaacaggtcttgctctgccacccaggctggagtgaggtgcaagcagtcttcccatctcagcttcttgggtagctgatcctcaggcacatgccaccatgcctggctaattttttttttatttttttagagacaaggtgtcactatgttgcccaggcaggtcttgaactccaggcctcaagtggtcccccagccttggcctcccagagtgctgggattgcaggcataaaccaccgtgccttgccaggaccagcatttttaacgtcccttttggcagatactgaaactggagttaacattgaacttgggtttaggtcctaactttgtgactttctagctacgtgaccttgggaaagtttaattagtttctttgaacttcagtttcgaagtttcttctgtacaacaggagatatcactatttttgtgaagattatatttgggaattaatgtaaagcatttaatgcaaagctcaaaaattagcatttagtaaaatactaacttaacaacaagcaaataatgaaccagtcaacaaagatttactggtgacagtgacctcaactatttacctgaggccacacacagtagctcgttggtaaaggtgggatgcgagcacatttctctgtctctggacttcatagcctcccatactcattccactagaccagcctgcctacaggaaacactaatggcagtgcccttagcagaccagctcctgggtttcttaacgtttcaccccatttcattcagacctgttttttttcagagctgtgcctattgttagagaaacttaactcggagagttttaataatatactgattacaggagcagaaggttttttggaagctactccagaagttaggggtgtttagccccagccccaggtatactaagagcaggacttgatggttggggtttttatctccatctgccccaggatttctgtgaatgcattagcccaaagcagtcagaactttgtggcagtcctgaccagaccacttaactatttctgtgcctcactttctccagctgcgaaatgagtaaacagacagcccatcttccttctcttcccttctcaggaaagttgtaaataggctcaccctacatgttaagagtttaactgtaccattttataaaatgaaagatttcttttttgaacagcctaacaatagcatattaagttatttgctcatggcatacctagccagctaattctcttaatgaatccaggctttttttcttttgcatagcatctgattgcacaaagccaatagttaaacattttggcaggtgacgagttaatgagtatactgccagctaggtccaaatcacagacacaccagagcacagggcccttttgataaattttctttaacccaacgcatctagcaccctggccaaccatcccataggtgctcatgctgactgggttgccaaggttacaggagctgatatcataattggtgtctgagctctgcccccctaaatggccatgaggagccacttcaattcagactaggccacgaagctccttagtgaggagctgccatgctgggccatccaccatctggattcctacgactcagggaatagaacactgcaccttccagaagcacttgtttcttcgtgggtacaccaccagctgagaaagaagcctcatgatgattgttgtcttatggatgcttctcattgcaggaaccatgtggaagggatataaatatcccccaggaggggtaagtgtaccttcaactttgttctctattcctactttgaaatgtattcccgcccccaaaacaaactaagtatgaaaatccaactctagtaacattagaaacaaatacttttattatttttttaaagttactgtagctgttgggagggttcccattttctttcacgtgatctttaaggcccagagtcaaagctttctgagttgggcagtcttgtctctgttgtgctaatggacattttgtatgcccagtctttgatgccatttcctaaggatcagtccacttcagaaatccaaacttctctcttccacaagtaaacactagtctgtaaaagggatctggtggcagatgtctcttttctctctcctcctgctagaccttggaatttctgtcttttctctgcctcttgtcagctccccagtgctaagctccccttgcatccgggatcagaggcattaggtgagacagaattggaggtaacctcccctgccagtccttgcctgggaggccaaatgcctaagcccccacactagaaaccactaggcctgcatgacacacactttcttttttcccccacagactccagtggaagtaagcaaggatgatcctggtgaagtaatgcagctgtgaagctcacctgaccagctgtacagttcctgttgttggtttcacataaagtaattgcacatta

SEQ ID NO: 12156 - DNA, 570 bp, Homo sapiens
cgggtggatcacctgaggtcaggagttcgagaccagcctggccaacatggtgaaacaccatctctactaaaaatacaaaaattagccaggcgtggtggcgggtgcctctaatcccagctacttgggaggctgaggcaggagaatcacttgagcccaggaggcggaggttgcagtgagctgagattgcaccactgcactccagcctgggcgacagagcaagactctgtctcaaaaaaaaaaaaattgtagagatgaaaaatacattaaatgtccatgatgttgtagcagaaaagcaaaaaatatctttggtgacctctgagagggtgtctaatagtggggtggggctagaagtcagaatgtaatgcatggaagaggcgtagattggaaaaagctttgagtatggaccacttgtttaggaagtttggtcataaaaggaaattaagaaataagacagggaaggagccacagtatcatctggaagtttttttgaggaaaggacaggggtacctgtggcttcatgatggccaagaaaagagaatcaatggagaggaactaatccaaggtgatgaa

SEQ ID NO: 12157 - DNA, 322 bp, Homo sapiens
aagaagttaccgcaccttttttttttttttttttttttttttgagacagagtctcgctgtgtcgcccaggctggagtgcagtggcgcgatctcggctcactgcaagctccgcctcccgggttcatgccattcccctgcctcagcctccagagtagctgggactacaggcgcctgccaccacgcctggctatttttttgtgtttttagtagagacggggtttcaccgtgttatccaggatggtctcgatctcctgacctcatgatctgcccgcctcggcctcccaaagtgctgggattacaggcgtgagccaatgtgcccggc

SEQ ID NO: 12158 - DNA, 3725 bp, Homo sapiens
caacaagaggaccctaacattttctggaggtggaatcaatgttgtatgattctaatgagatacgtgattgtcaagagcctagtgtgctatctaaggtctagcagtcacttcactagtgggcagagacaagttctaattgtattacagcacaaacaaaactgactagtttttaaattgcacaattttttttttttaaagcaagaatcattttctgggtatgtaagtgtaaatgtagatgcaaatttggctgcacctctttatcatgcctgtattggcctataggtctgcactttagtgttttttaattgttttatttctgtgtatttacgaacagagaaataacccaaatattatttctgcttagtgtctttatttataaagcccatgagtagtttgtatgcatctttcctacttgtaaagatgagtaaaagtatgcagttttaaatttataatattattggatgttctttgctttggtagtctttccagaaaggataaacagtggtttttgttttgttttgttttattgtttaagtgggaccacttagcttcccgtttccttactagttaaagaacagacattaattttcagttgaatgtatttttgcaggcatcatattgttacagggccatttacacctattcacaaagcttaaatcctaccttgtgggactgaagtgctcttaatataactgtttattttcactgtgtaatatgcaaagcaaaagggaaattatttggtggatggtagctcaaaattggaactcttgttctaattcagttacattggctttaccctccttagatttttcatcaaagggctgtcccattgcaatcttactaaaacattttgttaaaataaactcttttcctttttatattaataattaggcttttaaataaagatgttattcctttaaaatggtgggcttaccatcattgaagatgtcactcaggtggccttgtttgatcaaaacgccttttttaaaaaccaagctttaaaaacatgtttataatttcatgaagtacatatatattgttcccatagtcttcagctttaaaactataaatatgcccaaattttgttatttgccctactttaagtaggtttattgtgtttgttttttcagtacttgtttttctctgataagactcaggaattctgaaatgtgaaattgtctcaattctttctcttgtagcatgaatcaaatgtatttattaatagcacttatgactatagaatataatttggcatatgattcatattacatatgtattcgttttatttttaaaatagtttataaacttaatgatttttttttacaaatgaggttatagatattaatgcaaattttctggtaggtatctctttttttgctatgatgattccaacttatcagagacctcccatttgccttttcattacggtgaaagctttgccctcatctactaaagtacaaaggaattctttggaagcagattattctagtcttatgctagagatgaatttgatcattttaatgtgtgatctttttgctctatcaggtataattgttttcctttcctttataatgggtaagttttctcacctttgagtaacagtaaagttcatttatatgtccatacctagaagaccagtgcaaatactttgagagcacctgggtctacaggacataattggcatctaaatcctcatttcttgctattagtaggaaaacagatatagtattgtaatacccttattctttttgaatcctaattactcatttcggttttttttctctcttttgaatctagttgctggttttcgtttaatgattttagtttaacaatcccaaccaacaatacatttgatttatttttttctgtctaacctgacaacctttttcttgtgcttcttgtttgttggttagtttttgtgaaaggaatcattgtttaagatcactgttttcatacttgttttacacttcacgtattttgaagtacatttatttactaagcatttgtgacttgaataatttcaccaaatgaatacattttggtagtttgtaatgagttcttctaattgttacactttgcttggtacttaacaataaatatgtaaaggtaaaagaaataattttctgtattctgccaatcttaattttatataataaatcatccatttttttcttaaaatagtatggattgactgtttctaaaataccaatctgtggctgtggtttttcttttcttcagcatttccagcatccaagtaaacaatagtcccttatagtcctgctacttgatgggtaaatttggttgctgggtttttaagttgcactcacaataaatcgtgcaaagcattgtcatgccttatttactccatttttaatcctgcatcccagatttatggcagcaacacatatctacaggatacttttatgttgtccaaatattgctgtcagtcatatgtacttataaaatgtctccactcatgtatatttatagaaatgaaatgtcaaatttctcagactgttaaagtgcagtataaagttgcttaatgcacacttaaaaatgatatataatttctgaatcctatgaaatatgtgttcttttttaattctttgggagttttcttaagttttacatgttttttggtttattgttaatgattttgtttactctttgccaaattttgtcatgtaggttattttacaatagcacctttaaaaaaaatgtatatgctaatttactaagcatattcatgtccatttttatttgatcatctgatttgtgaaataacttgaaatttgtactgtttggtttgtgaaaataatattaccaaatctctgtcattagaatgtgtactttatgttcagaagtgactgtgggtttattcagagccagccattctctcccttgatgcactttgtaaccagctacacatgcttttaggtggcttttccctgatagggtcaagtatatgactataaaacatttttcttgtgaagctattaagttcattagttactcttatttccccttgttgtaactaagtggtgcaggtataagcatatccccagcattcctgtgtgtgtgaatgtgcactgctgatttggactgttcttgagaaaggtgctgtgacatatgtcaatatttgttagctctggggatatctttagaatgcttgagaaagttgctaggtgtgtgccacattggtgcaggtaaatccatgctgttcacagccaagcagcatttgcagagaaaaggagagttttacatagaccccaggaaaaacagtactaacctggttgatggccttggtggtggaattttgtttcagccagaggctactcattatatcagaatgatgttcagtataacactatctgatttttagattggtcgatttctgttgtaatcaagtatttaggatgtaatctttttaaagtcattgctttaatctgaaaagccattagaagggagaggaatcactgttccacaggatatttaaaactcaggagttcaaataacctcacatattgaacataaactgttaacttattccacaactaaattctaacctgatacttatgaattgcaaagtgattgctgcaaactttttctaaggtggctgaagatttaaaatagatcattctaaagggaaatcagtaaaatgtcttgataattggtatccaaatcacttgtgtgcctgagaaaataaaaggtaatattttactttc

SEQ ID NO: 12159 - DNA, 2082 bp, Homo sapiens
ggctggagtgcaatgtctgctgcccgggttcaagcaatcctcctgcctcagtctcccaagtagctgggattacaggcacctgccactgcacgaggctaatttttgtagttctagtagagacgggtttcaccatcttggccaggctggtcttgaactcctgaccttgtgatccacctgcctctgcctccgaaagtgctgggatttacaggcgtgagccaccacacctggccatatttttttattttttattccccattgaggtgtttttcagagtttatccttagtgatcccagttatgttttgctaatgtcagggtggtctttttatcaactactacaataaaccaccagtcgtgccagagaaaatgcccaggattaatttcttttgtaggaagagcagtttgaactatatggaatccttcaaaattctaagaaagtgtttgccctgttctgtatatattctgccaaaagttgttcctaatagtctagatattgattctttatgtaagtagggtctttttaatcaaaagtgaagtgggaccaaattgttcagtggcttgttctcttctaaattgtttttagctgataagatttgggaaactttctgggcttccacaaataatatacaatacatctttgaatacttgatgcttaaaaagtgttgttactgcatgcaatcagggagctccagagctttttgcaggctccttgttcctgagaagcaatattgttttcatattatctcggttatacattttatggttgtgacattgctttctttttgtttttgctgttgttttctgctgctgctgatttagaaatgaaataagctaactcttaattttaacctgtttgctacctaaaatggtaatcatcttgatgttctttcaagcaggtcccagagatcttaaaatgatccggaatcactgagtccacagttctcttttctcttggttatgtatagatggagagtggtcttggtgttatattagtgtatgattcgtatttgtttcataattaacttcgaagtgaaaaattgatgcgagagcaaaggtttatttggtttccataactatttactaattttatgcttgccagattttaagattaaactgtttgccatctcttttttttttcttcccgtaaaacctttggccatctacagtcacttttcctcaaatcttatgctgtaattcaaactgtatattctttttgctgattgcttctgtacctcctctgcttccagtgttcttttgcaagagtgtccacacagtgggaagaaaacctgaacttgactcatgaagtgctgggcattcaaaacagtgaatccttgcaaaggatcttgggagtagacccctgtgaattggctctttcaatttgtccacttaaagggcataatagattatgcagctgtttgggcttcagcagggtattgctccatattcatgcctagttgcaattatgtgaattttcagtttgttacaaagacttccctttgtattcaaaacaattttgttggctttgtgttctaatatttgagttttctctgaggaaaaatagttgcaagattttgaactttgaaaacttcaaattaaaatgtttaaaggttttgtcactttttattttctgatgcaaaccatacattgaaagcatattttaagaagaagtcactctaataagctttaatttcgagtttatgaatcacaggatttttggtagaggtaaaaactatacttacaccgtaaattagacattaaatgccatttaatcagtcagataatgattaatgttagagtaatgtttgatgggccaagctgctaaaacataagcagttctaattaaaatatataaacttatcacgtaaaaatagcaaacttagtaatgtataaagtgacagtaggtcttttttgcttaaaaatcagagttcctgtgtagtgtctctttatgatctctgtagtaaaaatattatttaacgtagcttagtgagaagtttaagaggagtataccttttactttagggtgcccatgccactttgaagttatggagtgcaaagtagtttccacacattaaaaaaaaaaaaaa

SEQ ID NO: 12160 - DNA, 2499 bp, Homo sapiens
aggaatctgtcttgaactatcgtttcgatcctctcggcattgttgatggttttactgccgaggtaggggcaagtggtgctttctgccccacacatttgactcttccagttgaagtgtcattctacagtgtttcagatgacaatgctccctctccttatatggcaagtattttttatattgtatgttttcctgccaaatcaaccaacttaatgacaaatttaagtgctttgatgcagtacttgaaaatataaatcatttcctaacagctgaatacaaactaatatgccaaaatattacctcacaacttctttctaagctagttcaaacaacagataacctcttttgcatttaaggatggtactaaaaatgtacttatttctctttgtcttgaaaaaatgataaaaattgattagtgacactgtaattccatcttgctgagttcacacacattctcaaatgcttagtgtgcactgtgtcctctagtcctacaaggctttggtgacataaggcttctgtatggcccttttactcccttttcggtttggtttgtctttgggcctatttttttctaatcctagggttcttttttttttttgacagcatctcactctcttgcctaggctggaatgcagtggtgcagtcatagcccactgtagcctcaaacttctggcctcaaaccatcctcttgccttggagctcctaaatagctgggtctacagatatgcgccaccatgcctagctaatttttatgttttgtagaggcagggcctccctatattgcccaggctggtcttgaactcctggcctcaagcagacctcccactttggccttccaagtgttgggattacaggcatgagccaccacaactggcctaatcctagagttctttaggatactagctacttcagactcacgctaatgtcttaatggagagtgaaataactaagaggagttacagcaagcttgtccggcctacagcccacatgcaacccaggaaggctttgaatgtaacccaacacaaatttgtaaacattcttaaaacattatgagatttttttgtgtgatttttgttttttagctcatcagctattgttagtgttagtatattttatgtgtggcccaagacaattcttctaccagtgtggcccagggaagccaaaagattggacacctctgagttatagtgttgagccttaagatcaatcttatgatttcacctttccaatttttttattccaatggcttgtggataatataagcattcatttgcaaaaacaatactgagtactagtatatgattagtatcagccctcttccaaaagacaaagagagacaagtagctagccatgcaggtctgtaaaaagttgacagtgatggtatcaaatatggagtcaaatctgggttttcattttaggtgttacttttgagaaatgcagattactgtaggcattgaacattatagcctagtcttgctgcttgaatttcctaacttactatctggcccaactgcttcctctcctaacacccctctccacaaccttctaggttttcaaggacattagtaacaatgacttttgtcattaataaaagctgtaaaaagggacatctatacaattgagaaacaacagagaggaaaggaagctacttttaggaacctatatgtggcctactcattactggcccagtttcttcaaggaaagcttactccattctaagggtgaagattttagtcaagagcttgattagtgtttgacactttgatagaaaaagcagagtggtgactgcttatttattcaaagttttcttttcccaacaacgttcacatctgtgggtcataagcatgaagatgcccagcataggttattatcgaaagaagaggcccccttcacaaacctgcccagttattacatatgctacctgttcatttaccatagaaagatgtacccacttttccagaattattttgaaaaaataactgctaattttggacacttaataaaatggaaagtaccactgagataagtttaataccagaataaatgcatattatactcgaatgcttacaatatgagaatatagcaacagcctgttttgccttaccaggacatcaagaatctgatcagtttcacaccttttactggcatatagtaatagaggatggaaagataaggtctcaaatactgtgatctggccaggcacagtggctcatatctgaatcccagcactttgggaggctggggcggacagatcacctgaagctggcagatcgcctgaggccaagagttcaagaccagcctagccaacatgatgaaaccctgtctctactaataatacaaaaaattagccgagcatggtggcacacgcctgtaatcccagctactcaagaggctaaggcaggagaatcgcttgaacccgggaggcagaggttgcagtgagccgagatcgcgtcattgcactgcagcctgggcgacaagagcaaaactccatctcaaaataaa

SEQ ID NO: 12161 - DNA, 119 bp, Homo sapiens
agaatcgcttgaacccgggaggcagaggttgcagtgagccgagatcgtgccattgcactccagcctgggcaacaagagcaaaactccgtctccaaaaaaaaaaaaaacaaaaacaaaaa

SEQ ID NO: 12162 - DNA, 2499 bp, Homo sapiens; identical to SEQ ID NO: 12160

SEQ ID NO: 12163 - DNA, 323 bp, Homo sapiens
tctggatgacagaacaaggctccatctcaaaaaaaaaaaatgccagaagaaaatgtgtttttctcttttgtgttaaatatggtaactttttctaggtataaatattaatatgctgatcaattaaaatgatgaaattattacaataatgatgaataataaaattccaaataatttcccagtccctttctaaaattcctaacttgccaatgctactagtcttaacattgcttacaaattgttttaaattgttgccttcaactttatggtttttttcaaaaagctgtttttttaaataaattgatttagttactgtgttctaaaaa

SEQ ID NO: 12164 - DNA, 492 bp, Homo sapiens
ggaatacaaagtttaaatgataaagttcctgccttagagacgtttattgtctactggagaaggtgggcatataatttacccaggtgagtaaataatttataaactcaagtaattagcattgtaatagaagttgcctagtacttgtgtatctactatctctgctaaaaggattgaggaaagctttactgaggagctgtcatttgagcttggtcacaaaagatgagaaggaatttgccaggtaaatttgttcaggaatcagagattctagacaaagggaacttcatgtgcaaacgtaaaagagcatggcaatgttggaaaggatcaactggagctagagcatgggactctgtatatgttgggagagatgaaatgagaggcatggtggagcttaagtgctgtgctatgaatgttgacctcatcctatagacagcaggaaacaaagtttttaagtggtaggtgatactataaggcttttttcaaaaaaagaaaaag

SEQ ID NO: 12165 - DNA, 323 bp, Homo sapiens; identical to SEQ ID NO: 12163

SEQ ID NO: 12166 - DNA, 492 bp, Homo sapiens; identical to SEQ ID NO: 12164

SEQ ID NO: 12167 - DNA, 990 bp, Homo sapiens
gtgtccttgggctgtgtgtggtctgcgtgtccctggggttgtctgtggggtcatgtggcccctctggctgcctggtttccttttctcccacatcgtgtctggcatttctttattcagaaatgaggcatctgttgttggcttccctgtggagtttgtgtccctccctgagctcccgcctctgtggggccagccccagtgtggacttgtggccccctgtgctgctgggcctcaggtttgggtctgcggagtacatgggtgtgagtgctctgaccactggactcttaaaacatgcagccctctttgactgtgacactggacatgtgcaaagcttggggactgatcaaaaagtataaagaggccattgaaaaagaccttgactcctgcacccagaggtagcaccaagaacatggcatgcatttcatctccacgtctcccttctctcctttcctcccctgttcattcattcagccaatctatcagccaaccagtaagcactcacggacacccacgtgcgcaggtgccatggaggcagccgagtgtggggactgctgtggcagagctggcagccttgtgtgcttcctgcacttgtgacattttattgcagccagtgcctgtgccattaagcattccttgaaaataaaatcttttttggctgtacgatgtttcttcgtgtagacataccaaaagtaaactcttggccggctgcggtggctcatgcctgtaatcctagcactttgggaggctgagacgggtggattgcctgagctcaggagttcggaccagcctgggcaacacggtgaaaccccgtctctactaaaatacaaaaaattagctgggcgtggtggtgtgtgcctgtagtcccacctactcaggaggctgaggcaggagaatcgcttgaacccgggagacaaaggttgctgtgagcctagatcacaccattgcactccagcctgggcgacacggagactccgtctccaaaaaaaaaaaaaa

SEQ ID NO: 12168 - DNA, 1118 bp, Homo sapiens
tgagaatttgcatttccaacaagttcccaagagattctgatcctgctggtcgagagtaacaatttaagaatcatcattctaggttatatacctgggagtggaattactgtgatatatagggtatgtatatctcaatttctaatgtaacagggtttcagagatcctcttcacattcttgccaaaactttggagtattattttgccagcctaatcagcttgaaaagttatctcattgttttaatttgcatgtttctgatttccagtgaggttatgcatgtattcttaacatttattggcctttcaggaactttctgtgagttacctgttacattcctttgctgaatatttaatcgtttgttttttcatatttatttatagggattattttaaaattctgcatatgaatcctttctgttgtttagcaaatatctttgcccagtggatgacttaccttttaactttgttcctgatgtcttttgttgagcaaaagtctttcattttaatgttatcagattatcggtattttattcaatggtttgtgctttttgaatcattttaaggagatccttccctacaaatcaataagaaaaatacaaacaacacaataaaaataaaagtgtttataaaaacagacataacaggcagttcacagaggcaaaaacaccagtggcctatagacttaagaaatctcattagtaatcaataaaatgcaaaataaatctatactatgatatatacatttagtacttagaatgctggcatatatttaaaggcctgacaatgccaagtattggtgaacatacgaaacaataagaactctatgtaacctcagcactttgggaggccgaggccagcagatcacctgaggtcaggagttcgagaccagcctggccaatgtggcaaaaccccgtctctactaaaaatactaaaaattagccgagtttgatggcacacacttgtaatcgcagctgctcaggaggctgaggcatgagaatctcttgaacccaggaggtggaggttgcagtgacccaagatcatgccactgcactccaacactccagcctgggtgacagagcgagactctgtctcaaaaaaaaaaaaaaaagaaaaagaaaaaa

SEQ ID NO: 12169 - DNA, 1138 bp, Homo sapiens
tgagaatttgcatttccaacaagttcccaagagattctgatcctgctggtcgagagtaacaatttaagaatcatcattctaggttatatacctgggagtggaattactgtgatatatagggtatgtatatctcaatttctaatgtaacagggtttcagagatcctcttcacattcttgccaaaactttggagtattattttgccagcctaatcagcttgaaaagttatctcattgttttaatttgcatgtttctgatttccagtgaggttatgcatgtattcttaacatttattggcctttcaggaactttctgtgagttacctgttacattcctttgctgaatatttaatcgtttgttttttcatatttatttatagggattattttaaaattctgcatatgaatcctttctgttgtttagcaaatatctttgcccagtggatgacttaccttttaactttgttcctgatgtcttttgttgagcaaaagtctttcattttaatgttatcagattttcggtattttattcaatggtttgtgctttttgaatcattttaaggagatccttccctacaaatcaataagaaaaatacaaacaccacaataaaaataaaagtgtttataaaaacagacataacaggcagttcacagaggcaaaaacaccagtggcttatagacttaagaaatctcattagtaatcaataaaatgcaaaataaatctatactatgatatatacatttagtacttagaatgctggcatatatttaaaggcctgacaatgccaagtattggtgaacatacgaaacaataagaactctatgtaacctcagcactttgggaggccgaggccagcagatcacttgaggtcaggagttcgagaccagcctggccaatgtggcaaaaccccgtctctactaaaaatactaaaaattagccgagtttgatggcacacacttgtaatcgcagctgctcaggaggatgaggcatgagaatctcttgaacccaggaggtggaggttgcagtgacccaagatcatgcctgtgcactccaacactccagcgtgggtgacagagcgagactctgtctcaaaaaaaaaaaaaaaagaaaaagaaaaaaaagaaacactataagaattc

SEQ ID NO: 12170 - DNA, 1141 bp, Homo sapiens
tgagaatttgcatttccaacaagttcccaagagattctgatcctgctggtcgagagtaacaatttaagaatcatcattctaggttatatacctgggagtggaattactgtgatatatagggtatgtatatctcaatttctaatgtaacagggtttcagagatcctcttcacattcttgccaaaactttggagtattattttgccagcctaatcagcttgaaaagttatctcattgttttaatttgcatgtttctgatttccagtgaggttatgcatgtattcttaacatttattggcctttcaggaactttctgtgagttacctgttacattcctttgctgaatatttaatcgtttgttttttcatatttatttatagggattattttaaaattctgcatatgaatcctttctgttgtttagcaaatatctttgcccagtggatgacttaccttttaactttgttcctgatgtcttttgttgagcaaaagtctttcattttaatgttatcagattatcggtattttattcaatggtttgtgctttttgaatcattttaaggagatccttccctacaaatcaataagaaaaatacaaacaacacaataaaaataaaagtgtttataaaaacagacataacaggcagttcacagaggcaaaaacaccagtggcctatagacttaagaaatctcattagtaatcaataaaatgcaaaataaatctatactatgatatatacatttagtacttagaatgctggcatatatttaaaggcctgacaatgccaagtattggtgaacatacgaaacaataagaactctatgtaacctcagcactttgggaggccgaggccaccagatcacctgaggtcaggagttttagaccagcctggccaatgtggcaaaaccccgtctctactaaaaatactaaaaattagccgagtttgatggcacacacttgtaatcgcagctgctcaggaggctgaggcatgagaatctcttgaacccaggaggtggaggttgcagtgacccaagatcatgccactgcactccaacactccagcctgggtgacagagcgagactctgtctcaaaaaaaaaaaaaaaagaaaaagaaaaaaaagaaaaacaataagaattctaa

SEQ ID NO: 12171 - DNA, 911 bp, Homo sapiens
attctagatgagggatattaaaacagtttgtttgactgattgaatttctaatagttcgggggtatttatactattagttcaagggtagctttgtttttatttactttttgttatgaaatattaatataccaaaagttatatagaataatatagcaaatacctgtgtagccagccaacctttattaatcattatcaattcctaatattttccatatttgcttaattaaaaaaataataaagcattatagatattcctgaagacttccacatattcctcaccaatcccattctcctttatcctttccagatgtaaccactatcctgaatttgctatttataattcctgtgcacgtttttatatttttactacatagccatatattcacaaataacatatagttttatatgttttaaaactatatagatgacatactctatcattctacaacctttttgactcaatatgcataatgcttttgaaatttatttctaaagatacaaggaactatatagtattccattgtagaaatagaccatcatttgttatatttatccactttcctgaagatttgttctttctgttattttgctattacagttaattctgcaacaagtattatcatacacctcttgttgcacatatgccagactttttctaggacagtgtttttcaaacttagattacaattagtaggttacaaccaatgggatttttttaatgaaatggaatagaatagaaaatatcaaaaagtgttccctacagtatgttagggtaattactgtttcttaaagctttttttttatatgtgtttgtgtatatgtgacataatgtgtgtggggccacattgaagaatgcagttcttcgtgtagatctcaatcaaaagtgttgggaaggtgtcattctattacag

SEQ ID NO: 12172 - DNA, 1071 bp, Homo sapiens
aggctcttctagccttcctgtctcatctaagagagaaaaaaagctgtgaagtgcttgtgaaggttacaggctggagacacaggcacactaaaagattgagacttcatcataggattagagaatgcctccccttccacaccttgctactacatcaacagagcttcagtataataatcgtggattatagctgaaagacctgcaaggatcagactctatttaaggaggtttttttgttgctgttttgttttgatttgtttttttttttttttgtaaatccaaaggaaacaagggagacaaaaagacagtagaagaaacagaaacttctgacacctacagctacatcaaacattaagcacagcccaactcctggccagattaacataaaacctcatactaatggtctctttggattagttcctattacttgatagatcatgtccagttttcaacaaaagaaattataacgtatgctaaaaaaaaaaaaaacacacattctgaagaggcaaaacaagcgtgagaaccaaattcaggttttggaattatcagatatggaatttaaaataaccacgattaatatactaagtaggctatgaataaaagtagataacatgcaagaccagatggctaatctaaacagagagaaactctaagaaagaatcaaaaggagttgctagaaatcaaaaacactgtaacaaatgaagaatgcctttgataggctcatcagtaagttggaaacagccaaggaaggaatcagtaaggttgaagacatggcaataaaaacttcccatgctgaaatacaaaggaaaaaaagactgaaaaaaaggaacagaatatccaagaactatgggacgatttcagagtataacatacatgttattggaataccaaaaggagaagagaaaaagaaggagaagaaatatttgaagtagtaatggatgagaattttccaaaattaatagcagataacaaactacagatctgggaagctccaagaacaccaagcaggataaataccagaactacacctaagcgtatcatgttcaaactacagaaagacaaagaaaagatttt

SEQ ID NO: 12173 - DNA, 911 bp, Homo sapiens; identical to SEQ ID NO: 12171

SEQ ID NO: 12174 - DNA, 462 bp, Homo sapiens
aggctcttctagccttcctgtctcatctaagagagaaaaaaagctgtgaagtgcttgtgaaggttacaggctggagacacaggcacactaaaagattgagacttcatcataggattagagaatgcctccccttccacaccttgctactacatcaacagagcttcagtataataatcgtggattatagctgaaagacctgcaaggatcagactctatttaaggaggtttttttgttgctgttttgttttgatttgttttttttttttttttgtaaatccaaaggaaacaagggagacaaaaagacagtagaaaaaacagaaacttttgacacctacagctacatcaaacattaagcacagcccaactcctggccagattaacataaaacctcatactaatgggctctttggattagatcctattacttgatagatcatgtccagatttcaacaaaagaaatta

SEQ ID NO: 12175 - DNA, 911 bp, Homo sapiens; identical to SEQ ID NO: 12171

SEQ ID NO: 12176 - DNA, 238 bp, Homo sapiens
acagggccaggagatcgagaccatcctggctaagatggtgaaaccccgtctctactaaaaatacaaaaaattagccaggcatggtggcgggcgcctgtagtcccagctactcgggaggctgaggcaggagaatggcctgaacctgggaggcagagcttgcagtgagccgagatcatgccactgcactccagcctgggtggcagagcgagactctgtctcaaaaaaaaaaaaaaacaaa

SEQ ID NO: 12177 - DNA, 181 bp, Homo sapiens; identical to SEQ ID NO: 5399

SEQ ID NO: 12178 - DNA, 364 bp, Homo sapiens; identical to SEQ ID NO: 6478

SEQ ID NO: 12179 - DNA, 142 bp, Homo sapiens
gcgggcacctgtagtcccagctactcgggagactgaggcaggagaatggcgtgaacctgggaggcggagcttgcagtgagctgagattgcgccactgcactccagcctgggcaacagagcgaaactccgtctccaaaagaaa

SEQ ID NO: 12180 - DNA, 247 bp, Homo sapiens; identical to SEQ ID NO: 6479

SEQ ID NO: 12181 - DNA, 170 bp, Homo sapiens; identical to SEQ ID NO: 5414

SEQ ID NO: 12182 - DNA, 184 bp, Homo sapiens; identical to SEQ ID NO: 5421

SEQ ID NO: 12183 - DNA, 131 bp, Homo sapiens; identical to SEQ ID NO: 5432

SEQ ID NO: 12184 - DNA, 227 bp, Homo sapiens; identical to SEQ ID NO: 5436

SEQ ID NO: 12185 - DNA, 47 bp, Homo sapiens
gcactccaacctgggcgacagagcaagactccgtctcaaaaaaaaaa

SEQ ID NO: 12186 - DNA, 91 bp, Homo sapiens; identical to SEQ ID NO: 9289

SEQ ID NO: 12187 - DNA, 143 bp, Homo sapiens; identical to SEQ ID NO: 5446

SEQ ID NO: 12188 - DNA, 686 bp, Homo sapiens; identical to SEQ ID NO: 6480
  SITE (95): n equals a,t,g, or c

SEQ ID NO: 12189 - DNA, 141 bp, Homo sapiens; identical to SEQ ID NO: 5242

SEQ ID NO: 12190 - DNA, 184 bp, Homo sapiens; identical to SEQ ID NO: 5453

SEQ ID NO: 12191 - DNA, 108 bp, Homo sapiens; identical to SEQ ID NO: 9293

SEQ ID NO: 12192 - DNA, 105 bp, Homo sapiens; identical to SEQ ID NO: 5457

SEQ ID NO: 12193 - DNA, 175 bp, Homo sapiens; identical to SEQ ID NO: 5462

SEQ ID NO: 12194 - DNA, 189 bp, Homo sapiens; identical to SEQ ID NO: 5479

SEQ ID NO: 12195 - DNA, 207 bp, Homo sapiens; identical to SEQ ID NO: 5480

SEQ ID NO: 12196 - DNA, 162 bp, Homo sapiens; identical to SEQ ID NO: 5244

SEQ ID NO: 12197 - DNA, 171 bp, Homo sapiens; identical to SEQ ID NO: 5487

SEQ ID NO: 12198 - DNA, 100 bp, Homo sapiens; identical to SEQ ID NO: 5916

SEQ ID NO: 12199 - DNA, 129 bp, Homo sapiens; identical to SEQ ID NO: 5494

SEQ ID NO: 12200 - DNA, 193 bp, Homo sapiens; identical to SEQ ID NO: 5245

SEQ ID NO: 12201 - DNA, 177 bp, Homo sapiens; identical to SEQ ID NO: 5500

SEQ ID NO: 12202 - DNA, 140 bp, Homo sapiens; identical to SEQ ID NO: 5978

SEQ ID NO: 12203 - DNA, 114 bp, Homo sapiens; identical to SEQ ID NO: 5508

SEQ ID NO: 12204 - DNA, 114 bp, Homo sapiens
cagtagaatggcatgaacccaggaggcagagcttgcagtgagctgaggtcacgccactgcactccagcctgggcaacagagcaagactccgtctcaaaaaaaaaaaaaaaaaaa

SEQ ID NO: 12205 - DNA, 364 bp, Homo sapiens; identical to SEQ ID NO: 6478

SEQ ID NO: 12206 - DNA, 153 bp, Homo sapiens; identical to SEQ ID NO: 5246

SEQ ID NO: 12207 - DNA, 121 bp, Homo sapiens; identical to SEQ ID NO: 5518

SEQ ID NO: 12208 - DNA, 166 bp, Homo sapiens; identical to SEQ ID NO: 5519

SEQ ID NO: 12209 - DNA, 190 bp, Homo sapiens; identical to SEQ ID NO: 5523

SEQ ID NO: 12210 - DNA, 2364 bp, Homo sapiens; identical to SEQ ID NO: 5525

SEQ ID NO: 12211 - DNA, 158 bp, Homo sapiens; identical to SEQ ID NO: 5531

SEQ ID NO: 12212 - DNA, 193 bp, Homo sapiens; identical to SEQ ID NO: 5539

SEQ ID NO: 12213 - DNA, 95 bp, Homo sapiens; identical to SEQ ID NO: 6151

SEQ ID NO: 12214 - DNA, 108 bp, Homo sapiens
ggagaatggcgtgaacccgggaggcagagcttgcagtgagctgagatcacgccactgcactccagcctgggcgacagggcaagactctgtctcaaaaaaaaaggtaaa

SEQ ID NO: 12215 - DNA, 136 bp, Homo sapiens; identical to SEQ ID NO: 5560

SEQ ID NO: 12216 - DNA, 192 bp, Homo sapiens; identical to SEQ ID NO: 5569

SEQ ID NO: 12217 - DNA, 150 bp, Homo sapiens; identical to SEQ ID NO: 5248

SEQ ID NO: 12218 - DNA, 142 bp, Homo sapiens; identical to SEQ ID NO: 5249

SEQ ID NO: 12219 - DNA, 123 bp, Homo sapiens; identical to SEQ ID NO: 5589

SEQ ID NO: 12220 - DNA, 45 bp, Homo sapiens; identical to SEQ ID NO: 7922

SEQ ID NO: 12221 - DNA, 243 bp, Homo sapiens; identical to SEQ ID NO: 7930

SEQ ID NO: 12222 - DNA, 307 bp, Homo sapiens; identical to SEQ ID NO: 5607

SEQ ID NO: 12223 - DNA, 131 bp, Homo sapiens; identical to SEQ ID NO: 5613

SEQ ID NO: 12224 - DNA, 288 bp, Homo sapiens; identical to SEQ ID NO: 6482

SEQ ID NO: 12225 - DNA, 268 bp, Homo sapiens; identical to SEQ ID NO: 5616

SEQ ID NO: 12226 - DNA, 160 bp, Homo sapiens; identical to SEQ ID NO: 5619

SEQ ID NO: 12227 - DNA, 368 bp, Homo sapiens; identical to SEQ ID NO: 5252

SEQ ID NO: 12228 - DNA, 2925 bp, Homo sapiens; identical to SEQ ID NO: 5990

SEQ ID NO: 12229 - DNA, 288 bp, Homo sapiens; identical to SEQ ID NO: 6482

SEQ ID NO: 12230 - DNA, 4704 bp, Homo sapiens; identical to SEQ ID NO: 5253

SEQ ID NO: 12231 - DNA, 102 bp, Homo sapiens; identical to SEQ ID NO: 7949

SEQ ID NO: 12232 - DNA, 2305 bp, Homo sapiens
tacgtgttcaggtgcttagaacagcttcttgcatcttttctcacatgatgcctttttaatgaggcttagcctaacaaccctatttaaaattgcaatgtaagttttctcacatacacagttacaatcctccctttatcagctctacatttttttttaatagactgaatctcgctctgttgcccagcccatctcggcccactgaaacctccacctcccgggttcaagcgattctcctgcctcagcctcccgagtagctgagattacaggcgcctgccaccacgcccaggtaatttttgtatttttggtagagacggggtttcaccatgttggccaggctggtctcaaactcctgacctcaggtgatctgtccaccttggcctcccaaagtgctgggattacaggtgtgaaccacctcgcccggccatctactttttttaatagccctccttatcacctttattcatttgactcactgatgattcccaagtgctaagaacaatgtctgtcatgtaattgatgaaaactttgttgaattaatacctttgttgtgttttattcacactgtatatacaatacctggatgaagagagatatttttagcactattaaaatacatgcattggctcaatacatgaattggatcaattctggaaccctaacaagatcacatttttgaccaaagtcaatatcttggactatagttaatttatcaaggtaaatgccactttgatgtgtcttggttaggaatctttgttcacttgagggaatacatggtatatgataggaacagtaagcacagaatagagatgggaaagggagaaccctgtcataacagttaacatttcatatttgccaaacatgaatggcttatgcatattaacacatttaattctctcaaccattttatgacgtctgaggccactgaagcagctagaggttaaaccacttccctaaagtcattagtaagtggcagagccaggattaaaaatttaagtccttaactactttgccatcctgccacactctgcacatgcagacaagagtaagagccttaatcttgggaaaagatatttcacaagatctttgacaatttccatatccacagacaccatccagcttattagtgaccaccactcctatttgttactttctcctttaaggctgcccctacctgaactctggatcccagtaccatcactttctcaaggacctcccttctccagtgttgccctctcttgactcccctaccagcatctaaacatgctcagatctattgcatcttaagtcctctcctaactccacattcctttctacctactgccctagcttttccacttcacaactagaataccctcattgtatccaccttgggcctcctatttactcagtacatctggttcttaccaagatcactgataaccttcttgatactgtttaatagatccttttcaaccctcatcttatttgctcaatctttggcatttggcactgttgaccatcttgtctccttgaagcttccataatagcatatttaaaatttttctgccttttcttctatcctcagcttcctttgggagctctccctccttcttctgtatgtccgttaaatgttgctgctcttcagtcttatgtcgcaggcccttaaatcttctcactgaaccaccttcctgtggcctcagttaccatccattgagctctgtgccgttggccgctagttcaacagtcaaaatgaaccaattatcttaaccccatacttcctcttcctataaaatctgtcctaggaaatttcacctctttgccaggccagaaatcagggcataatattaataaaatagttagcacatattgtgtactttcttcagtgccaggcactcttctaaccactttatatgtattagctcatcagactcagcctgataatatgagatgagtcctgtcattatccacatattagataacaaatctgagacatagaaaagtaatctgccttaggtcattcaactgataaaggatagagttgggatttgaatgagggcactctggtttgagcttgtaatcattatatcataaaggacatgatgcttgacttctctttctctcaccctaattcaacctattgccaagtattgtacattctccatgcttaaaatctctaggcggtgtccctgaagtataaatccaaagccttcatgcctgtaatccgagtgctttaggaggccaaggcaggaggactgcttgagcccaggagtttgagaccagcctggacaacaaagtgagattcatctctccaaaaaaaaaaaaaaaa

SEQ ID NO: 12233 - DNA, 254 bp, Homo sapiens
ttcttttctttttttttcttttagacggagtcttgctctgtcgcccaggctggagtgtagtggcacgatctcggctcactgcaagctccgcctcccgggttcacaccactcttctgcctcagcctccagagctgctgggactacaggcgcccgccaccatgcccggctaattttttgtatttttagtagagacggggtttcactgtgttagccaggatggtctcaatctcctgacctcgtgatccgcctgcctc

SEQ ID NO: 12234 - DNA, 1104 bp, Homo sapiens
ccgtatcagcatcagcaaactgaacactgaatgattcttactccaagaggcaagtcttagtggtttctattttaactgaaggagagattaatttctgtgcaaggttgaaaaaggtgaccacaaattctttgggcttctttcatcaagaggtgaagtccattaccccacgccttaactctgggctggctttgttgttgttttggccaatagaatatggctgaggcgctgcttccaagattaggcctgaattgagatgccctagcagccaggcagcacctgccagagcatgaataaggctatcttggaccgcccagcgtagccaacctgtgctgaatgaagccacatgaatatgcccaggagaaactagcagaagaatcacccaccttgcccacgttagagatataaaccactatttgaggcagtttgttatgcagcaaaacttagccgaaactattaccttgctaccttgactgctggtgtaatttcccatctcatggagtcacagagttttcttgccaactgcagtgagttggcaaatgggaatgatcagtagcctcagtgtgttttctgatccactccatcctgtattatcatctgcgaataccgtttttcctttaaatgcaatgtgtctttcaaagctgacttgaatttctcacctttcgagttacctgccatttggactcacttatttggaggagatatgtaaagacccagcgtaatacctgtatgctcaataaaaagtatttgctggtactccttcctgcccgtcgtgtgacctgactgctctgggcttctgggggctccccctaaactcgctccacgaaatgacccctccaacctggcacgcccgctctcctaccttcgcccagggctggccgttatctctgtgctgtcacgcggggaagtcccatctgaactggggccttatgaccttcggtacttttattcgaacgtagcctgcgtccctgcctggaacctggttcccgccctgaaggacccttacttagcactcctgcgggctgccgggaccccacggctccgcaggcggagagactaggcgcgatccctgcgcgcccctccttctcttgcgcttcagggggccgg

SEQ ID NO: 12235 - DNA, 1214 bp, Homo sapiens
gagatttttactttaaaaagcttctctcttaatctgggttttatattaaggggctcctcttattttacttctttgttcattgcactataaatatgaatataatgagagatctagtcttaaaaattgtatttttttacaacttcttaggcataacttgtttcacagttgctagaacaaacctcatcaacccagtttttgaacagtagaatattctctttgagaaaaagataggtaattagcattttgttctttctcatgtcattttccttggaaactatactgccttccttctccagttttcccaaatcagagaacaaaagaaggagggttgctgaaatgaaccttgttctttctggctgtcttcttacccattcctcagtgctgaactttttggggtgagagtgggggaatagggttggcagttgtctgccacggccccttacttgtttctggggaagacattcgaggtactcaccaagagatagagtgaagatggaattctttttagaagggaatacagttgacccaggaacagtgcgggggtgtggttagaagcactgaccttcttccctctgcagtcgaaaatcctcacgtgactttttttttttaaggctctgtcgcccaggccggagtgcagtggtgaaatcatagcttgctgcagcctctattgcccgggccaaagcaatcttcccacctcagcctcctctagctgggacaacaggtgttcacccttcctggctaagttttttgatttttagtagagatggagaatttcccaggatggtctcaaacttctaagcttaagcaatcctcctgcctcagcctcccaaggtgctgggattacaggcatgagccactatgcccggccactgtataactttgattctccaaaaatttaactactaatagtctactgttgaccagaagccttaccaataaaataagttgattaacacatttttaaaatatgtattattactgtgttcttacaatcaagtaagctagagaaaggaaaatgttatgatgaaaatcataaaaaaaaaaaaaagcccggcatggtggtgtgtgcccgtagtcttctgttactcaggaggctgaggtgagaggattgcttgagtccagaaattcaggctgtagtgagctatgatcgtgccgctgtactgcacccctggtgacagagcaagaccttgtctcttgaaaaaaaaaaaagaaaa

SEQ ID NO: 12236 - DNA, 560 bp, Homo sapiens
gtagttttcttcccccctccgattatgcttaagtctttagttaaaactctggcatgcaccattgaatccttagtcagaaaatttactaaaaaatactgtgtacctttgcaaggctgtatttatatatacagaacctttaggttctttcctctcagatatctccttctgatttcttgtaatctgttaacagagtgtgtctagtaatgttatattaatgtcatcttaataatagctcatattaaaagttatttcaaattgctaggactaattaaaaaggcttctgacaaagggtattgctttgggcagagagacattttgatatgtaaattatataaattgttatctctatttttttccaagctttttgtagtaaaccatatttttataagttatatagtatagaatttagaggttgaaaaaatttttaaaaatcattcaccatgtttataaatgttaaactttgatattacttgtataaaactaagagaattatttttcccttttcattctctttcactgttacgcattttctttttaagttattatttgaataggtaaca

SEQ ID NO: 12237 - DNA, 221 bp, Homo sapiens; identical to SEQ ID NO: 8251

SEQ ID NO: 12238 - DNA, 16312 bp, Homo sapiens
gtttccgggcggggacactcagggcgcgacgcttttctgttacccacagaggcccgccgcggctgcgccatccgcggccatgaagtttcgggccaagatcgtggacggggcctgtctgaaccacttcacacgtgagcagggaggccggagaggagcgagggaggaacggaaggaagcagtgagcgcgcggtggggaccgcgcaggaggatcagaacggggatgggcgccggaaggggccgcgggaggatggggccgggatgggggtgctggtgtaggccgcgggagggtggggccgggagggcgcggggcgggtcggagggcacttgtggggatgaaggcggctttcaagggacgtttctgaaacttgattccgatcacgtggctttaaaaaaaagcggccactgctcccatagacggctttatcaggcattgacataccttcaaggccccattcgtccctccaccctgacagtgcctaaccttgcatttaactgtgtattgcagtacctagtagtcaataaatccatgttgaatgaatgaatgactggtaggtgcctgttttcttatttgaacactgatgatgtgtgctgtacatctcccctagtttgttgggagaattgcgtgacatcaggggtattaaagtactttccagtgtgataccaacgttaagtggttatttttccaccgagaagttgatgaacaagaaattctgcaaaataagttggtctctaggatacataatgtgcattttagtaattccttattttaacccctgctttaggaatcagtaacatgatagccaagcttgccaaaacctgcaccctccgcatcagccctgataagcttaacttcatcctttgtgacaagctggctaatggaggagtgagcatgtggtgtgagctggaacaggtgagcaaaagcttctgagaggcctgcacactctgcagattgtcactggaaagatcacatataccctccctcatccctcattttttttcccttaggagaacttcttcaacgaatttcaaatggagggtgtctctgcagaaaacaatgagatttatttagagctaacatcggaaaacttatctcgagccttgaagactgcccagaatgccagggctttgaaaatcaaactgactaataaacactttccctgcctcacggtctccgtggagctggtgagtaggagagtcagggtttctaacacagaagtcttggcctcgaaggaatagacatagttagcctagcctttttaacaataaatactgttgaaagctgtttggtttatttaaatttaaagatctggtccataactatattttgcattagagtcagttcctcctcattttaaaattgtgttgttatcatatgcattcagctagaatgctgctttttccaagccgtgaaacttccagcctctctgtttcttgtagtggtattgtcaccttgtctagaaatcatggtttctctatccattttcacctttgacatgttttctccccactcccaccctgcctcatctgctataataacctttaaatggcccctcgttcttcagtacacgtatgttttatatgctactgccagatgaatttagtgcacagctgtcctccaaacacacaaatacacaaactcatgcgcatacatacaatccagagttgctcttcctactcatagaatgaggttcgtatttccttttttttgagacggagtctctctatcacccaggctggagtgcagtggcgcgatctcggctcactgcaacctccatctcccgggttcaagcgattctcatgcctcagcctcctgagtagctggaattacaggcacccaccaccacacccagctaatttttgtatttttttagtagagtcggggtatcaccatattggccaggctggtctcgaactcctgacgtcaagtgatccacctacctcggcctcccaaagtgctgcgattgtaggcatgagccacggcgcccagcccagcttttcttcataactctcaactctttgcagtcaggcagttctcagagctaattagggcatttcatgtcacagtataagtttggtatgttttttctattgcttaaggaaaagcaagatagtaacgtataatactttttgtccaaaagtgcaagatattttggtctgtgagtctcataggagcccctagaaataaatatagtttgccttttaactgttagaaactgcagcactctgagtgtcctatgcccaaagaatggccttctcttggttgcgtcaacatagcaggcttgcttctttctgcctcacggctttacatgtgctgtttccccagcctgaaaccctgtccccttgttcttgtcttcccatggctgctgcttctcctgcttttggtggtatctgaaatgtcacctcctcagtctaaggaaactcccccacactcaccctggtctctgtggagtgctttctcacggctataatgagcatttcatacagtttcatttgtttgcatttttattgatctgtttgttccactggaacactaaggacctttttgtcttatcaccacacttcccagttcctggaagtacccagagtctgttccataaatattggcaccatcaatattggtcgaatggcttttgagtgaataaactgacagcattccacttagatttggtatttcaacttttttgtcccgggtcttcgggtttgttttgttgttgcttaatattaacaacataaaaatatttttaaattcttttcttggcagttatctatgtcaagcagtagccgcattgtgacccatgacatccccataaaggtgattcctaggaaattgtggaaggacttacaagaaccggtggtcccagatcctgatgtaggtgatgcctgcagtcctgctgtacaccccacattaaatggcatgacttgaattctctagttttagttgtagtcttgcagtatattttatttttaaaggatacttaacgaaaacattagattatttgccttttgttatttacataaagcatcttaaaaatgttgcatatgatagaaatgtcatgccatcctatatgtagaaaatgtctcgctcagtaacatcacttaaaacacaaatgatacttttggaggacaattagtatttattagtattcttggccttagacaccaatttgggtttcacaggacttgatcttttcctcagccggtcaggagcgatatctggatgtgcacgaaagccaagaagagaagaatttcatggcttagggctaacatggggtaacggtcatgccgatggttaaccctagagctcctgaaagtaaagatgatgccaaagggcccatttcctcttgctcacaatttgtttaagaagaaagtacagaaatatgctgggtaaaataattacttgacttttactagatggcacctacactgattttgaaaaagcctgtgttttatagagcactcttggtaacagtctcagatgtgatgcagtgactgtctgccatgtttttgtacagagcatggaaaaggcccttgaatcataggtgtaaatgtcccttagaggagggcctcctgctgattgcctgagttatattccccctggaccaatataggggcatctcagctgaagtaccctattccttcttgagccaaaagaatgcccacagggacatggttgctgaggtaaccagaggcaggcattccattctttaattttgcttgagcatccttgagttagtgaaatagaattggttttctttttatatttttaaaagaactttattcagaaaattgtaaaatagtatcccatagtttttgagcatgcatgtgttctagagttagttatggggcccttgtcattactagagtatattaatatttttaatacttgtgcttttttctcattggttttgtaggttagtatttatttaccagtcttgaagactatgaagagtgttgtggaaaaaatgaaaaacatcagcaatcaccttgtaagtcacaacttctttagaaaagaactctgaagtatttggtgggacggcgtgggttctccagctcaccctgcagcagtccatgcaggtgggcacctcctaaccgagttcccacttatgaggacctggcctggtgctgagaacctgcagattgctagttggatttagaaacctattccaatacttttcaactctaattctttgaggaaagcttttatatttgcctttaatctgcctgtttttcctcttatattttgtatgaaacattgtatctttcttttttttttttttttttgagacagagtctcactctgtcgcccaggctggagtgcaatggcgccatctcacctcactgtaagctccgcctcccgggttcatgccattctcccacctcagcctcccgagtagctgggactacaggcgcctgccaccatgcctggctaattttttgtttcgtatttttagtacagacggggtttcaccgtgttagccaggatggtctcgatctcctgacctcgtggtccgcccgcctaggcctcccaaagtactgggattacaggcgtgagccaccgcgcccggctggaacattgtatcttttacctgctaacgtgcccgtatttttctgtgagtcactgatatgactgacagtgagtttggagtttcctgtctgcgtgccaagtgtctttcagtgagccagggacaaagatatgccacaccatagcagcctttattccaagcacacctcacaccaagctagggggcacttttatatttctgtttattttctgtttattttgtggaagtctcctatggccacatggctcgaaatgttacagtgtgtgacagtggtgggaaatgtgtaggttatcctcattcatacctggggttattgtgaattcttccttcactcactgcccctccctcctccccctgctccctcctatcctgctccaaaaaacacccttggttatgtccctgaatcttctaaaaaccactgtccacctgatgaagcataaacttttgatcttgacagtgtaccaggccacctttatagccacatctctgttgtattgccacaccctccctgcagaacgaggctgggttctggtattcccccacaatgcctcttcttttttgttcagtttctttgccatttgacacatggcttcttctctccatctccctggaaggcacttagccattctcatgcttcatcacagacctttccccaccacccctctggaagctcctccatggagctgagctgtccagtgtacatggtaaatcacctgctaagatctctgaaggtctcgtgaaccaccagcttcttgataaaggaaaccccatcttaatcatctttgtgtcccagctgcccagtgtgggattgccactcagtaggcagcaataagtgttgcatggatctggaacaaaatttagcttcaagaggtctttgaaatcacaaaagtattttgaagcctagaaaatgtacatttgactgtttttttctagagttctgcacactaagagcaatgctgtcattggacctgggtaactcaaagcttttccttcataacttaatctataaaatctgttttccatgaagcagtgtgcactgtgctgacgttggtgtcacctgtgactgcagtgatgctgatccagttgtcaggctggcttcatctggggataccctggggacttccagagaaattcagagaggcccaggagagaaaagacagggctgttaattgaaggatggcatttgtttgttctttctgttcaatgaaaatgagtcagcaaggtagagaggtagaagggtagcttagaatcatcagaggtgttttgttttctcttttttggagtttaaaaaaacatagaaatattgtggagaggctactacgatctggaattactaaatggaaagttatcaagttactgtagcaaagtacataatgaggtcttcctgggtatccagaattctgtatctgaatattacaggcagtagaattaaggaaaatgggtagacttaacacactaaaaatgcccaccttcccattagagatgcccagttacttcctttcattaaatgcgaggtgtgactgatggggtgggttgtatgtgactcatgcaggagcagaaaaagaagcaagaactggagggaattgacatcatgttctaagacattgcttctaagttctaccatgcgtgtgaatcccctggaatctggttaaagtgcaggttctgatttgggaggtctgagctggagcctgaggctctgtttctgaccagctcctgggagatgtcgatgctgcctgtcttcagaccacatcatgtagcagtactttgtgatgtgtgcctgtattactccgttttcacgctgctaaaaagatattacctgagaccaggtaatttataaacaaaagaggtttaattgactcacagtcctgtatagctgaggaggcctcaggaaacttacagtcatgacagaaggcaaaggggaagcaaggcacgtcttaacatggcagctggagagagaagaacacaggaaaaactgccatttttaaaaccatcagatctcatgagaactccctcactatcaagagaacagcatgggaaaagctgcccccatgatccagtcacctaccaccaggccccttctcagcacttggggattacaattcgagatgagatttgggtggggttgctgagccaaaacaaaccacatcattgccatactatattgtacttcaaatgttatctgagaaacggctctgcagggtcacctaatgatagaaaccagagtctatgtttaggagtcatgatatggaagaggggagtcattggagccacatacctgggttcagctccaggctgcgctgtgcagtgagtaccctagtgctggatactaccccaaatggggataacagtgcagctatgacaggggcttcgtcagtttttaaaaatttagagataatttttactaggtgcccagtatagtcagcattctataaacaatagttgactattttaaggaaatcattgaaagatcttaccctgatacttaagaaatcaagtgtgttgttgtgtataatatcccaaataactgaatcttaaaatagacatgagtgaccagtgttcagagaattagttgtttgttagtttcttcagtaagtattgacttaaggccaccatgtgctaggcaccaggtgttaatggttaggagggagttggaatctaatgttctgttactgagattcttaggaatttgaagaaaacacaagagaacatttaagcctgaagtgcatctaggcccattgcaagttgcatttttaagtaagtatttatttatttatatctaaaaccattgcttttcaaaacaatgggaatttacagatcttgggtgtgtggttgtttggaacaaatgagctaaggtcatgtgttagccttagccccactaagcagtctagcatattcacaaagattgttttatatattttatttcagtcaactattgttccagattgtaggaaaacgggttaggaaatataacaatatatttttttggattaatgaaagaaaagggttgaaaatgagtatttctcattcaaagtagattatacaacaggtaagtttggggcactatttttctattaatgtgaaaagctcagaaataagagctcacccaaattagaaaaactttgtttctggaatgaaaactattcagagttcaccaattttaaggaataagaacaaggaacactaaattgtattcagtaaacatgaacactgatacagagccgtgcagacagagtgccttctctgttttctttctgtgacactgtgaggatggaatggccctaaataagaccagttgctaggtggcacttttctagtactagatggcaaaatgctatccagcagactacacactggctttccagagacctcctaggctttaacattgggcagatatcaacatcaaaaagagaaataacaggtactggttcttttaggaggaaatttcattgtaggtgcgggagtggaccaggataggttagcaaaacctcaaaccatactgtggcatatgcttcacttctaggttccatccaattaaaagaactgattggttgttggggtgggtagaggagcttcaaaggaaaggagtcccttgtgacctgtggagacagtccccgggcagcaagagcaggagtagaagaggggtgcccgatggtatatgaggggatggcagaagtctggtagcctgggcgtgtggagtttggctcagccatcctcagtcctggtaacccaacagcagccccagacccttctggatttggacatttcattttccaacatgtgagtttattttctaaataaatggctatgttctcatgagattctgaaggccttatagtcatattaaatgtgtgtttatgacaaatggttgatttatattttataaaaataagacactgatttccacattcttctcattttcccccttcctgttttgtaatggttatattatgtctacatcatcagagcataaaattttattactacacgttattctgtcctcttcattcctgttgtttagttttggttctaaaggtcaaaataaggctcacactgtttatgctgtaacttctccaatgatttttttggttattaaaagcctattctctagcatatcactcaagaaggactcacaggaataggatttcattggttatcatgtgtttataatgtcagtttggctcactgcactgcattgtctgctggtgtatattattgctatcaaaaagaatgactccattctgattttgtttcacagcttggatttattcatttgaaagtggggactaaataccctggggatttttcccatttttctttcaatccaattgtcttgaccatccggggtcagttttcccaggtgtgtggtgtgtcctttcaatatgtgggccgaactcttcattcacttcaggaaagttttgagctgtagttgatagcatttcttttccagtgctttgtttttcttctgggactcagagggcttggatcttctccactgtctttattattttctgtcagatccttttaactctttgtttctgtttggtaaattttatctttctcctttccatcccagtttctcttactattctctctgtggtgcctatttgctctagtcttccttctaaactagtttctgtttctgaaatttttccttatgtttctaattacttcctgtgctgtcagctgtgttttatgtgcgtgctctctggtcatctcatgtctgagcttccctaattctgatttatgttgttgtgtcatagcgtctattattgttcatttctcttttttttttttttttttttttgagacagagtctcgctctttcacccaggctggagtgcagtggcgcaatctcggctcactgcaagttccgcctcccgggttcatgccattctcctgcctcagcctcccgagtagctgggactacaggcgcccgccaccacgcccggctaattttttgtatttttagtagagacggggtttcaccgtgttagccaggatggtcttgatctcctgacctcgtgatccgcccgcctcggcctcccaaagtgctgggattacaagcgagagccaccgcgcccggctggtttttctggttcttttaggaggaagtttcattgtaggagtgaaagtggaccaaaatagttttctaatttaatgactctagaattctctattctttgtaaccacaaaatattaaaacatgcatcctcaccacatccccaggactttctgagatctgtccctctttttccttcatttaaagtttcattcccttttttttgcccaaggtgcccattctgcttagttgaggctcttacttcccgtggttccttctcagtgcaggactctctcctgctgtgagggagttctcatcagctccacccagccctccctagagccctgcccttgtgctgctgtagtctcctggcaagtcctctcggagttccacctgttttcacatcttcactgagttcttcattccgggaggcaggcagggggacttcccctttgagatttttgggagatttctgagttcttggctcttgggccttatcttctcactttccctgatagcacgggggtctcagtgtgctctgaggtgttttgaggttttgtagggtactttgtcatctggttgtgtgaaagctgttgcccatggagtttttttccttttggcttccttttctaagactatgtaaaatactcaatttgcaggttattgaagcaaacctagatggagaattgaatttgaaaatagaaactgaattagtatgtgttacaactcattttaaagatcttggaaatcctccattaggtaagttttctagtgggttatattttgctttggataagttaattgtttcagataacctacctgttgaggtctcttcatgtaaaaaggttgaaattcagttgactttgtttcatgcttgggtgaagaacaaaggaattgagactggactatgtatccctgtggtgtagtggggcagttagccaccagggggagaagctgtgccaccaagtagctgacagatctgtgcagggtctccatcctctgtagaattcggatcaagttacataacctccaagatcccttccagctattcaattcctgtcctactcctaaagatttctatttctcacctggcatggattcagaaaggtagatacatttgttcttatattctcctccttcagttacttccatatgtatgaaattagtgtagcagatgcaaaactgtttcacttgatcacatttcttatctcatacaaggtaataagggacgatagagtcagttcagcaagtggggagagaggggacggttggacagtttggtgagttataagccaagagggggttagaatcatggctggaaagtggcagctgcacagtagcaggggctgcctgagcaggaaagcaggtaaaggaccaggggagaaacacctggggatgatgagaaaatcattttatgatacataagtgtgccagaaccaataaaatcggccctagtcacatttaagttactacgagtctgcttgaatataaacacagattttagcatagagttggaaggaatttttactttctagttaagagcatcctgctccagcagagtgaaatccatacggttatgcctttgataatattgtgtaaagcgattcattctgatgtcactcattttgtttcttttaataaacataaggtgggacttatctttggtactttctcagaggtagaaaggatgttttctttttttttttaattccactccagaatgacaggccttgtattagttaatgtatatattttcactcttaaaatacatagtaagtacaaataaataaaattttctttgacctgaagagggagattgagttatatttcaagtcccctgtaaataaagatgccttggaaattatcatagtattttaaatagttaggacctaatgcttaatgaatgacaacatttacaagttgcaatatttcttcaggatgctaaaatcagtgctaaagtgaatcatttatttaagtaaaatgcattgagtatctccaggtttcctgttacgtgggaagatgttgtatttaaatgcattcctatcattttagcctctgaaagcacccatgaggacagaaacgtggaacacatggctgaagtgcacatagatattaggaagctcctacagtttcttgctggacaacaagtaaatcccacaaaggccttatgcagtgagtgtgcttctctgttttgtttttcatattctttcatattctaaatactgcagtcaactctagtctaacagattgcatatagtctcataaatccaaaaaaaaaaaaaaaagctcaattatgtggactttaacttcctagaacagtggggttttttaaattttcctagattcagaagtacctaaggtggcagcagagaaacaacccctgggcactctgttagggcctgaaacctgcagccacactggttggtaggtgggttgtgtgctgcctcagttggccagcacacctggagatgccatcgggagaatgggtgcagatcatcccaccttctccatggtcatctaatttgacctgctcagagtgccagacacggtttggcttggatttaagttttcccttgtgatgtcttgtttcctttctgtggctatgctggcctgcattcgctgccccatatctgtcccttggctgctggttgttaacagttgcctcttgattctggctgggccccatcttgtgaggtcacacacctgctccagcactcttcatctactgaccacacatgagaaaggcattacctgccaagagcttttcaaggcatttttgtcaccttactactgaaatcacagcaacctaaaagcgactgcatcctggatttgaagttccacgttttgtagcatagctcccaggctgagctgagagggaggttgagccaacactgcacctcatccccttcagatctgcagtgtgctgtagagaaggaacagaagattctaggtggcaatgtcaaggaccagcccttttgaatgagagacatgaagagaatcagaagagaccatgggaggggcaatgggtgtttgggaattggggaaggtgtcacacagttggagtgatgggcacagaaggagatatcgccagagaagcagctctgagggtagagatggagaagctagactaggccagatcatggggagttttggggtgaggtacctgtgctgcattttaaggaactttgacatggacgatgtcatatttctagggctgagcatagtgggagctgtgtggcagtgcagggtccttaaaggtgcttctgagaacctcgatgtgcatggagatcgcctgaaggtcatgtaaagggactccttattcatagtttgggctgggcctcatggctgcacttctcccaagctcctgtacaatgcccagacccttggtcctgacaagcacagtgtgaatggtgagagagtgaaatacccctcctgtctgcagagtgtggaaacacagggtgtggggggcccctgcgctgcacaacatcagtctttgaacttggtattttggggactttctgaatccaaggctgttgaggaacatggaagagttcttatcaaaggtggttgactaagccaagtgtcttcccaacattcactttggtgtctccacgtgtagcagagaaaggaagaccagcaaattgtgatgtagcaaaaattttttttaaaacaccgtgggttgaacttctcataccttcttaacttcccaaagccccttttctgtctctgttagtctccttcaggtgtcggctcaattgtcccctcctctagctaggtcctgccaccctcagtctctgcctctcctgtgcccttgcacacctctcctaaagaatgtttgtctcctgcttgtcctttctggtcctttccccaacctcccatctcctgggattggcctctctgcagcctgctcacacatggtttcttgtcactcactcatatctgctggagagctatcctcggctgctgtgctgagctccccgagctctcggtggttgtcacactgtgtgctcctgcccaccctcatgtgctctttacttccctgcttggttgcatgcctgatgccttggattttagccatcacccatggccctcacgggattggcaggaccgttgagatgcagggatccatcccatgtagcagtgtgtgacacagcctgccccaggtgttgggggatcctggctcttggctcttctcagcacagttcctccactcactggtgaggagctgctcttcgctgcagaaggatgctcatgtgggtgaatgtggtttgccaggaagccagcctgctgggtgttttgccaagggcttgggccgcttcacttttcctctcctcgcacagggagccgccagtgctggggccgtgatgtagcctcagctgtggcagtgagagtgagagactgtggtctctgcagctgcctcagggaagacagatgcctaaaacaggaggtgcaggctgggaaggctgttctgaaaaagtagagatcaaaatgtgtgtgctgcactaggtctctaaaatcatggcttttctcttcccagatattgtgaataacaagatggtgcattttgatctgcttcatgaagacgtgtcccttcagtatttcatccctgcgctgtcctagcaccctgtcgctggagttggcatgcagagactttgtcaggatgggagaggccgcaggtgttgtgttctgatcactggtctgtgccctcacagcaccgcacatcgacacactgtacttatttgtccctctctaacattttaactaaaagttgattcaacaacacacagttggataaacatatcacttcatgttgctcatgtctgttttgctttgtttttaagacactgaaaagaaaagctagaatttatttattcagactttaaagaacaatttctcattgatgttgtgaaaatcgtcatgtatttagacttggtgtagtagccagaattcgtaaagctgttgcctgggagcttggtactttccctccaggcagaggctctagctcagcacggcctgtagcgcacagtcagtcttgcatttcagtgtgttcaccccgctgctcctgccccttggagcccagtgacagaaagaacagcctctgtcaccccgccgccactgccttggttactcagagcactgtggggtgtcacagctgcagcatttggagtctctctcttgctgaggactcaagcccacctgagtccactcccctcttgatgcctagagagctggcccagccaacacagctcttagctgggagctccttctgccattccaactagtttcttcctggggccagttttgggtttaggttgtaattccttatatttctttcttccacagtgtatcggatctgtcgttctggaaagaagacccttctatttagagtagaaacaaacgaaacttctaaggtatcatctgtgttaagtgatgagaccatatttctttgatgtttctgaacatcaaagctgattcagtactggtagatgtgctcattctccctgaaacatacccatcatatttcctattataattacatctcattgtcctgtggaggtggacatgataaacattatcttttgttttcttgttttgttttgtttgagacggtctcattctgtcacccagactggagtgcagtgccacaatcatggctcaccgcattgacctccttggctcaaggcatcctcccacctcagcttcctgactagctgggactactggtgtgcaccaccacacccagctaattttcaatttttcatagagacagggtctcactgtgttgtccaggctggtcttgaactcctgggctcaagccacccgcccacctgggcctcccaaagtgctgggattacaggcatcagccatcacacccatccataaacattatattaatgtcacattacaaaactgagacctaagttgcttaggataaaatgaaattggaagactagctaacatgaaaatttatattttggctttttcatgttttttgataaaaccagtgtatttgaatgattcttttgatgtttagtaatggttttttgtttgttttttggtttttttttttgagacggagtctcactctgtcgccagtctggagtgctagtggcgcgatcttggcttactgcagcctccacttcccaagttcaagcgattctcctgcctcagcctcccgagtagctgggactacaggcgcatgccaccacgcccggctaatttttgtatttttagtagagacggagtttcactgtgttggccaggatggtctcgatctcgacctcgtgatcacccaccttggcctctcaaagtgctgggattacaggcgtgagccaccacgcctggcctatgtttaataatgttgaaataggatggaatattttgttaaattaacattttaaaattagaagacaccgttttaatttttaaacccttcctcctctcattgtaacgaaattaattccagctgcagtgagaaaacttaaaaatcatgatacaaaatgaaacaatatctgaaagtagttttataaaactgaaattgctgttaaagagaatgtgttagtgacttaaccatttgctctatgtgatgtttattatcaaatacatataattttgaagattttaatgaatggcttaagattttatctttgtgtagaatgtggctaaagaaaccttagttgagattcaagaa

SEQ ID NO: 12239 - DNA, 352 bp, Homo sapiens
ccacagacttagagaagggcacagtgctgctttattgaatgatctaccaaggtaaaattttgccgggtcaagaaatagcaatttaatccatttaaaggaatgaatataatttgaaacattaacttatttcaagactaacatctcaaagtgttgagacctttattaaaagagctttctggattttgagcatactttcactggctgtgatttataagaatttgtggtttgtggagtactgtcctaaatgccagggtaaaataaggcagtcccatgccttacctcgcctggctcagggcctcacatccttttggtacgcacatcttttctcttctcccttgttctgctctcccgc

SEQ ID NO: 12240 - DNA, 1306 bp, Homo sapiens
gaaacaaaatgaaatgcaaacatgctttgaaagagcacagtcttgtcctgtccctctgcatcccctctcctcatttctaatgaaaaaaatagtcttccctttccctggttccttcaacagtctcttccttaggttatttttttcctctctcctttcctactccatccagacttccccctgcctaatcttaaagagatgaattggaagaatatgcagtcgtgtcagaaggatgccattgtcagttcacacaggcagacactaataggataaagtattatctgacttcctttaagtccagaaattaagtcttcttgcaatggcaatagattataacttataaccactgtggctggcaggctgcagaaacaggctgttagtatctgaggcctcagctccatttctgggcctattgtgagggatgcactcagcattcctccaaacacagctgcatgatccagggaactggcacttggctcctggatggaactgcctctgtggagagctgcctataactcattcagttcacctgccgtgggagaagctgtctgaatggtcttaatgaacctggatgagtgggcaggtaaagggaggaagccagggtcttgaagactgggaagaagtagcccgaggcaaggaaaccaaactttgcacagggaacacttagtgtgtgaaagctcttctcagtcatccttgctgactcattgagcaggtagtaacttatctagtgactaaatcagcaccagcttagagacacagggaaatgagggttgagaccttaaaggaactgtaaaagagactacaaattaaggagttgccctggagaggaaatatcatgagaaatgttaggaagaaagagccatcattcttcaaaatggagggcctcatgcaggatttcctaggtcctgttatggcagatgagtgtactcaaatggggaatatgggacaggaaacctgatacaataattaattgaagggtatttttttattagtggggctataagaaggtaggtgggggctgggtacagtggctgacgcctgtaatcccagcactttgtgagcccaaggtgggcggattgcctgaggtcgggagtttcagaccagcctggccagcatggtgaaaccccgtctctactaaaaatacaaaaattagccaggcgtggtggtgcgcacctgtaatcccagcaactcgggaagctgacgccaggagaatcgcttgaacccgggaggcggaggttgcagtgagccgagatcacaccactgcactccagcctgggcaacagagcaagactctctctcaaaaaaaaaa

SEQ ID NO: 12241 - DNA, 105 bp, Homo sapiens; identical to SEQ ID NO: 5457

SEQ ID NO: 12242 - DNA, 229 bp, Homo sapiens
ttcttttagaatgtttctattgggacttcacttgaaaccatcatgaagaagacaaattctaattaaatgtatgtgataaaattatagccagggccactctgttcccaagagaggatttgagatgggaggaagaggggacaatttcctagctttctggaccccagtttcagggtagacccctgagtcaacctgggctgccagagctttccctctgagggtccccttgctt

SEQ ID NO: 12243 - DNA, 425 bp, Homo sapiens
aggtaggagggtatgaaagaaacaagtagatcaagtactgtttctttggcatcctataattgatttaaactgtagtaattactctagtaatgttcctgagtgtacagaatgaacaaacctgaaagcctaagtactatcttggtccgtctagctcccacacctagcttgagagtagcctctcatatcaatgcttccctgctatcctttcaaaactctttttgatgggataagtgggcaaagatcatgccatcgtctcaaatgctaacttcctttgacaagacagtttctcccagggatatcccccacaggcctaggccaaatctctgactcactgcaaaggtccatgtacactgaactgatagacatcactatttttattggaaaacacaatttatataacactcttcctctggaataatactctt

SEQ ID NO: 12244 - DNA, 160 bp, Homo sapiens; identical to SEQ ID NO: 5619

SEQ ID NO: 12245 - DNA, 2051 bp, Homo sapiens
caggagcagggaagtacagtcctttctatgtgtctgcaaggaggactcacatctttggtgagcagcactgatgcctgctgcaacctggcatcccctttcctgtctcctttctttcctggtctgtgcagtagtagggtgtattagtccatttttgcactgcaataaaggcatacctgagattgggtaatttataaagaaaagaggtttaattggcttatggttctgcaggctgtacaggtttctgcttctggagaggcctcaggaaacttacaatcatggcagaaggtgaaggggaaacaggcacatctccacatggctggcaagaaaagggaagagcaaagggagaggtgctacacacttttaaacaaccagatctcatgagaactctatcatgagaacagtaagggggaagtctgcccccatgattcagtcgccttccaccaggcccctcctccaacactggggatttgggtggggacacagagccaaaccatatcataggggataggatccttcttatctggtttctttgctaccgtaattaatccatccttataggttcaattctaaaccctgaagacattagtatttcccattgcccttgggatacaaactatttcccttggaccataaggctctctccttatcagacaccaccctcccatgtatgccagcctctctcatactccaggaggtaaaaagctctcacttctgcctggaataatcatgacccctggccacccctctcagttgccaggccactctctctggcctttgaaactgtactcgcatgtcctggcctatccacccaaactaaagcatgcactgcctgttcctttcctttgaccacttatcacaatttatttatttatttatttttgtacatttgcttaatgtctttttccctccctggactgttggttcaccgtggttttcgcagggcctggtgcatagcaggggctcagtcatattttttggatgaatgaacaaaccctgaagatgctacatctgactctatatcttcattttatccttttcgtatttcctattacctctaatttctcttccctgcacccatttctatttatttcatcccagtttacctcctgctgccagattaattttcctaatgcacaggctctatcatatcatgagtttctcattgctacatatgactaatttgccaatatttttgcacatcagaatgtgtatcactttgaggctggttctgtgtttgttttagtttaggaaaagctgttcagattgtctgtaaatccgtatggggatctttgcataggattttaaagcagccacacatcttgtacaaaatgtataagattaattttctatgttaggaccatttgttttcaccaattccatagagctccaatgtgtaaaagaagacactgatctaactcttgtgttaaatatttagtaactcatttatctggaagaaagcaaaacaaaacaaaaatacaaggaataaaaatcactgggagtgcttttcattcactgaataatgagttttgcaaggagcacgtggatggtgacattatatcttttacatctttattttctgtttcttttttgactccttatcagtgaatttatcttattttatacttttactttctatttctttcttgactctttgttggtgaattggtagcaagagacttactgtctgatcagaactttgaatcttcctgcctctctttctttgaggttgacagggataaagataattaagatagcgcttgggtgtgatgacactggaagacaggctgggtcagggcctgtagtagagacttcccccctctattgaatgttaatctgaaagtgaatctgaaagcagatggtcatgaactacccagggtctccattaagcccatgaagtttattttaaaactcttaaaatagattgagattcaaattgagattcatgtctattttttaaacattgtgtcttaacaaagtagatgttcagtcatacagttaggcaaatgttctaaggaaagatgtttaccatgctaagttaaaaaaaaaaaaaa

SEQ ID NO: 12246 - DNA, 2051 bp, Homo sapiens; identical to SEQ ID NO: 12245

SEQ ID NO: 12247 - DNA, 8041 bp, Homo sapiens
aacaggttgtaaaaaatgtatttgttaactctgtgcacaaacgttttatactaaataaatatcaaactacatcttctcaaagatgtttatatatttcttaggtcacttccatatatattatgtatagtgaaaccatttatacaaagcaatgacttaggcaatgcaaccctagtttgttaaaccatttcccctgtttttatttaaaaatgataaggttgtgcttctgtataaagtttgtacatctagcaatgtaaaatactgacacattaaaaaaaacaaaaagtagaaactcaattcttttgattcagtgctcttgtgtttttaaaaaaggaacaaaaagtaatgcaagactcaaaattttggagtggttggcgtgcctctcttcattttactttttgactggctgcctgtatgccgatgatgatgtagctgagctgtttgtgctgctgctgctgccatagccatttgatgctgcaagaatcgcaactgctgcaaaagggagggaaaaaaatcgagttatgttaaatgcaggcaggtgtagaaaggtgcttttcctgagtgacgaaacaacacaactgaaaaagggagaaagcaccaagataacaaaaagggactataccacattgagacaatgcacagtcaaacagcaccagtggcacagaagcctgctaagggctttaaaaatgattcttggcaaacttcaaaattatttgttactttgccctgccagtctatattgtagtaactcagcaacttcagttaccattttgttgtataatgatggtttatagcaatataaaacaaccctgaatatcaagatagtcaactataatatgctgactttccttcctaaaattatggtataacatttttctaaataaacaggtatgacatttactaataggaacacttttctgcagtaaaatattagaaagttaacaattggcacttacaactgtctttcaaaatatactgcatactagaaaaatgtatgttaatgtgccaccagcacttcatgaaaattttatagagtatggcttaaatatacaaaatatattcagtgctccaagttgactggctaaaatgtcagactttaaaatttgctaaattatttaccaattactgtacagtcttaaagacagtaaaataaaactaaagcaagttattttgaggtacttttggagcctgagtatctttaaaatgtaatcagagtgaagttgctggattacttgtatctgttgctgctgctgttaaaggcagaggaaagctggaatctctgctgaggaaggctttgctcaggtctgttctcggcagagccaagctgagacaacactacagagaggagaaggggaaagcaggccagtcaaaaagtttgaaggctaccagggttagaaaaggacaacatagaaaatgaaataatagaaaagttagcagtatgattaatcttaagtatcaaatcatagacatttcagaataaatttagtatatggtctcctgttagttgggggtaccactgataatggaactttctggacacaaaaagagaagggagtgcattatgtatcaaagcactgaacctctcttctcttgcatctgtataaaatttgatattgatgctattttgtttagaagagtatattatttttgaaataaaaccaacaaagtaggagaagggagatggaagaaatccaaactattgtaacaacaaagctggtagacagacaattgctttaaacaaaagatgctgcaatgaatatcagactactctactaacaataaaggtggtgaactgagactaagcattgtttgttatttttttagctgaatgggaccacagtaatcagttcaacactcattttacatatggggaagtttgaaggccaacatgatttaagtgactcagactcaaagttaagtatggcagtctgtggctaagaacattctcatgatttttttcagactagagttgtttccactaaattatactacagctattttcggaaattcacaattggtctgataaaggtatatgattatataaacttctatttggaaattcactacctctaaattggaactttatatgtaaggataactgacttccaaaataaagattatcattctaaaagacttctaaaggcatcatagtaagcccacagtgataagatgctgacaacacagtcactcattcaatcctcaaactcctatcatagttttcttatacatatggcttactcttttaattaagtgtgaagttagaattatcgtcttcaactgacaggaagttagaattatcgtcttcaactgacaggaagttagaattatcgtcttcaactgacaggataatcattaagagtaatctttagttcaccatttactgctggaagtgttgagaagtaatttaatctttttttttaaatgataaaagtgacttacagaagttatgctattgaccattaagacttaagtcatttatgcaactacaagttaccagaacgagacaaaagattatgcaatctagaaaaattcagtcttaacccaggaaaacaaaaaagttattaattaagataactattggcaaacactgaaaacagctctggtaacctagtaaagtggataattattttgccagtaaactgtaacaaggaaacacaactgtggtaattatgttaagtcaaagctcttaatccactatcaatgaaaaaaaatctcagccatcaatcaatttaatagtttacacattatagctttactttttcctgtttactggttgcaagggaaggaaaagaaaataatttaagcggtgagatcccaaatagattagatatgtttagtaaattcagcatataaagttatgaagatacctaccagctgcctgtgactgcataaaacttcctactccagtaaggttaataacagcagcttgctgagcagataaggcctgttcttgactggttgaaccttgctcagaaccctgaataaaaaaataataaatgacttgtacaagaaagaaaaacaaatttgagctggtgaaaagaaatcagtattttttcctatatgaaagaaagcagtattagactagtcttgtaaaaagaataacaaggaaaatacttcaaaggtatttagaataagcaagaataaatttatggtatttgaacaaagaaaacttcatttttcagtgcatctgtatttattgtttaatgctacctagataacgcctaaggcttttataaagcttcactgaaacaattttttaaagcttaaaacaccctttgtaacataaacatagtgctggaacttttagtcagcagactaagtcaagaaaaggaaaataaaggtatatagattttataggaaaaaataaaatgtcttattttcaaatggcacaactgtctatatggtagaaaaccctaagcaatctccaaacagctcctagaagtagtaagtccagtaagagggcacaaaacaagaccaatatacaaaaatcaacactatatatactagtaatgaacatgtgaaaactgaaataaaaaaaataccattcacaattactcaaaaaaaaagagaaaagcttaggtattaatcttaagtctaagaaaacatatacagggcttgtataccaaaaactacaaaacattgactttggtctagataaggacatatactatgttcatgtactggaagactcacatcataaagatggcagttcttcccccaaactgatcaacaagtttaactcaattcttttagaaatgctggcaaggtttttgtagatatagacaagatgactttaaaatgtatatggaaaggtagagaacctacattagctacaacaattttgaaaaatggtatgggagaaaacactgcccaattttaagacactacaatgaacaagacagtgtggtattggctgaaggagagacacatagattaatgaaacagaacagggaacctagaaatagacccactcaaatagacccaactgacttttaacaaatgtgcagaagtaattcaattcagaaagaatagctgttttttttctttgttgttgttttcttttttttcaacaaatggtattgaaacaattggatactgataggaaaacaaaaacaaacaaaaacaaaacacggacctaagttgcacatcttgtacaaaaattaactgaaaatggatcatggattcaaaataagaaactataaaactgttagaaaaaaaacacaggagaaaatctttgggacctagagctaggtaaagagttccgagacatgaaaactagaggatattccataaagaaaagatactgttaacttggacttcagcaaaattaaaaacttttgctctgcaaaagacatcctttggtaccacctaaaatagtgtctgaagtaacatttcagtatataattgcaagccaaacatttcaaaagttacatttatcttgaggggatctccctggatataaaagattggacaaaagagcacagagctgaaaggaggacacattattgaatttggaacccagttcatgaaatgaacaacagaataaggcagaccacatcaccaccataacggagctatgataaaacaaacaaaaaaactcaaaatgcaaaaaaactacaggtgatatcaatttccccccaaagcactccacaaacctaatgtagactataagccaccaccacaaatggaatattcaaacaaggaggaataatgattaaacaaacatcttgaagaagaaaacaaatactaagaaataaaaggactcaggctaaaactaaaaggatgaaaaaagacgtactaagctaacgttaatcaaaagaaagaaacaagaaatattaccagagataaagaaggtcatttattaatgataaggggtaaattaatcaaggaaataacaatcctaaatgtatatgcacctaacaatatgggctcaaaaaacaacctttagcaaaaggaaaaatagaaattttcagttttggttgaagacttcaacacttctctcagtaactgataaaacatacagaaagaaaaggatatagaagacctgaatgatgccatcaaataccttgatctaatatggaacactcctaacagcagaatatacattttttcagccatatatggagtattcatcaagacagatcacgttctcaagcattaaacaaacctcaacaaacttaaaagaaccaaaaatatgttttcagatcacagtggatttaaactagaaatcaactgcagaaagatatttggaaaattcccaagtatttggaaatcaaacatatctaaataactgatttaagaggaatccataagaaaattctgtggaacaaaatgaaggcacagcatatcaaaatttgtggaaagtggcttaagcagtactgagaaggaaatgtgtaacattaattgtttattttagaaaagaatgacctcaacacaataatctaagcttccacttacgaaactacaaactatcatccaagaaaacattccagaaataaagaagtgactctacacattaaaaggatccacaggaaaaacatggaaaaatcaattctgacacacacaccagtgaaaatattagacaagcattcagggcctctaggcaaactgcttaaataaacttacaagagcaagataattagactggcatcagatttctcaaaaacatataaagcaagtcaacagtaggaagagttcttaataaatttaaaggagacctaaaactagagaacatttataagaaaacaagtgaaaatgcttcaggacattggatttggcaatgatcttcaatatgataccaaaagcacaggcaagaaaagtaaaaagagaaaatgaactacattaaaataaaaaaaaaaaaaacttctgtgcaatggatgcaatcaagagtgaaaagacaacaaatgggagaaaatatctggaaatcaaacatctgatatatgtgtatatgaagaatgaagaactcctacaattcaacaacaaaaattaatctgaaaaaaaaaaaatgggcaagggacccaaacagacttttctccaaagatggtacacaaatggccaacatgcatatgaaaagatgctccacaccactagtcattaaggaaatgccaatcaaaaccacaatgggattatcacctcacacccattaggaaggctgcttaaaaaaaaaaaaaaaaaattccctaaagacccaaccaccaccagaaaataacaagagttggcgaggatttggacaaatcgagatctctgtatgttgttgatgggaattaggtaaaatggtacagccactatggaaaacagtatgatgcttcttaaaaaattaaaaattaccacatgaaccagcaatccaacttctgggtatatatccagaagagttgaagacagggtctcaaagagataattgtacactcacactcacactagcattatttacaatagccgaaaggtggaagatacccaagtatccatcagtggatgaatggataaacaaaatatggtatatacaagtattattcaccatgaaaaaggaaggtgattctgacacatgctataaaatgaatgacccttgaagactttatgccaagtgacataagtcaaacacaaaaggacaaataactatataactgcacttatatgaggtatcttgaatagtcaaactcatactaacataaagtagaatagtggccgaggggaggagttgttatttaccagatatagtttcagttttgcaagatgaaaaagttctataatagaaatctgttgcataacaatgtgaatacacttaacactgctgaattgcacacttaagaagttaaaatggtaagttttggccaggcacggtggctcatgcctgtaatcccagcagtctgggaggctgaggtgggcggatcacgaggtcaggagatcaagactatcctaacatggtgaaactccgtctctactaaaaatacaaaaaaaaaattagtcgggcgtggtggcacatgtctgtagcgacagctactcgggaggctgaggcaggagaatcgcttcaacccaggaggtggaggttgcagtgagccaagattgtgccattgcactccagcctgggcaacagcgcgagactctgtctcaaaaaaaaaaaaaaagttaaaatggtaaattttatgtgtaccttaaaattatttttttaaaagaaaaatcaaagattttatatctagccaagtaatctttaatgtgtttagaatgaaaaaaacagtaagtttttaatgtgcccttcctgaggactctattagaggatgagctttatccaaccaagacctgactgggggaaactgggcaaaaggactaatggtgaatatttcatataatttgtgagatagagaaactctggatttgggactcaggaatcaatatttttttaatttcccagatgactccagtgtacccaaagtttagaaacacttgtacttccttcttctactgtcatttattgcaattcttattcaatttctttccctttggcagtgtacacatttgtttttgtctgtgttcccactgccctacattttatgataatagggatatctttattccaatagcaacaaaatcctaaaaacagaaagataatgatggggtagaaaatacatgagtgataggggcacaaagacctaggtttgaatctctggctctgccactcactgtatggctaagagcaagccatttatctggatctcaatcatctatgcaagatgcaggtgataccatctattcagtatggtatgactgttttattaggaatacacacccaatagctgattgctactattgttaataaaaacagtacaggaaatgtttacactaacaaagcaaatgaagtatgcttggaatataccaaaaaatgttataaattcgatgtaaaagcatatggaaggctagaaaatccatacctgctcccctggctgttgaggactacaagttgtgggctgctgaggttgttgtggtgtaaactgggagagctgctgttgctgctgctgcagagtgttaaaaataagtgaaccacctggaagct

SEQ ID NO: 12248 - DNA, 1465 bp, Homo sapiens
gtttgggtctagttcacatgctcatccctggacctaccactgcgaccgtggtatcaggcactctggctcagccaaggttatatgcccatgtctctgtgtggagtgggtgaaggaggaggaagtaaatgatatgcagtttgatataatagcaaataaccaaggggaatagcaataaccaagggaaagggaagctgaacatttatgatatcctgtagtcaatacccccttaatttattttttgcatggcttaaagccagggctcttatttcccatttggggctttctgtttttttcttgagcttttaatgaacgtttacatttcatcagtttggatttctttgctgccagtgttggatatttgcttttttaaaaacaaaccaaaaaactatcatttaatatatccacctttctacttagactccatcttgaaaagaattatattggcccattggacacattttctcccaagaatttaaactgtgaagtaagggatgaaaggatatgtgtcaatgtttgaaggaccaggcagggctgtggcatgtctttgcctgtgattcctatcaattattgtatcctggtttcagttttctagttctcttttgagtggttcttatattctttcaggaaagtttatttttgctaataatggccagtgtcaatttccagtgctcacaagcaagaaccatgctttcagaaggttggtataagaaggctactgccattctcatgagacttgtaggactctttgacagtagagaaatcacagtagaaaaatacaacttctattgtttgccctgtatgttgcttccctttgatagcagggactcacattaaatgaagccaagaagttacattagagcctttgctgcccaatatgatattactagtcacagatgactgttgaaacctaaatttaaattagaattttaaaaaattaaaattcagtttcttcagtcacatgaagtacatttcaagtgtgcactagcaacatgttgctagtgactatcatattggaaggcacagattgtagaatatttccaccatcaaagaaagttctatcagacaacactgttggagtataaactcaagggtaggcattctgtccttgttattttctgatgtatccacaacacttagaatgggcttagcatgtataggtactcaataaatatttgttgaatgtcgaaatagcatatattgggaggccaaggcgggcagattacctgaggtcgggagttcaagaccagcctgcccaacatggagaaactccgtctctactaaaaatacaaaaaattagccgggcgtggtggtggatgcctgtaatcccagctacttgagaggctgaggcaggagaatcacttgaacccaggaggcggaggttgcggtgagctgagatcacaccattgcactccagcctgggcaacaagagtgaaactccatctctaaaaaaagaaaaaaaaaaaaa

SEQ ID NO: 12249 - DNA, 1466 bp, Homo sapiens
gtttgggtctagttcacatgctcatccctggacctaccactgcgaccgtggtatcaggcactctggctcagccaaggttatatgcccatgtctctgtgtggagtgggtgaaggaggaggaagtaaatgatatgcagtttgatataatagcaaataaccaaggggaatagcaataaccaagggaaagggaagctgaacatttatgatatcctgtagtcaatacccccttaatttattttttgcatggcttaaagccagggctcttatttcccatttggggctttctgtttttttcttgagcttttaatgaacgtttacatttcatcagtttggatttctttgctgccagtgttggatatttgcttttttaaaaacaaaccaaaaaactatcatttaatatatccacctttctacttagactccatcttgaaaagaattatattggcccattggacacattttctcccaagaatttaaactgtgaagtaagggatgaaaggatatgtgtcaatgtttgaaggaccaggcagggctgtggcatgtctttgcctgtgattcctatcaattattgtatcctggtttcagttttctagttctcttttgagtgggttcttatattctttcaggaaagtttatttttgctaataatggccagtgtcaatttccagtgctcacaagcaagaaccatgctttcagaaggttggtataagaaggctactgccattctcatgagacttgtaggactctttgacagtagagaaatcacagtagaaaaatacaacttctattgtttgccctgtatgttgcttccctttgatagcagggactcacattaaatgaagccaagaagttacattagagcctttgctgcccaatatgatattactagtcacagatgactgttgaaacctaaatttaaattagaattttaaaaaattaaaattcagtttcttcagtcacatgaagtacatttcaagtgtgcactagcaacatgttgctagtgactatcatattggaaggcacagattgtagaatatttccaccatcaaagaaagttctatcagacaacactgttggagtataaactcaagggtaggcattctgtccttgttattttctgatgtatccacaacacttagaatgggcttagcatgtataggtactcaataaatatttgttgaatgtcgaaatagcatatattgggaggccaaggcgggcagattacctgaggtcgggagttcaagaccagcctgcccaacatggagaaactccgtctctactaaaaatacaaaaaattagccgggcgtggtggtggatgcctgtaatcccagctacttgagaggctgaggcaggagaatcacttgaacccaggaggcggaggttgcggtgagctgagatcacaccattgcactccagcctgggcaacaagagtgaaactccatctctaaaaaaagaaaaaaaaaaaaa

SEQ ID NO: 12250 - DNA, 102 bp, Homo sapiens; identical to SEQ ID NO: 6279

SEQ ID NO: 12251 - DNA, 331 bp, Homo sapiens
ttccctatactttgaagggaacttgaaatagttccatcttaatgttattccaaagtttccatttaaacttatttatagctacattttctgttgtaacttggccctccagttcacctactatttctgccttcataattacttcaaaagtataaagtacttgatctcatagttaacttttcccccaacttactcatccttcaccctctgatttctccctatcacctactcattaaaacttttaacagtttccactgtagcctctggaatccctattctgataccaataactttttttgcaatctcaacatttttttaatgcctctccccctgc

SEQ ID NO: 12252 - DNA, 331 bp, Homo sapiens; identical to SEQ ID NO: 12251

SEQ ID NO: 12253 - DNA, 88 bp, Homo sapiens
ggaggcggaggttacagtgagccaagattgtgccactgcactccagcctgggtgacagagtgagactctgtcttaaaaaaaaaaaaaa

SEQ ID NO: 12254 - DNA, 2331 bp, Homo sapiens
gaaggtataggggaaaaggtaggggtgagagttatcagtctggttagagctgggctaaacatttagtcttaccatcagtttaaaagcacctggaccagttagttgctgtacaggcaaagtcaaagggagaagcctggcctctctctactcagtcaaggttcatgactttaggagactgcaatgaaccaggcataccaggaaaggaaaaggttaactgaggttgaaaaaaaaactttatgtggcacttttaaacaagcaggttggtttggcttgtgtgactatgatggtgcctgattttgagcagagcaatttgtgttgtgacattttaaaatccattctggcacttggtgatgaatgtgttggctggcagctaagaacttgctagaatgcaagtatgcaagtcttccccatttataatcgacacttcctttccaggaaagagcctttctaatctttgaatcagtggatttatcaatttgcataaaatatgccatcctcaatgaacacatttatcatctaccacttaactttccttctgttaaaaaaaaaaaaaaagcagaatcaccttcctgtgagtcagcagctttaaattcagctgtgctgggtgaagctgttaagggtaggaaggagccatcactagaagggggagaagcaggaataaaatgatcttttctatttccatgattttttatgtttctgtttaaatggttaaatacccaattaggttagatgctaattaaatgtaaaattactgggctgttccaatatgcatgttaaagttgtacttcttggttgtttgtaatttacctaactcttgagagatcatcagagcagcccagctgagtttaaagaaggcttccaactgcccaggatatgcatcagttcctgaacaaaaaaagaacaccccaggatcaacagaagctactatcaaatccttcaaacactacatgcaccacatgctcacatttgtcctatttttgctactatttatccacaaaaaagccaagcctgaactccttcttgaggccaaaacttaaaaatataccaaatgaatcagttcaaaattttacaaatttggtttggcttaatcataactgattcttcatactattgacaccgttgattcttcacactatagataccactcactaaaattacaactcagtcacctcttcccatataccatatttcattaaaatcaatgtaagataagaaatggttaccagatgccatcgtttcagaccaaaccatatgtcaaattttgaataaacctaacaacatctgattggttaagtagcatacctagatttattaaaatcactacactcctttaatgtctgtaggagaacatgcatgcacaagcacacacacgttgtgtgtgcatttatatatatatatatatatatatatatatatatatatgtatatgctactgcaaaattgaagagactttaccaagttctgtcattgacagggacattatatataaagaatatacatactgtaattcacctcatcaagagttaattttatggccgggcacagtggctcacacctgtaatcctaacacttcgggaggcagatcactttgagctcaggagatttgagaccagcctgggcaacgtggcaaaaacccatctctacagaaaaatacaaaaatgagctgggcgtggtgactcccgcctgtagtcccagctgtatacatgggaggctgaggctggaggattgcttgagccaggtagcagaggttgcagtgagccaagattgtaccagtgcactccgccctgggtgacagagcaagaccttgtttcaaaaaaaaaaaaaagagttaattgtaccaggaacatgtggtgtcaaaatttaaaatatgtgaactctttgacccagcaatgctattttcagggatatatcctaagatcatcaccagcaaagtatataaggatgtgcatgcaaaaatattcatcatggctttctttatacaatgaaaaattggaaataaacttctcattaatgggatgctggttaaagaaaatcattactgtaatatgcagccatctaaaagggtaatttatatgtatatatatttacataagaaaaccctcatgtcatattgctgagtaaaaagaaagatgtcaatgagtattcatgatgtgattctatttatccttgcaaatggtggaaattcaattatatggtattttctctcttttctgtttgtttttcatatatgtatatatttcctttgaaatcagaaaaaaatcaagctattttcatcagaggaaaaaaatcattactctgtatttcagtcacactaaaatagtcacccaagaa

SEQ ID NO: 12255 - DNA, 2330 bp, Homo sapiens
gaaggtataggggaaaaggtaggggtgagagttatcagtctggttagagctgggctaaacatttagtcttaccatcagtttaaaagcacctggaccagttagttgctgtacaggcaaagtcaaagggagaagcctggcctctctctactcagtcaaggttcatgactttaggagactgcaatgaaccaggcataccaggaaaggaaaaggttaactgaggttgaaaaaaaaactttatgtggcacttttaaacaagcaggttggtttggcttgtgtgactatgatggtgcctgattttgagcagagcaatttgtgttgtgacattttaaaatccattctggcacttggtgatgaatgtgttggctggcagctaagaacttgctagaatgcaagtatgcaagtcttcaccatttataatcgacacttcctttccaggaaagagcctttctaatctttgaatcagtggatttatcaatttgcataaaatatgccatcctcaatgaacacatttatcatctaccacttaactttccttctgttaaaaaaaaaaaaaaagcagaatcaccttcctgtgagtcagcagctttaaattcagctgtgctgggtgaagctgttaagggtaggaaggagccatcactagaagggggagaagcaggaataaaatgatcttttctatttccatgattttttatgtttctgtttaaatggttaaatacccaattaggttagatgctaattaaatgtaaaattactgggctgttccaatatgcatgttaaagttgtacttcttggttgtttgtaatttacctaactcttgagagatcatcagagcagcccagctgagtttaaagaaggcttccaactgcccaggatatgcatcagttcctgaacaaaaaaagacaccccaggatcaacagaagctactatcaaatccttcaaacactacatgccccacatgctcacatttgtcctatttttgctactatttatccacaaaaaagccaagcctgaactccttcttgaggccaaaacttaaaaatataccaaatgaatcagttcaaaattttacaaatttggtttggcttaatcataactgattcttcatactattgacaccgttgattcttcacactatagataccactcactaaaattacaactcagtcacctcttcccatataccatatttcattaaaatcaatgtaagataagaaatggttaccagatgccatcgtttcagaccaaaccatatgtcaaattttgaataaacctaacaacatctgattggttaagtagcatacctagatttattaaaatcactacactcctttaatgtctgtaggagaacatgcatgcacaagcacacacacgttgtgtgtgcatttatatatatatatatatatatatatatatatatatatgtatatgctactgcaaaattgaagagactttaccaagttctgtcattgacagggacattatatataaagaatatacatactgtaattcacctcatcaagagttaattttatggccgggcacagtggctcacacctgtaatcctaacacttcgggaggcagatcactttgagctcaggagatttgagaccagcctgggcaacgtggcaaaaacccatctctacagaaaaatacaaaaatgagctgggcgtggtgactcccgcctgtagtcccagctgtatacatgggaggctgaggctggaggattgcttgagccaggtagcagaggttgcagtgagccaagattgtaccagtgcactccgccctgggtgacagagcaagaccttgtttcaaaaaaaaaaaaaagagttaattgtaccaggaacatgtggtgtcaaaatttaaaatatgtgaactctttgacccagcaatgctattttcagggatatatcctaagatcatcaccagcaaagtatataaggatgtgcatgcaaaaatattcatcatggctttctttatacaatgaaaaattggaaataaacttctcattaatgggatgctggttaaagaaaatcattactgtaatatgcagccatctaaaagggtaatttatatgtatatatatttacataagaaaaccctcatgtcatattgctgagtaaaaagaaagatgtcaatgagtattcatgatgtgattctatttatccttgcaaatggtggaaattcaattatatggtattttctctcttttctgtttgtttttcatatatgtatatatttcctttgaaatcagaaaaaaatcaagctattttcatcagaggaaaaaaatcattactctgtatttcagtcacactaaaatagtcacccaagaa

SEQ ID NO: 12256 - DNA, 2331 bp, Homo sapiens
gaaggtataggggaaaaggtaggggtgagagttatcagtctggttagagctgggctaaacatttagtcttaccatcagtttaaaagcacctggaccagttagttgctgtacaggcaaagtcaaagggagaagcctggcctctctctactcagtcaaggttcatgactttaggagactgcaatgaaccaggcataccaggaaaggaaaaggttaactgaggttgaaaaaaaaactttatgtggcacttttaaacaagcaggttggtttggcttgtgtgactatgatggtgcctgattttgagcagagcaatttgtgttgtgacattttaaaatccattctggcacttggtgatgaatgtgttggctggcagctaagaacttgctagaatgcaagtatgcaagtcttcaccatttataatcgacacttcctttccaggaaagagcctttctaatctttgaatcagtggatttatcaatttgcataaaatatgccatcctcaatgaacacatttatcatctaccacttaactttccttctgttaaaaaaaaaaaaaaagcagaatcaccttcctgtgagtcagcagctttaaattcagctgtgctgggtgaagctgttaagggtaggaaggagccatcactagaagggggagaagcaggaataaaatgatcttttctatttccatgattttttatgtttctgtttaaatggttaaatacccaattaggttagatgctaattaaatgtaaaattactgggctgttccaatatgcatgttaaagttgtacttcttggttgtttgtaatttacctaactcttgagagatcatcagagcagcccagctgagtttaaagaaggcttccaactgcccaggatatgcatcagttcctgaacaaaaaaagaacaccccaggatcaacagaagctactatcaaatccttcaaacactacatgcaccacatgctcacatttgtcctatttttgctactatttatccacaaaaaagccaagcctgaactccttcttgaggccaaaacttaaaaatataccaaatgaatcagttcaaaattttacaaatttggtttggcttaatcataactgattcttcatactattgacaccgttgattcttcacactatagataccactcactaaaattacaactcagtcacctcttcccatataccatatttcattaaaatcaatgtaagataagaaatggttaccagatgccatcgtttcagaccaaaccatatgtcaaattttgaataaacctaacaacatctgattggttaagtagcatacctagatttattaaaatcactacactcctttaatgtctgtaggagaacatgcatgcacaagcacacacacgttgtgtgtgcatttatatatatatatatatatatatatatatatatatatgtatatgctactgcaaaattgaagagactttaccaagttctgtcattgacagggacattatatataaagaatatacatactgtaattcacctcatcaagagttaattttatggccgggcacagtggctcacacctgtaatcctaacacttcgggaggcagatcactttgagctcaggagatttgagaccagcctgggcaacgtggcaaaaacccatctctacagaaaaatacaaaaatgagctgggcgtggtgactcccgcctgtagtcccagctgtatacatgggaggctgaggctggaggattgcttgagccaggtagcagaggttgcagtgagccaagattgtaccagtgcactccgccctgggtgacagagcaagaccttgtttcaaaaaaaaaaaaaagagttaattgtaccaggaacatgtggtgtcaaaatttaaaatatgtgaactctttgacccagcaatgctattttcagggatatatcctaagatcatcaccagcaaagtatataaggatgtgcatgcaaaaatattcatcatggctttctttatacaatgaaaaattggaaataaacttctcattaatgggatgctggttaaagaaaatcattactgtaatatgcagccatctaaaagggtaatttatatgtatatatatttacataagaaaaccctcatgtcatattgctgagtaaaaagaaagatgtcaatgagtattcatgatgtgattctatttatccttgcaaatggtggaaattcaattatatggtattttctctcttttctgtttgtttttcatatatgtatatatttcctttgaaatcagaaaaaaatcaagctattttcatcagaggaaaaaaatcattactctgtatttcagtcacactaaaatagtcacccaagaa

SEQ ID NO: 12257 - DNA, 171 bp, Homo sapiens
caaacaggagggctagcccaggtttgagctggacactccactgacagttctaaagcagaaaattagggaaggaatagtcaggggcttatcagctatgcagtagcttctagaagtcaacagctggctctgggagggaaaagattgagaaaaacaaaagaaataaataagagc

SEQ ID NO: 12258 - DNA, 171 bp, Homo sapiens; identical to SEQ ID NO: 12257

SEQ ID NO: 12259 - DNA, 171 bp, Homo sapiens; identical to SEQ ID NO: 12257

SEQ ID NO: 12260 - DNA, 12280 bp, Homo sapiens
gatcacaaggtcaggagattgagaccatcctggctaacacagtgaaaccccgtctctactaaaaatacaaaaaaattagccgggcgtggtggcgggcgcctgtagtctcagctactcgggaggctgaggcaggagaatggtgtgaacctgggaggtggagcttgcagtgagccgagatcacgccactgcactccagcctgggcgacagagcgagactccgtctcgaaaaaaaaaaaaatggggaaggaaccatctaggagggaacacaatgagggacgggcccccagctgcagatgtgacagtggtatcagtctgggcatcctcagagggccagtaggtgggcagggctggctgggggcatgtcctgctttatagaagcgcatgtcacaacccccataactgctgctgccctgcccccaggtgacacgcccttcacctcaccaccagaggtggacagctgccaggggatagacagtaacctaccagggtccctagctcaaggcatgggcagtgtggccctgcagatgagggcacacctggctgctcacgacaggtgacgccatgccaccctccacagtgtactgcagtggaggtggcccatgctgggctgaggggtccctggtggggcagggacttcctgtctggggctctccctgccaagctgaagacatggaaatcctctggggtggacgggtgcagctgacgcctcgtccctactgcagaggaagttcggtgtggtcctggatgagatcaagccctcctcggcccctgagctccaggccgtgcgcatgtttgctgactacctcgcccacgagagtcggaggtgaggccccagagaatgggttggcctgaggcgcggggccatcttcaaggcctgttggttatgaacctgggtgggtgggggcatggcgtgcagcgcacagcatccctcagattaggcgcctctcccctctgctcccctgctgctttgtgcctcagtttccctcacctgcacagcagtggggggctggtgatggatcctgcttcaaaggggagggtcagagacagtgctgtgtgtgcacacgccctcatggaccacaaggcactctctgaacctagaactgaaaatatcaattaccgagcagccctctgcaacacccagagccccaagacagcccagggcgcagcgggggcagggccctcccatcagttttcttatttatttatttagagatggagtctcactctgtcaccaggctggagttgcagtggtgagatctcggctcactgcaacctctgcctcctgggttcaagtgattcttgtgcctcagcctcctgagtagctacgactatagctgcgtgccaccacgtccagctaatttttgtattttagcagagactgggtttcaccgtgttgcccagggtggtctcgaactcctgagctcaggcggtctgcccacctcagcctcccaaatcctatcagttttctagtcccagctagttggggactgcaacctgccagtatctcccctggagcccagtgggagggtgggtgaggccacgcctgtcctgcccctgagccacaggccagcgttggtcaaacgcccatgggcggcagccaaggggagagggggctgggctgtggggacccaggaaccttgccccctcctgctgtggggtcggagtgagggtctggcatggggagactgctgtgatcctgctcttccttggcccacggaggcagtgtcccaactaccgcctcccttcactcaaagaaacctggggttcctgggagctgactcctgtgcagaggcagcatggtggggtgaatggtgtcccccaaaaggtacgtccatatcctatcccacatgcttgtgaatatgatatcatttggaaaaagggtctttgccgatcagattaagagataaggagatgaagacatgctggatttagggtgggccccaaagccaaggacttgtgtccttttaagagataaaaggagggctgggtgcagtggctcatacttgtaatcccagcactttgggaggacgaggtgggcagatcacctgaggtcaggagttttcaagaccagcctggccaacgtggtgaaaccccatttctattaaaaatacagaattaacaggatgtgatgtctgtgattccagctacttgggaggctgaggcaggagaatcgcttgaacctggcaggcagaggttgcagtgagccaagatcgcactagtgcactccagcctgggtgacagcgggagactgtcttaaaaaaaaaaaaaaaaaaaggaaagaggcccacagagttaagcccatgtgacaacagactggagtgacatgtctgctagccaaggagcaccacgagtggccagcagccaccagagctgggagagaggcctgggacggccttgccctccagcctccagctggagccagccctgccgccaccttgacttcagacttacggcctccagagctgtgaggaacgaatccctgttgtccttaactgcccgggctgtggtgctttgccacagcagctccaggacattgagacaggtgacctcccagggccactgtttctcccaccctgcacttacttcaccagctggagtgaaggcagggaaccctgggtcccccaggagcagcagctgctgtgagcatcacagaaaagcagccccggagagcaggcggtccaggcaggggcttgtggtccgttcatctggctgcacagccgcgacctcattggcaggacgccccggggacaaggagcatccattagtaattggttttggttttgattttgttttcttgagatacggtcttgctctgtcgttcagcctggcatacagtggcacaatcttggcttactgcagccttgatctcccaggctcaagtgatcatcccacctcagcctcccgaatagctgggactacaggcacgcatcaccatgcctggctaatttgtatattttttagagatggggttttgcctggccgggcgcagtggctcacacctgtaatcccagcactttgggaggccgaggcgggcggatcacgaggtcaggagatggagaccatcctggctaacacgtgaaaccccatctctactaaaaatacaaaaaaaattagccgggcatggtggcgggtgcctgtagtcccagctactcgggaggctgaggcgggagaatggcatgaacccgggaggcggagcttgcagtgagccaagatcgcaccactgcactccagcctgggcgaaagtgcgagactccgtctcaaaaaaaaaaaaagagagatggggttttgccatgttgcccaggctggtctcaaactcctgggctcaagcgatccgcccagtaattgattttgttgctgttgcttgtttttgagatggtctccctctgtcacccaggctggagtgcagaggtgtgaccacagctcaccgcagcttcaacctcccgggctgaagccatcctcctgcctcagcctcccaagtagttgggactacaggcgccaccaggcccagctgactttcttacttttttgtagaaaaaggggtcctactatgttgcccagggtggtcttgaactcctgggcttaagcgatcctgccttggcctcccaaagcgctggggttacaggtgtgagccacagtacccggccccattggtaattgtaacaccttaggatgacaacattacagtaccaacgctacgacaactggcagtgtttatacacccttgtgtgctggagcctcaggaagctttgtaagatggtcttgggagctccttgctcctcccctgcatgatccctgtaacatggtccctcagcacggggaaacagactcagacctgaagtcacttgtctgttggacctggcactgtggcgagccctcagtggagcctggttggtatcagacatgccatgccctcagtgacacctcagacacgggccctgggcagacagcccccagatgcgcgtggatgcttacggggtcacagagccacgtttgaacccagaagaacaccagctttggtctagggtggccccctcacctgccttctctttttagctgctcaatagccatggggaatggagggtctgggtccagttagggacatggaggcatgggtgacctgtgccctcggagctgagccggtcctcagccttgcctgggctcaagcctggccctggcccgcagcacactggccatcttcagggtgcagccagcaccctgggctctcagggactgagggcagctgccctggcagtgggggtgccccagggctcccatccttctgcacggcccctcggcacccaggccgacctcctgctagaagacgtggccttgaagcccacagggttgatgggttatggtcaggagtcccagctgggcccaccagcctcctcaggaaggcgggtgaggttggtgtgagactgacggtgcctcctcatgtccccttggagcgccccaccccacatctcccggcctcgggtccttgcctggcccagcatgagaggtgcttcataggaacggagggaggacatgtcgggacagctcgatgctcggcctgctgctgctctgcacccccagggcctggctcaccctctctggacctgtctgcttccaaggaaggggaccctctgaggtcccacagaggccaccccagctgtgggtcgtgagcatctctgtcttgcagggacagcatcgtggccgagctggaccgagagatgagcaggagcgtggacgtgaccaacaccaccttcctgctcatggccgcctccatctatctccacgaccagaacccggatgccgccctgcgtgcgctgcaccagggggacagcctggagtggtgagtggcctccctgctctggggccagcccagggaggcaagtgccccctgccacatctccaggctgcgcacggcctcgctggctgtcgtcatgggagcagagaaaggtggtgctgaaatgaggccctggcctgctgtccaggctccagctcccctgcccagtgtgggaggcactcccatctgcgcaccaggctgcagatccaaggacacggtgcccaggctgcaaccctctgttcccaagggcagagcagaaagcggctttgtctctgctcggtttctgtgtccccaccccccacgaagccttctgtgtctcggccctgggcccagtctctcaggcctccccgggccccccataccggccctcctccagggccctctggggttggggtgctgaagccctgcaaggttggtgcccccctccaccctaggatgtgactccgggccatgtccagggcactggtcacagaaagtgtgtcagttcttccccgtgagctgtccctgcagtgcctgccttccactgtgagttgcaagctgggcatttcatggtcgctgtggatctgctcccatcccacctccatccacagagggcttagaattgcagggcgagccaggcatggtgacatgcacctatgtttccagctacttgggaggcggaagcaggagtatcccttgagtctgggaggtggaggctgcagtgagccgtgatggtgccactgcactccagcctgggtggcagagccagaccctgactcacacacaaaaaagaaaataaatagggatgtcacactgtcggcgagccggccgactcggtgctggtccaggtgctggctcctgttggcaggaaaacaagaacaagaggcctcacgagtaattcgtggtcacagccacctggggctgagagggatgaggggacgagggggcctgcagagagtgggtggccccagggctctgctgcaggtgcaggtgcaggggcgggtgcgtggccctcctctagggccttgttcctgagtgttgatgcctccagggtgtcgagtccgggcagggccctccatctggaagcacagcccatggaggctgcttctccagatgggcggtgagtgggccggggcctgaaaccccatcctgggtacctcccccagagctcctgggcctgaggaagctgagcggtgaaatgtgggagtgagggtgtcctcctctgctgggcggggctggtggtcctaagcacaggacttaggaacatcccagacacacacagtgagccctgggtgtggagcggccatgcaatgtgtctgtggcgacccgctgaccgccccctcgccctgtcctgcagcacagccatgacagtgcagatcctgctgaagctggaccgcctggacctcgcccggtgagccctcctgcccctctccacccgcactgagccacagcccagagcgtcacagcccagagcgtcacagcccagagcgtctgtggtgctgtcattactcttgttgtctttcctttccatgggggtggcttgctgtcgttcagcccttccctgcagtatgttgccagggaggagggccatggctctctgtgcctcagtttctctctatgcagtgggtggcaggcctctcccacagggtgagggtgggcttcatggagggagagtggaggttgtgcctggagcaacatgttacttgaccagcttgtaactgtgccgtggggctggcggggcctgcacgtggcatcaccaggtcggaggccatggctgggggtccaggactcccctgctgccgtttccaaagcccttgcctcagagttgttcacactgtagttccgttgcccttccctgcgttccatcctccatggagtgagtctctcctgagctctaccttgtggtggccaccctggggggccatagctggccccagtcccaccttcccagggcctgcacgtggtcagacgggcagggtggctcgggcacttagtcgtggggtatgagcatgcagtggagcacaaagcaggggccatccccaggctccggtgggccccaagtggggacaaggcagggatggccaggccagggccctcggccactcagcccctctgtcatctgtccccgccccaggaaggagctgaagagaatgcaggacctggacgaggatgccaccctcacccagctcgccactgcctgggtcagcctggccacggtgagccctaggccatgaggtgggtgggcattgcgggcacctggctgagcagggtctgtgggcacccccacctgtgcgtaggctgctggccactccagtggggctccaggatcaggccgtggcccctgccagcctggcataactcagccttgactccattccgggcttctcacagccaagcgacttggccagagccagagcgaagagatggtgggggcggggacgggttcctgagcctgaggcacaggggtactcgagggtctgggttggcctggcaggccctcctcccctcagggcttcctggggttttctgcgactcagctttgctctccagggtcctggtcgccagccagggacggagttcagtgttcccatagcagcggtggagatgtcctcagctcccaggcctgggcacctccgcccggcaacagcccctctcctggtttctgggacttggcccccttctgagccactcttttgtgtgggcctattaaaatgtgcttcctggctggtcgcagtggctcacgcctgtaatcccagcacttcgggaggccgaggcgggtggatcatgtgaggttgggagttctagaccagcctgaccaacatggagaaaccccatctttaccaaaaatacaaaattagctgggcttggtgccatgcacctgtaaacccagctactcaggaggctgaggcaggagaatcgcttgaacccgggaggtggaggttgcggtgagccaagatcgcgccagtgcactcctgcctgagcaacaagagtgaaactctgagaaagaaaaaaaaatgtgctccccgtccctgcccgccacggggctgaagcctcacccagacagacttccagtgaccgtctagtatggtaggacaggccccggcagacctatcgggtagtttgggctgttttcactgcctgccttggcctcaggctccccctgcaagtgttctgctgttctgagcaagtggacaggtcagggctgctggtcacagagctgactcctcctcctctgacgtgctcagtgacccagtggtccccactcagaccctgagccagccacctgtgcactgaggccttggaagccccagattccacctctgtgtactcagcactccgggagctgggtgggaggtggggcaggaggcggccacgagtctttaggccccatcagcagagtacaagttacgggtagtccccatggcggagtggctgtgccttgaaccgggcacaccagattcgtctctgtgcagtgctggagtcccccccgctaggggagggggctggcgggggaagggccgggcagcaggggcacaggcaatgatgcgggaccctccctgcagggtggtgagaagctgcaggatgcctactacatcttccaggagatggctgacaagtgctcgcccaccctgctgctgctcaatgggcaggcggcctgccacatggcccagggccgctgggaggccgctgagggcctgctgcaggaggcgctagacaaggtaggcacaagcctgtcccagagtggggacggagggaaggccaggcggccagagggtggggtcagggcggacagaaacaagtgtagcagagaccccctgggtgtgcgtgtggccccacagggcttctaaggcccagtcagcagcgagatccacaaagcagggatctcacctgcaaagaaatccagattccggcctcacagaaatggggcatctgggcagcctgggcctcagtggtctgagccgtccttgttgtcacctcagctgcctggcccgggacctgcaagtgggacccctcacctgagtacatactcagtattggagagacactccccgtacttatgtaggggagagtgtgctgtggacaggagctcttcgttgagagagcgctgcctgcccagggtggctgcagtcatctcctgcctgatgtctgcagtcttttcttccttccttccttccttccttccttccttccttccttccttccttccttccttctttcccttccttccttccttcctttccttcctttccttcctttccttcctttcctttccttcctttccttcctttccttcctttcctttcttctttttttttttttttgagatggagtctcactctgtcacccaggctgcagtgcagtggtgtgatctcagctcaatgcaacctccgcctcctgggttcaagtgattcttttgcctcagcctcccaagtagctgggattacaggcggctgccaccacgcctggctaatttttgtatttttagtagagacggggttttgccatgttggtcaggctggtctcaaactcctgacctcaggtgatccacccgcctcagcctcccaaagtgctgggattataggcgtgagccaccacgcctggccatctgcagtctttatgaagagtttatgttatgttaaattaaaaatatatatatattttgtaaagacggggttgttcttgctgtgttgcccaggttggtctcgaactcctggcctcaagtgatcgtcccacctcagcctcccaaagcattaggattataggtgtgagccaccatgcttggtggattttttttttttttttttttgagatggagtcttgctctgtcgcccaggctggagtgcagtggtgtgatctcggctcactgcaagctctgcctcctgggttcatgccattctcctgcctcagcctcccgagtagctgggactacaggcgcccaccaccatgcccagctaattttttgtatttttagtagagatggggttttgctgtgttagccaggatggtctcaatctcctgacctcatgatgctgcccaccttggactcccaaagtactggattacaggcgtgagccactgtgcccagcctggattattatttttataatcagaaaggacatcaaagctttttccattttggagaaacgaattttggggggttttttgtttgttttttgaaacggtatgccaccatgcgtggctaatttttgtattttttgttagaaatggggtctcactgtgttgtccaggttagtcttgaactcctgggctcaaacaattctcaccctccttggccttctaaagtgctgggatgatagacatgcgccagtgcgcccagctgagaaacagttttaatctagtgacaaacactggtgaagccctcctccctgtctgactttccaggggctgagttatcatcagaaagttgtttgcagagcggggctggccaaggggtatcaggctggccccatcacaggccgggtactgctcctcctgagcagggtccatctttagctctgagcagtcagggctagtcaggaactcccagcctgatgtgcaatctcagacaggctgtgtgtccctcgctgccccaggggcaagactggcgccctcctccaccaccctgcccctccctgccacctgagaacacttggatgcatgttgtgttcatggccgcatcctctgggggcttttgttacacctctcaggtgacacgttccgtgactcaccagttagatgactcccttctgtccttgtctcttgaaacaccacctggggctggctggccgtgccccttggccctggtggcctccccgtggctgtggtcaccctgcattcttgctgggttttgggaggcactcaggtccccccacttccctttggagccacctcatggctgctcctgtgagcgcaagctggtgtcccccttcatggtggagactgaggctcagaaaagtccggtctgcaaaaaggtgccctgccatgggccgccgtgggcaggtcgggctctgggcgcatcctcgttggtgtgtctgtgctccaagcagacaccagggctctggctgggtctcctggcctagatgtttcctagggtcctgtgtgctgggagcctagagtgagtgagtcaggcaaggtcccctgccgaggtctccttcaaggctccttgggagctggtgcaggggtggcaggtctgcccatggcctcggggttcgttgtacagcaggagttgaggccatctgggtctgggccccatggctttgagatgtgtgggacaaatacaaccttcccaagtctctgtaaacaaggggtcgtaccccaggctggactacagatggggaaactgaggctcagcgaggcggctggccccttggcaccgtatcatctgagatctccaccttgcagagcggtgggcggtgtcagtcccaccccacctctgaggaggtgaccttgtgtggtgctgcctgaggtgggggtgacgggcaggcatgggggctggagtggctgaccctgcctccccgtgtctgcctgtgtctccaggatagtggctacccagagacgctggtcaacctcatcgtcctgtcccagcacctgggcaagccccctgaggtaagcggcccccagggctccaggccaaccctaatgtccagaccctgggaccccagcctggggtccaggccctaatccctaggcccctgggaaaactctgtatacagtatgcctaccgcagcccacctccctcacaaaccctgtgccccccaacccatcctcacctggggccctgcccgacctgctcccctgaacaccacaatacatcccccaccatgtacggaggccagctccatgccagcgcctctccagggggcaggcccatccctccacccccaccctgaaggttctccgagatcagcccagtcccaaggcagggtgaggagccccctggggtactgtggctctcaccccaatccacccctgtccagcaggtcagagccaccgtggggtccccgtgttcggctcacctgcctccctgcctcccctgcaggtgacaaaccgatacctgtcccagctgaaggatgcccacaggtcccatcccttcatcaaggagtaccaggccaaggtgagtggtggggatggcctgtccccgagaaccaggccagggggcgcctggagctcagcctgggctcacatgcgccctctctctctccctccacctgtctccccacaccctgcccccaccctgtgttgccatgtgtcttgctaaaggagaacgactttgacaggctggtgctacagtacgctcccagcgcctgaggctggcccagagctgtcaggaccatgaagccaggacagaggccaggagccagccctgcagccctccccacccggcatccacctgcatcccctctgggggcaggagcccacccccagcacccccatctgttaataaatatctcaactccagggtgttccacctga

SEQ ID NO: 12261 - DNA, 181 bp, Homo sapiens; identical to SEQ ID NO: 5399

SEQ ID NO: 12262 - DNA, 295 bp, Homo sapiens; identical to SEQ ID NO: 5401

SEQ ID NO: 12263 - DNA, 319 bp, Homo sapiens; identical to SEQ ID NO: 5402

SEQ ID NO: 12264 - DNA, 316 bp, Homo sapiens; identical to SEQ ID NO: 5403

SEQ ID NO: 12265 - DNA, 286 bp, Homo sapiens; identical to SEQ ID NO: 5406

SEQ ID NO: 12266 - DNA, 300 bp, Homo sapiens; identical to SEQ ID NO: 7804

SEQ ID NO: 12267 - DNA, 316 bp, Homo sapiens; identical to SEQ ID NO: 5409

SEQ ID NO: 12268 - DNA, 283 bp, Homo sapiens; identical to SEQ ID NO: 5410

SEQ ID NO: 12269 - DNA, 170 bp, Homo sapiens; identical to SEQ ID NO: 5414

SEQ ID NO: 12270 - DNA, 109 bp, Homo sapiens; identical to SEQ ID NO: 5415

SEQ ID NO: 12271 - DNA, 300 bp, Homo sapiens; identical to SEQ ID NO: 5417

SEQ ID NO: 12272 - DNA, 184 bp, Homo sapiens; identical to SEQ ID NO: 5421

SEQ ID NO: 12273 - DNA, 147 bp, Homo sapiens; identical to SEQ ID NO: 5241

SEQ ID NO: 12274 - DNA, 169 bp, Homo sapiens; identical to SEQ ID NO: 5427

SEQ ID NO: 12275 - DNA, 131 bp, Homo sapiens; identical to SEQ ID NO: 5432

SEQ ID NO: 12276 - DNA, 227 bp, Homo sapiens; identical to SEQ ID NO: 5436

SEQ ID NO: 12277 - DNA, 235 bp, Homo sapiens; identical to SEQ ID NO: 5438
  SITE (230): n equals a,t,g, or c

SEQ ID NO: 12278 - DNA, 187 bp, Homo sapiens; identical to SEQ ID NO: 5441

SEQ ID NO: 12279 - DNA, 143 bp, Homo sapiens; identical to SEQ ID NO: 5446

SEQ ID NO: 12280 - DNA, 170 bp, Homo sapiens; identical to SEQ ID NO: 5447

SEQ ID NO: 12281 - DNA, 184 bp, Homo sapiens; identical to SEQ ID NO: 5453

SEQ ID NO: 12282 - DNA, 125 bp, Homo sapiens; identical to SEQ ID NO: 5454

SEQ ID NO: 12283 - DNA, 196 bp, Homo sapiens; identical to SEQ ID NO: 5455
  SITE (106): n equals a,t,g, or c

SEQ ID NO: 12284 - DNA, 183 bp, Homo sapiens; identical to SEQ ID NO: 5243

SEQ ID NO: 12285 - DNA, 175 bp, Homo sapiens; identical to SEQ ID NO: 5462

SEQ ID NO: 12286 - DNA, 196 bp, Homo sapiens; identical to SEQ ID NO: 5463

SEQ ID NO: 12287 - DNA, 159 bp, Homo sapiens; identical to SEQ ID NO: 5465

SEQ ID NO: 12288 - DNA, 190 bp, Homo sapiens
ccgtctctactaaaaatacgaaaaattagccaggcgtggtggcaggtgcctgtggtcccagctactcgggaggctgaggcaggagaatggcatgaacccaggaggcggagcttgcagtgagccgagatcatgccactgcactccagcctgggtgacagagtgagaccatctcacaaaaaaaaaaaaaaaa

SEQ ID NO: 12289 - DNA, 219 bp, Homo sapiens; identical to SEQ ID NO: 5467

SEQ ID NO: 12290 - DNA, 154 bp, Homo sapiens; identical to SEQ ID NO: 5469

SEQ ID NO: 12291 - DNA, 169 bp, Homo sapiens; identical to SEQ ID NO: 5472

SEQ ID NO: 12292 - DNA, 207 bp, Homo sapiens; identical to SEQ ID NO: 5474

SEQ ID NO: 12293 - DNA, 230 bp, Homo sapiens; identical to SEQ ID NO: 5475

SEQ ID NO: 12294 - DNA, 189 bp, Homo sapiens; identical to SEQ ID NO: 5479

SEQ ID NO: 12295 - DNA, 207 bp, Homo sapiens; identical to SEQ ID NO: 5480

SEQ ID NO: 12296 - DNA, 150 bp, Homo sapiens; identical to SEQ ID NO: 5482
  SITE (21): n equals a,t,g, or c

SEQ ID NO: 12297 - DNA, 162 bp, Homo sapiens; identical to SEQ ID NO: 5244

SEQ ID NO: 12298 - DNA, 301 bp, Homo sapiens; identical to SEQ ID NO: 5486
  SITE (98): n equals a,t,g, or c

SEQ ID NO: 12299 - DNA, 1092 bp, Homo sapiens
cacaactctgggaggaagagtatcccaacctttgggtgaacaaactgaatctcaaatattttataatttatccaagctggtaagtggcagagctgggatttgaacccaggtctgtcttgttctaaatgccctgctttttttcactgcatcttcctcttgtgccatgtggttaaagataggcttcctttcaatattcagtttagttctattttacaaaacttcactaagcacctaccatgtgccatactctctggtgggcccagaggacaaagagatgtattagacctgacccctgacttgaggaactccatgtttaatggaaaagtagatgactgaccactaagatccaggatttaggtttctttcttgctacccatagaaatagcaatattgccttgtggatccctggaccattttcctcatgggaaggatatctttggcttggattaaaactgcaaagcataggataagaagtcagttctcaggtcactggttcacttagcttttttgtggctagaattacagccaagaccaggtccagccaggctgggcacaggtgtaggggatgtcaagctgtggcaccttagtgacagcaggaagcatggggccttcagtgcttggggtgaagtgagggtggttctaggcccatcactagctcacatggtataatgagaataatctagcagatttgagttcattctctggctttgccacttacttgtgtgtgactttgggcaagttactcaactctaagtctccattttcttatctagaaagtcgcactaggccgggtgcagtggctcacacctgtaatcccagcactttgggaggccaaggtgggtggatcacgaggtcaggtgatcgagactatcctggctaacatggtgaaaccccgtctctactaaaaatacaaaaaattagccaggcgtggtggcaggtgcctgtagtcccagctactcgggaggctgaggcaggagaatggcgtgaacccgggaggtggagcttgcagtgagctgagatcgcgccactgcactccagcctaagcgacagagcgagactccgtctcaaaaaaaaaaaaaaaaagaaagtgac

SEQ ID NO: 12300 - DNA, 267 bp, Homo sapiens; identical to SEQ ID NO: 5493

SEQ ID NO: 12301 - DNA, 246 bp, Homo sapiens; identical to SEQ ID NO: 7852

SEQ ID NO: 12302 - DNA, 193 bp, Homo sapiens; identical to SEQ ID NO: 5245

SEQ ID NO: 12303 - DNA, 3991 bp, Homo sapiens; identical to SEQ ID NO: 5499

SEQ ID NO: 12304 - DNA, 177 bp, Homo sapiens; identical to SEQ ID NO: 5500

SEQ ID NO: 12305 - DNA, 140 bp, Homo sapiens; identical to SEQ ID NO: 5978

SEQ ID NO: 12306 - DNA, 187 bp, Homo sapiens; identical to SEQ ID NO: 5506

SEQ ID NO: 12307 - DNA, 246 bp, Homo sapiens; identical to SEQ ID NO: 5507

SEQ ID NO: 12308 - DNA, 153 bp, Homo sapiens; identical to SEQ ID NO: 5246

SEQ ID NO: 12309 - DNA, 211 bp, Homo sapiens; identical to SEQ ID NO: 5919

SEQ ID NO: 12310 - DNA, 202 bp, Homo sapiens; identical to SEQ ID NO: 5516

SEQ ID NO: 12311 - DNA, 203 bp, Homo sapiens; identical to SEQ ID NO: 5247

SEQ ID NO: 12312 - DNA, 166 bp, Homo sapiens; identical to SEQ ID NO: 5519

SEQ ID NO: 12313 - DNA, 280 bp, Homo sapiens; identical to SEQ ID NO: 5522

SEQ ID NO: 12314 - DNA, 190 bp, Homo sapiens; identical to SEQ ID NO: 5523

SEQ ID NO: 12315 - DNA, 2364 bp, Homo sapiens; identical to SEQ ID NO: 5525

SEQ ID NO: 12316 - DNA, 1367 bp, Homo sapiens; identical to SEQ ID NO: 8587

SEQ ID NO: 12317 - DNA, 261 bp, Homo sapiens; identical to SEQ ID NO: 5527

SEQ ID NO: 12318 - DNA, 312 bp, Homo sapiens; identical to SEQ ID NO: 5530

SEQ ID NO: 12319 - DNA, 158 bp, Homo sapiens; identical to SEQ ID NO: 5531

SEQ ID NO: 12320 - DNA, 237 bp, Homo sapiens; identical to SEQ ID NO: 5533

SEQ ID NO: 12321 - DNA, 191 bp, Homo sapiens; identical to SEQ ID NO: 5538

SEQ ID NO: 12322 - DNA, 193 bp, Homo sapiens; identical to SEQ ID NO: 5539

SEQ ID NO: 12323 - DNA, 195 bp, Homo sapiens; identical to SEQ ID NO: 5540

SEQ ID NO: 12324 - DNA, 297 bp, Homo sapiens; identical to SEQ ID NO: 5544

SEQ ID NO: 12325 - DNA, 182 bp, Homo sapiens; identical to SEQ ID NO: 5545

SEQ ID NO: 12326 - DNA, 323 bp, Homo sapiens; identical to SEQ ID NO: 5548

SEQ ID NO: 12327 - DNA, 183 bp, Homo sapiens; identical to SEQ ID NO: 5556

SEQ ID NO: 12328 - DNA, 136 bp, Homo sapiens; identical to SEQ ID NO: 5560

SEQ ID NO: 12329 - DNA, 279 bp, Homo sapiens; identical to SEQ ID NO: 5923

SEQ ID NO: 12330 - DNA, 243 bp, Homo sapiens; identical to SEQ ID NO: 5565

SEQ ID NO: 12331 - DNA, 202 bp, Homo sapiens; identical to SEQ ID NO: 5567

SEQ ID NO: 12332 - DNA, 192 bp, Homo sapiens; identical to SEQ ID NO: 5569

SEQ ID NO: 12333 - DNA, 153 bp, Homo sapiens; identical to SEQ ID NO: 5573

SEQ ID NO: 12334 - DNA, 300 bp, Homo sapiens; identical to SEQ ID NO: 5574

SEQ ID NO: 12335 - DNA, 150 bp, Homo sapiens; identical to SEQ ID NO: 5248

SEQ ID NO: 12336 - DNA, 322 bp, Homo sapiens; identical to SEQ ID NO: 5582

SEQ ID NO: 12337 - DNA, 142 bp, Homo sapiens; identical to SEQ ID NO: 5249

SEQ ID NO: 12338 - DNA, 181 bp, Homo sapiens; identical to SEQ ID NO: 5586

SEQ ID NO: 12339 - DNA, 123 bp, Homo sapiens; identical to SEQ ID NO: 5589

SEQ ID NO: 12340 - DNA, 270 bp, Homo sapiens; identical to SEQ ID NO: 5591

SEQ ID NO: 12341 - DNA, 237 bp, Homo sapiens; identical to SEQ ID NO: 5593

SEQ ID NO: 12342 - DNA, 214 bp, Homo sapiens; identical to SEQ ID NO: 5597

SEQ ID NO: 12343 - DNA, 154 bp, Homo sapiens; identical to SEQ ID NO: 5604

SEQ ID NO: 12344 - DNA, 243 bp, Homo sapiens; identical to SEQ ID NO: 7930

SEQ ID NO: 12345 - DNA, 307 bp, Homo sapiens; identical to SEQ ID NO: 5607

SEQ ID NO: 12346 - DNA, 166 bp, Homo sapiens; identical to SEQ ID NO: 5608

SEQ ID NO: 12347 - DNA, 142 bp, Homo sapiens; identical to SEQ ID NO: 5251

SEQ ID NO: 12348 - DNA, 131 bp, Homo sapiens; identical to SEQ ID NO: 5613

SEQ ID NO: 12349 - DNA, 214 bp, Homo sapiens; identical to SEQ ID NO: 5614

SEQ ID NO: 12350 - DNA, 268 bp, Homo sapiens; identical to SEQ ID NO: 5616

SEQ ID NO: 12351 - DNA, 906 bp, Homo sapiens; identical to SEQ ID NO: 5620

SEQ ID NO: 12352 - DNA, 368 bp, Homo sapiens; identical to SEQ ID NO: 5252

SEQ ID NO: 12353 - DNA, 278 bp, Homo sapiens
gacgacaatgtttattctcattagtcagacgaactgcagcacaagtgtttcaaagaggaaccccaagaactcccaggcttgtaggaagcatctgattttacataagtttgcacagtaggaaactgaggtcctcggggaggaacaaagcaacttatgatcagacaaatgagtcactagtagagctgaaatgagaagccagatctcctaaccactcccacaccccatcacagtgcctcactgcgtctcttactggtgggcttgattgctttccaaggcca

SEQ ID NO: 12354 - DNA, 131 bp, Homo sapiens; identical to SEQ ID NO: 7941

SEQ ID NO: 12355 - DNA, 2925 bp, Homo sapiens; identical to SEQ ID NO: 5990

SEQ ID NO: 12356 - DNA, 4706 bp, Homo sapiens; identical to SEQ ID NO: 5625

SEQ ID NO: 12357 - DNA, 1548 bp, Homo sapiens; identical to SEQ ID NO: 5628

SEQ ID NO: 12358 - DNA, 4704 bp, Homo sapiens; identical to SEQ ID NO: 5253

SEQ ID NO: 12359 - DNA, 3517 bp, Homo sapiens
gaatacaagccttgggtccatgtttactctcttctatttggagaataagatggatgcttattgaagcccagacattcttgcagcttggactgcattttaagccctgcaggcttctgccatatccatgagaagattctacactagcgtcctgttgggaattatgccctggaattctgcctgaattgacctacgcatctcctcctccttggacattcttttgtcttcatttggtgcttttggttttgcacctctccgtgattgtagccctaccagcatgttatagggcaagacctttgtgcttttgatcattctggcccatgaaagcaactttggtctcctttcccctcctgtcttcccggtatcccttggagtctcacaaggtttactttggtatggttctcagcacaaacctttcaagtatgttgtttctttggaaaatggacatactgtattgtgttctcctgcatatatcattcctggagagagaaggggagaagaatacttttcttcaacaaattttgggggcaggagatcccttcaagaggctgcaccttaatttttcttgtctgtgtgcaggtcttcatataaactttaccaggaagaagggtgtgagtttgttgtttttctgtgtatgggcctggtcagtgtaaagttttatccttgatagtctagttactatgaccctccccacttttttaaaaccagaaaaaggtttggaatgttggaatgaccaagagacaagttaactcgtgcaagagccagttacccacccacaggtccccctacttcctgccaagcattccattgactgcctgtatggaacacatttgtcccagatctgagcattctaggcctgtttcactcactcacccagcatatgaaactagtcttaactgttgagcctttcctttcatatccacagaagacactgtctcaaatgttgtacccttgccatttaggactgaactttccttagcccaagggacccagtgacagttgtcttccgtttgtcagatgatcagtctctactgattatcttgctgcttaaaggcctgctcaccaatctttctttcacaccgtgtggtccgtgttactggtatacccagtatgttctcactgaagacatggaatttatatgttcaagtgcaggaattggaaagttggacttgttttctatgatccaaaacagccctataagaaggttggaaaaggaggaactatatagcagcctttgctattttctgctaccatttcttttcctctgaagcggccatgacattccctttggcaactaacgtagaaactcaacagaacattttcctttcctagagtcaccttttagatgataatggacaactatagacttgctcattgttcagactgattgcccctcacctgaatccactctctgtattcatgctcttggcaatttctttgactttcttttaagggcagaagcattttagttaattgtagataaagaatagttttcttcctcttctccttgggccagttaataattggtccatggctacactgcaacttccgtccagtgctgtgatgcccatgacacctgcaaaataagttctgcctgggcattttgtagatattaacaggtgaattcccgactcttttggtttgaatgacagttctcattccttctatggctgcaagtatgcatcagtgcttcccacttacctgatttgtctgtcggtggccccatatggaaaccctgcgtgtctgttggcataatagtttacaaatggttttttcattcctatccaaatttattgaaccaacaaaaataattacttctgccctgagataagcagattaagtttgttcattctctgctttattctctccatgtggcaacattctgtcagcctctttcatagtgtgcaaacattttatcattctaaatggtgactctctgcccttggacccatttattattcacagatggggagaacctatctgcatggacctctgtggaccacagcgtacctgcccctttctgccctcctgctccagccccacttctgaaagtatcagctactgatccagccactggatattttatatcctcccttttccttaagcacagtgtcagaccaaattgcttgtttctttttcttggactactttaatttggatcctttgggtttggagaaagggaatgtgaaagctgtcattacagacaacaggtttcagtgatgaggaggacaacactgcctttcaaactttttaccgatctcttagattttaagaactcttgaattgtgtggtatctaataaaagggaaggtaagatggataatcactttctcatttgggttctgaattggagactcagtttttatgagacacatcttttatgccacgtatagatcctcccctgctatttttggtttatttttattgttataaatgctttctttctttgactcctcttctgcctgcctttggggataggtttttttgtttgtttatttgcttcctctgttttgttttaagcatcattttcttatgtgaggtggggaagggaaaggtatgagggaaagagagtctgagaattaaaatattttagtataagcaattggctgtgatgctcaaatccattgcatcctcttattgaatttgccaatttgtaatttttgcataataaagaaccaaaggtgtaatgttttgttgagaggtggtttagggattttggccctaaccaatacattgaatgtatgatgactatttgggaggacacatttatgtacccagaggcccccactaataagtggtactatggttacttccttgtgtacatttctcttaaaagtgatattatatctgtttgtatgagaaacccagtaaccaataaaatgaccgcatattcctgactaaacgtagtaaggaaaatgcacactttgtttttacttttccgtttcattctaaaggtagttaagatgaaatttatatgaaagcatttttatcacaaaataaaaaaggtttgccaagctcagtggtgttgtattttttattttccaatactgcatccatggcctggcagtgttacctcatgatgtcataatttgctgagagagcaaattttcttttctttctgaatcccacaaagcctagcaccaaacttctttttttcttcctttaattagatcataaataaatgatcctggggaaaaagcatctgtcaaataggaaacatcacaaaactgagcactcttctgtgcactagccatagctggtgacaaacagatggttgctcagggacaaggtgccttccaatggaaatgcgaagtagttgctatagcaagaattgggaactgggatataagtcataatattaattatgctgttatgtaaatgattggtttgtaacattccttaagtgaaatttgtgtagaacttaatatacaggattataaaataatattttgtgtataaatttgttataagttcacattcatacatttatttataaagtcagtgagatatttgaacatgaa

SEQ ID NO: 12360 - DNA, 3539 bp, Homo sapiens
gaatacaagccttgggtccatgtttactctcttctatttggagaataagatggatgcttattgaagcccagacattcttgcagcttggactgcattttaagccctgcaggcttctgccatatccatgagaagattctacactagcgtcctgttgggaattatgccctggaattctgcctgaattgacctacgcatctcctcctccttggacattcttttgtcttcatttggtgcttttggttttgcacctctccgtgattgtagccctaccagcatgttatagggcaagacctttgtgcttttgatcattctggcccatgaaagcaactttggtctcctttcccctcctgtcttcccggtatcccttggagtctcacaaggtttactttggtatggttctcagcacaaacctttcaagtatgttgtttctttggaaaatggacatactgtattgtgttctcctgcatatatcattcctggagagagaaggggagaagaatacttttcttcaacaaattttgggggcaggagatcccttcaagaggctgcaccttaatttttcttgtctgtgtgcaggtcttcatataaactttaccaggaagaagggtgtgagtttgttgtttttctgtgtatgggcctggtcagtgtaaagttttatccttgatagtctagttactatgaccctccccacttttttaaaaccagaaaaaggtttggaatgttggaatgaccaagagacaagttaactcgtgcaagagccagttacccacccacaggtccccctacttcctgccaagcattccattgactgcctgtatggaacacatttgtcccagatctgagcattctaggcctgtttcactcactcacccagcatatgaaactagtcttaactgttgagcctttcctttcatatccacagaagacactgtctcaaatgttgtacccttgccatttaggactgaactttccttagcccaagggacccagtgacagttgtcttccgtttgtcagatgatcagtctctactgattatcttgctgcttaaaggcctgctcaccaatctttctttcacaccgtgtggtccgtgttactggtatacccagtatgttctcactgaagacatggactttatatgttcaatggtgcatggaattaggaacatgttgcgacttgttttgtctactgcatcctaaagatcagcccataatagagagaggtgtaggaaaacggaggaactatatagcagcctttgctattttctgctaccatttcttttcctctgaagcggccatgacattccctttggcaactaacgtagaaactcaacagaacattttcctttcctagagtcaccttttagatgataatggacaactatagacttgctcattgttcagactgattgcccctcacctgaatccactctctgtattcatgctcttggcaatttctttgactttcttttaagggcagaagcattttagttaattgtagataaagaatagttttcttcctcttctccttgggccagttaataattggtccatggctacactgcaacttccgtccagtgctgtgatgcccatgacacctgcaaaataagttctgcctgggcattttgtagatattaacaggtgaattcccgactcttttggtttgaatgacagttctcattccttctatggctgcaagtatgcatcagtgcttcccacttacctgatttgtctgtcggtggccccatatggaaatccctgcgtgtctgttggcataatagtttacaaatggttttttcagtcctatccaaatttattgaaccaacaaaaataattacttctgtcctgagataagcagattaagtttgttcattctctgctttattctctccatgtggcaacattctgtcagcctctttcatagtgtgcaaacattttatcattctaaatggtgactctctgcccttggacccatttattattcacagatggggagaacctatctgcatggacctctgtggaccacagcgtacctgcccctttctgccctcctgctccagccccacttctgaaagtatcagctactgatccagccactggatattttatatcctcccttttccttaagcacaatgtcagaccaaattgcttgtttctttttcttggactactttaatttggatcctttgggtttggagaaagggaatgtgaaagctgtcattacagacaacaggtttcagtgatgaggaggacaacactgcctttcaaactttttactgatctcttagattttaagaactcttgaattgtgtggtatctaataaaagggaaggtaagatggataatcactttctcatttgggttctgaattggagactcagtttttatgagacacatcttttatgccatgtatagatcctcccctgctatttttggtttatttttattgttataaatgctttctttctttgactcctcttctgcctgcctttggggataggtttttttgtttgtttatttgcttcctctgttttgttttaagcatcattttcttatgtgaggtggggaagggaaaggtatgagggaaagagagtctgagaattaaaatattttagtataagcaattggctgtgatgctcaaatccattgcatcctcttattgaatttgccaatttgtaatttttgcataataaagaaccaaaggtgtaatgttttgttgagaggtggtttagggattttggccctaaccaatacattgaatgtatgatgactatttgggaggacacatttatgtacccagaggcccccactaataagtggtactatggttacttccttgtgtacatttctcttaaaagtgatattatatctgtttgtatgagaaacccagtaaccaataaaatgaccgcatattcctgactaaacgtagtaaggaaaatgcacactttgtgtttacttttccgtttcattctaaaggtagttaagatgaaatttatatgaaagcatttttatcacaaaataaaaaaggtttgccaagctcagtggtgttgtattttttattttccaatactgcatccatggcctggcagtgttacctcatgatgtcataatttgctgagagagcaaattttcttttctttctgaatcccacaaagcctagcaccaaacttctttttttcttcctttaattagatcataaataaatgatcctggggaaaaagcatctgtcaaataggaaacatcacaaaactgagcactcttctgtgcactagccatagctggtgacaaacagatggttgctcagggacaaggtgccttccaatggaaatgcgaagtagttgctatagcaagaattgggaactgggatataagtcataatattaattatgctgttatgtaaatgattggtttgtaacattccttaagtgaaatttgtgtagaacttaatatacaggattataaaataatattttgtgtataaatttgttataagttcacattcatacatttatttataaagtcagtgagatatttgaacatgaa

SEQ ID NO: 12361 - DNA, 596 bp, Homo sapiens
gaaatggcccgtttgcccagtgtggctttccccactgccatgatgccccagcagacgggcaggtagctcagaccattctcccagcctatcatcctttcccagcctctgtgggcaagtaccccacacccccttcacagcacagttatgcttcctcaaatgctgctgagcgaacacccagtcacagtggtcacctccagggtgagcatccctacctgacaccatccccagagtctcctgaccagtggtcaagttcatcaccccactctgcttctgactggtcagatgtgaccaccagccctacccctgggggagctggaggaggtcagcggggacctgggacacacatgtctgagccaccacacaacaacatgcaggtttatgcgtgagagagtccacctccagtgtagagacataactgacttttgtaaatgctgctgaggaacaaatgaaggtcatccgggagagaaatgaagaaatctctggagccagcttctagaggtaggaaagagaagatgttcttattcagataatgcaagagaagcaattcgtcagtttcactgggtatctgcaaggcttattgattattctaatctaat

SEQ ID NO: 12362 - DNA, 1341 bp, Homo sapiens
ggattaattacaaaagtgtgtgtgcaatgtcagggaccgacacacagttgtgcagaaacccgtgttagcatcagcagagctatttccacttgtgggcccaaaaggccaggagaagtcactaggacctggaagcagagtcctgtagagcaggtccccaaccccccgggccacagactggataccttagcctgtggggaaccgttaggaaccgggctgcacagcaggaggtgagcagcaggcaagcaagcattactgcctgagctccacctcctgtcagatcagcagtggcgttagattctcataggagcatgaaccctattgtgaactgcatatgtgaaggatctaggttgcgcactccttatgataatctaatgtctgatgatctgagatggaagagtttcatccccaaaccattccctggccccagtccatggaaatattgtcttccacgaaactggttcctggtgccaaaaaggttggagactgctgctgtagagcaggctacctcaagaagagctgtgacttccttcaaagcacacagtgggccttaagccctcccagaaagaagctagggaatgaatgaataccctgatctcatttgcttcactgggctctctgtttgccgactccaagtggaagcctgcaaatatgggagctgttgattataatctatcaatgtaagtcagctttctggctgggagcttggtggagaaggaaagagagtgaatctgaaggggcaaacatattacctaaaataacattctccttccaactatatttctgagaaatttccactggtaacctgttattgatgtgtctaggcagaaagcataaagttaaaaaaaagtacgtatttagaatcctgacttctttttctgatctagtagtgtgtttcttcaccactttggctttgagcactcaaagtgcagacagtcatcagcagtgggatggataaattctggtacattcattgaaatgaatgctacgcataaatgaaaaagagcaacttgcaacaacacgtagtatattcatcaaaataatgttgagcaaaataagccagacacaagtaatacattctgtatgattccattacataagtttaggaaaaaccaaccaatagtaaatagataatctgaacagtggctactttttgggagaaaggtctagactgaagtgagagaaagaagaatctttctggagtctgaaagtatcttgacctgggtggtgactacatgagtgtatatatacgtaaaatttcatgtaaaatttaacttaagatttatgcatttgacttatgtaaattatacttcaataaaatgtttctacaataacctacagaaa

SEQ ID NO: 12363 - DNA, 597 bp, Homo sapiens
gaaatggcccgtttgcccagtgtggctttccccactgccatgatgccccagcaggacgggcaggtagctcagaccattctcccagcctatcatcctttcccagcctctgtgggcaagtaccccacacccccttcacagcacagttatgcttcctcaaatgctgctgagcgaacacccagtcacagtggtcacctccagggtgagcatccctacctgacaccatccccagagtctcctgaccagtggtcaagttcatcaccccactctgcttctgactggtcagatgtgaccaccagccctacccctgggggtgctggaggaggtcagcggggacctgggacacacatgtctgagccaccacacaacaacatgcaggtttatgcgtgagagagtccacctccagtgtagagacataactgacttttgtaaatgctgctgaggaacaaatgaaggtcatccgggagagaaatgaagaaatctctggagccagcttctagaggtaggaaagagaagatgttcttattcagataatgcaagagaagcaattcgtcagtttcactgggtatctgcaaggcttattgattattctaatctaat

SEQ ID NO: 12364 - DNA, 977 bp, Homo sapiens
cagcaaacagggaccacggctaatgatgtgctttttaggggcaggatgcatagaggttaagacttggactatggcctggattgcctgggttcaaatcctgcctctactctatcacttcaggcaggcaggtccttaggctctttgggccttctcatttcctcttctgaaaaggaaattcacctcgtgctgtagtaagtccgtgaattgatatctgtaaggcacttagtaagcactgtatactgtttgactatttgtcttagtctgctcaggctgccataacaagataccatagactggccaggggaggtggctcacacctgtaatcctggtactttgggaggccaaggcaggtggaccactggaggtcatgagttcaagagcagcctggccaacataccaaaattccgtctctagtaaaaatacaaaaattagctgggcgtggtggtgtgcgcctgttaattccagctactcggcagtctgaggcaggagaattgcttgaaccagggaagcggaggttgcagtaagcagagatggcaccactgtactccagcctgggtgacagagcaagactctgtctcaaaaaaaaaagataccatagactgggtggcttgaacaacagaaatgtattttctcacagttctggagactagaagtcccagataaaagtccagcatggtgctgggtgcagtggctcacacctggaatcccagcactttgggaggccaaggcgggcagattatgaggtcaggagttcaagaccagcctggccaacatgatgacaccccgtctgtactaaaaatacaaaaattgcctgggcatggtggcacatgcctgtaatcccagctactcaggaggctgaggcaggagaatcacttgaacccaggaggcagaggatgcagtgagccaagatcgcgccattgccctctagcctgggcgacagagcgagactccgtctcaaaaaaaaaaaaaaaaaaaaa

SEQ ID NO: 12365 - DNA, 137 bp, Homo sapiens
actttgggaggccgaggcgggcagatcatgaggtcaggagatcgagaccatcctggccaacatggtgaaaccccgtctctactaaaaatacaaaaattagctgggtgtggtggcgcacgcctatagtcccagctact

SEQ ID NO: 12366 - DNA, 5659 bp, Homo sapiens
  SITE (4939): n equals a,t,g, or c
gttgaccgcgaaggacgaggcgtccccgtgacgtcctgctcttccaatgaacttcaggcctgcggagacgacggagaacggaagttctctgcctgtgtgctggttggttgcgcgttgaggccagccccgcctcccatcttccggtctcctcagaagtcgcttagctcttcggtggttgtcccacgtccggaggcctagccgtcgcttacctaggatgccgcgtggaagccgaagccgcacctcccgcatggcccctccggccaggtgagaccatcgcagggtttgagaccaaagcgcggccgtccggactctactggggcaatgacgcagagggaggccgcgggcgggggtgaactaaggtcggctgcggcgtgggctcgcctctgccaggcgggggtagattgaacgtaaagcctatgttaggggagtgtggggagggaattcacttacggaaaaagcttcctatccaaacaacgggaaaggcataacgttatggccaggtggtaggaaggcataaattttgacctagcttgatttcggggaaaagagcacccaaggaaataatccggaaatggtcagagggagcgtgatacatatgaagatttttaaatacgtgcaggacataattagtcttttgttatttgagaaggggtctcgaaattgttgaaagcatctgaacgttgaacagatgaggaatagttgaagttgcttttggtataatagttcagacgagtcactttggccagtcttgttttgtaatgtgtaaaatgaaggaattggactagattatttccccagttgaccatctttaagtcctaattagaatgtttatttatttatattttgagtcagagtctaactcaggctgtagtgcagtgacgtaattatggctaactgcagccttgacttcctgggctcaagctattctaccacgtcagcctccagagtaactgggactacaggcatgcgccacctgtgcaccacacttggcgactttattctattttatattttagcagagacagggtctcattatgtggccctggctggtctcaaagtcctggcctcaaatgatcctttcgcctccacttccctaatcactgggattacaggcaagagccaccactccgcagcctatgttaattatttgatccgtcaataaaatgtaaactccatgaatgcagagatttttgtctcttgttcacagttacattaccagcgccttgtagttacctaatacttgaatgaatgaatcctgtaagaatctttctaacttttagtagtctgtatttcttatgacatgttggatatgtctttaaagatactgtgggctatccgaatacatggaaattgttgcaaagaagcagaaaaaactagtatgtcctaggctattactattataagaaaagattaaagtggccgggcgtggtggctcatgcctgtaatcccaacactttgggaggtcgaggcgggtggatcacttgaggtcaggagttcgagacgagcctggccaacatggtgaaactccgtctctactagaaatacaaaaattagctaggtgtggtggtgcgcgcctgtaatcccagctacttgggaagcggaggcagaagaatcggttgaacccaggaggcagaggttgcagtgagattggatcgtgacactgcactccagtctgggcatcagagtgaggccctgtctcaaaaaaaaaaaaaaaattaggccgtgcgtggtggttcacacctgtaatcccagcactttgggagtccgaggcgggtggatcacctgaggtcaggagctggagaccagccatggtcaccatagtgaaacctcgtctcaactaaaaatacaaaaaattagccggaggtggtcgcgggtgcctgtaatcccagctactcggaaggctgaggcaagagaatcgcttgagtctgggaggtggaggttgcagtgagctgagattgcaccattgcactccagcctgggcaacaagagcgaagctccatctcaaaaaaaaaaaaattgaagagagaaaatgatgtaaataatttgaaatgaaaatcttgaggtccattttaatatgtaagttattttaagttgacaatttccaaaactggttggaattgggaacttgatgtttttttcttttctttcacagccgggcccctcagatgagagctgcacccaggccagcaccagtcgctcagccaccagcagcggcacccccatctgcagttggctcttctgctgctgcgccccggcagccaggtctgatggcccagatggcaaccactgcagctggcgtggctgtgggctctgctgtggggcacacattgggtcacgccattactgggggcttcagtggaggaagtaatgctgagcctgcgaggcctgacatcacttaccaggtgggaatttaggcagcatttcccttccatgggtggattttatgagaaaagccagacgtttgtaagttccttaagtgtaggaattgtctttgattttagaacccactgtgctgttaatagacaatgggttttaaagccacatttggccgttgagttactgccttaggccagcaccaacaagtactgtacaaattgtgtttcttcccaaggaggagacttacaacagtccacttgactcactgtaaaacaaccacttttccctttgaatatttcatcccagtgacacttcctactaatcttgtcttgatcttagttaacaaatcaaaaatctcgcatagctgtgtgttcttttacgtgatgtttgccattacccatctttctgatgtgtgtgggctttctagtctaatgagcataggtgtgtatactcttgtatttccggtgtgcttgaaactgctccatccagttttctataatagtaccatttttcctccctgaagcttcagtaaaccatttagtcttgataacaagataataattccactttatttgcatctttatttaggaatctttctggttgtaattggaattttgttaaaactgttggctttcagcttttaaatattttcacttttggctgggaacggaggctcatgcctataatcccagcacattgggaggctgaagtgaagggattgcttgaacccagaagtttgagaccaggctgggcaacatagcgcaaccctgtctttactaaaaatatttatttaaattcttcttttttggaggtggagtctcgctctgttatccaggctccaccgcccgggttcaagcgattctcctgcctcagcctcccgagtagctgggattacaggtgcctgctaccacgcctggctaatttttgtatttttagtagggacggggtttcaccatattggccaggctggtctcaaacgcctgacctcaagtgattcacccttctcggcttcccaaagtgttggaattacaggcgtgagccaccatgtttggcctaaaatattttttaagtaaatgaagatttaaatgttttcacttcccatgttaatagttggaaactttaattagcatctggtgctagttccattttccattaacctcaaagaggatggatactcttcattgtctaggcataagtatgattttctttctcagcaatgttgaatgttttgcctttgcaggagcctcagggaacccagccagcacagcagcagcagccttgcctctatgagatcaaacagtttctggagtgtgcccagaaccagggtgacatcaagctctgtgagggtttcaatgaggtgctgaaacagtgccgacttgcaaacggtaggtaatttgtccaatttacatctgcttaattcacagtggaattcctggatcctgtagaacttagggtaatctgtgtttaataaattagagaagactttgttgaaatttctctagaattaactcctaacaactgggccggaggtttctagtcatttttatgagtaattttctgaattttcttcctttagaaggtataggccaggcacagtggctcacgcttgtaatcccagcactttgggaggccaagacgggtggatcacctgatgtcaggagtttgaggccagcctggccaacatggcaaaaccccatctgtactaaaaatacaaaaaattagctgggtgtggtggcaggcacctgtaatcccagctactcaggaggctgaggcaggagaattgcttgaacccgggaggcggaggttgcagtgagccaagatcctgccactgcattccagcctgggcaactgggtgtctccagtgggagacactgtctcaaatttaaaagaaaaaaaaaaaaaagaaggtataaatcagtatgccagatcttactgtgattactggatgtaagtgaccttctaaccttaaggctgcgaatataagattagattctgttttcaccaaaatccaggaatagacaaaaagactgatacctggtatctgtacctcattgagtgaaaggagttaattaagttcctcaggggaactccggagattcagggtgtcttgttagttgtaggatgccttcagtagcttacaaacaaaaccataaccttcctggaacccagcactctggaaggccaaggtgggaggattgcttgagtccaggagttcgagaccagcctgggcaacatagcaagacctcatctctattttttatcaaaaaaaaacaaaaaacaaaaaacccatagccttggccttttgtcgctgctttcataatttggaaggcttctgttttattgagtatacgaagctagcattcttctaacttaatcttttctgtttgcaggattggcctaatgaagaagttcaacctggagagatggaaaatcagctctcataactaagttaatttagtataaaaatagaattgatagtgagggtataaagtgtaaccatcagttaaacctctcctgtcattcctggcttccttgcttcagaattgaaatggaagtgggggtngtccctactctgtagaatctgggactgggcaaatgtttgtgtggcctccttaaactagctgttatgttatgattttattctttgtgagttaattagaataaagtcattttcgtccaaggtatggttcatttagtctatagtctctggttatgaaattagcatcctcccagatctgacagctccctgaggggttatataaggagtagctcacttgcaaacataacatgctgctcaattcaaaggttctagctgctgtgggtctggagttatgtaagctgagcagtagcaggaaactctgcttaaaatattgtttaaagctgtgcgtgctggcatgtgcctgtaatcccagctacttgggagactgaggcgggagaatcacttgaacccaggaggtggaggttgcagtgaactgagaccatgccactgcactcactgacagagcaagactctgtctcaaaaaaaaaaaaaaaatacattgttttaatcaggtgaatgataaaggaaacaggaataggtctatttggggtgggttccctgtggctaggtcagcactgcgtatcactattcctctactgtttccaagcaagcttgtgcaacccaccttttgttctgttttcttttgctttaggcttttagcagcctggagttatagtttgtctctagtgataagtggaaaagagcgatgaggaaggggttttactggcctaaccataaactgta

SEQ ID NO: 12367 - DNA, 1644 bp, Homo sapiens
ctgggagtggtggcacatgcatgtaatcccagctactcgggaggctgaggcaggagaattgcttgaacccgggaggcggaggttgcagtgagccaagatcctgccactgcattccagcctgggcaacatggtgtctccagtgggaaacactgtctcaaatttaaaagaaaaaaaaaaaaaaagaaggtataaatcagtatgccagatcttactgtgattactggatgtaagtgaccttctaaccttaaggctgcgaatataagattagattctgttttcaccaaaatccaggaatagacaaaaagactgatacctggtatctgtacctcattgagtgaaaggagttaattaagttcctcaggggaactccggagattcagggtgtcttgttagttgtaggatgccttcagtagcttacaaacaaaaccataaccttcctggaacccagcactctggaaggccaaggtgggaggattgcttgagtccaggagttcgagaccagcctgggcaacatagcaagacctcatctctattttttatcaaaaaaaaacaaaaaacaaaaaacccatagccttggccttttgtcgctgctttcataatttggaaggcttctgttttattgagtatacgaagctagcattcttctaacttaatcttttctgtttgcaggattggcctaatgaagaagttcaacctggagagatggaaaatcagctctcataactaagttaatttagtataaaaatagaattgatagtgagggtataaagtgtaaccatcagttaaacctctcctgtcattcctagcttccttgcttcagaattgaaatggaagtgggggtgtcctactctgtagaatctgggactgggcaaatgtttgtgtggcctccttaaactagctgttatgttatgattttattctttgtgagttaattagaataaagtcattttcttccaaggtatggttcatttagtctatagtctctggttatgaaattagcatcctcccagatctgacagctccctgaggggttatataaggagtagctcacttgcaaacataacatgctgctcaattcaaaggttctagctgctgtgggtctggagttatgtaagctgagcagtagcaggaaactctgcttaaaatattgtttaaagctgtgcgtgctggcatgtgcctgtaatcccagctacttgggagactgaggcgggagaatcacttgaacccaggaggtggaggttgcagtgaactgagaccatgccactgcactcactgacagagcaagactctgtctcaaaaaaaaaaaaaaaatacattgttttaatcaggtgaatgataaaggaaacaggaataggtctatttggggtgggttccctgtggctaggtcagcactgcgtatcactattcctctactgtttccaagcaagcttgtgcaacccaccttttgttctgttttcttttgctttaggcttttagcagcctggagttatagtttgtctctagtgataagtggaaaagagcgatgaggaaggggttttactggcctaaccataaactgtaactaaacccatgactgcattctctcccttggacgcccctgattgaagataaaaaaccattcttaatatatgcagttcccctgaa

SEQ ID NO: 12368 - DNA, 289 bp, Homo sapiens
atttctttcattcagttcatactacgcgtccacactgtgcctccaaaaatatttgcccttataactgaatgctcagaaaggctaagaaatctgcccaaggtcccctggcaatccagccagagatgtgagtcactcttaaggttggatttaatacaaatgtttgaaggacggagcgacaggccagctgccctagggaagcaaaatgctaagtgctctgatgcgaggaccggaggacaaggttcgcggatgaaccacaggaacttccgggttttaaagatcctggcgccaa

SEQ ID NO: 12369 - DNA, 655 bp, Homo sapiens
tttttctgagtttcagagccctgcatcactgccaggtgagtgaaatgctggtgattgagggaattagccagttgctgtctcgcctcctatcagctgtgttcctggagtgcctaaacattcagttcctgaaagaggctccctttcagaaagagggtctcagcacagttcactcctggccagttccccggcatattccctcctgggtttatagaagacacttttgctaattttcctggaggctcgggacctctgtgagtctgtagtgttaatgctcagatgtccctcgtgtccaggtgtagtggtgattcaaataaattgaatcaaagaaaaatgacgaaatgtaagcgtgactggccaggcctactccctggtaggagtcattgctacaaggagaaaggtgtggaataatcctctaggtgcactggccttttgccctaaagtcagaaaggattttgtgatgcattcattgattgtccagttggcgctccaattccctgagtttggtgtccatggattcagccaatcgaggattgagaatatttgaagtctgtgcaataaagtgagatccctacaaaaaataaatcagccaggtgcagtagcatgcacctgtagtcccagccactagggaggccgaggtgggatcacagaagcccag

SEQ ID NO: 12370 - DNA, 656 bp, Homo sapiens
tttttctgagtttcagagccctgcatcactgccaggtgagtgaaatgctggtgattgagggaattagccagttgctgtctcgcctcctatcagctgtgttcctggagtgcctaaacattcagttcctgaaagaggctccctttcagaaagagggtctcagcacagttcactcctggccagttccccggcatattccctcctgggtttatagaagacacttttgctaattttcctggaggctcgggacctctgtgagtctgtagtgttaatgctcagatgtccctcgtgtccaggtgtagtggtgattcaaataaattgaatcaaagaaaaatgacgaaatgtaagcgtgactggccaggcctactccctggtaggagtcattgctacaaggagaaaggtgtggaataatcctctaggtgcactggccttttgccctaaagtcagaaaggattttgtgatgcattcattgattgtccagttggcgctccaattccctgagtttggtgtccatggattcagccaatcgaggattgagaatatttgaagtctgtgcaataaagtgagatccctacaaaaaataactcagccagggtgcagtagcatgcacctgtagtcccagccactagggaggccgaggtgggatcacagaagcccag

SEQ ID NO: 12371 - DNA, 1208 bp, Homo sapiens
aggaaagtctgaaattagcaagttatgaaattaaaaaatcatcgagatttaaaaaatatttttgggcttcatcttcatatgtgaagaaagtacgtgtgccactcacctgaaggaatgtctgcataagtattgcagtttctttaacccaacaaggtgtgattgcatttattcacatggacagaataacaaacccaaaaactttatcattcgttgatgagaagtgttagtcatttatttgaatgtcagttttaagctactgataacatgattgattagcaacggaaacattttagaagataccacgcatttgtttaattcaaatggtcaactgtcaggatacatcgctctcttattccactctcaccacaatctaactttaaaacattctcatcaccctaaaaagcaaccttggcactccccatcctccccttccatcgcccgtgccccaggcagcccctggttactttctgtctctgaggacttgcctgtcctgggcgttccacgtaaatgagtcagacctatgcagtccctgctggcctccttcactggcatatactcttttactggttcattcgtattgtagtgtatatcagtacctcatttctgtttattgccaaataatattccatcgtgtggatacaccacactttatttatccattcataaggtgatggacatgggttgtttctactttttgcctactacgactaatgctgctgtgagtattcagggttctagccaatgcagttaggcaagagcaagaaggtggcgtccacattgtaaaggagagcaaaactctctctgtatgtgtgacatggtcatgtccgtaggaaatcctcaggagtcacccagccctctattaattaaaggggtttggtaagattgtaggacgcaagatcaacacacaagaatgaaattgtatttctgtatgctaacaacgaaccatccagagatagaattaagaaaacaattgtatttacagtgcatcaaaaaatatttcattgtgttaagacggcaacaattctagcttcttttatctataggttctgtgtaatacctactaaaatcccagctacctttgcataaattggcaagctgattctgaaattcacatggagatactagggattcagcatggctacaacaatcttgaaaaacaaacaaagttagaggacttgcaactcgtgatttcttctttaaaaaaaaaa

SEQ ID NO: 12372 - DNA, 1498 bp, Homo sapiens
atcagaaaccttttgtcaaaagacattttctgtctatatagctacataccatagccgagtctgctgtgaatctctttgacgtgacggcactcttactctctggctgcattcattcctcccttttccaaagcttccaatttgggggcatattaatttctgttgtattaaaatgacaaaagttgtagaaatcatcagtgtttgaaatcatggagagcatttgaggtaagatttgaaaaataattttgtattacagactctacattatctactactgcataagaggtgaaggaaagtctgaaattagcaagttatgaaattaaaaaatcatcgagatttaaaaaatatttttgggcttcatcttcatatgtgaagaaagtacgtgtgccactcacctgaaggaatgtctgcataagtattgcagtttctttaacccaacaaggtgtgattgcatttattcacatggacagaataacaaacccaaaaactttatcattcgttgatgagaagtgttagtcatttatttgaatgtcagttttaagctactgataacatgattgattagcaacggaaacattttagaagataccacgcatttgtttaattcaaatggtcaactgtcaggatacatcgctctcttattccactctcaccacaatctaactttaaaacattctcatcaccctaaaaagcaaccttggcactccccatcctccccttccatcgcccgtgccccaggcagcccctggttactttctgtctctgaggacttgcctgtcctgggcgttccacgtaaatgagtcagacctatgcagtccctgctggcctccttcactggcatatactcttttactggttcattcgtattgtagtgtatatcagtacctcatttctgtttattgccaaataatattccatcgtgtggatacaccacactttatttatccattcataaggtgatggacatgggttgtttctactttttgcctactacgactaatgctgctgtgagtattcagggttctagccaatgcagttaggcaagagcaagaaggtggcgtccacattgtaaaggagagcaaaactctctctgtatgtgtgacatggtcatgtccgtaggaaatcctcaggagtcacccagccctctattaattaaaggggtttggtaagattgtaggacgcaagatcaacacacaagaatgaaattgtatttctgtatgctaacaacgaaccatccagagatagaattaagaaaacaattgtatttacagtgcatcaaaaaatatttcattgtgttaagacggcaacaattctagcttcttttatctataggttctgtgtaatacctactaaaatcccagctacctttgcataaattggcaagctgattctgaaattcacatggagatactagggattcagcatggctacaacaatcttgaaaaacaaacaaagttagaggacttgcaactcgtgatttcttctttaaaaaaaaaaaaaa

SEQ ID NO: 12373 - DNA, 738 bp, Homo sapiens
ttcgtgaatcgcgaatgctgctgtctgatcgttcctctggaagttttgtctcagaggagtacccggctgtgtgaggtgtcagtctgcccctgcttggggggtgcctcccagttaggctgctcgggggtcaggggtcagggacccacttgaggaggcagtctgcccgttctcagatctccagctgcgtgctgggagaaccactgctctcttcaaagctgtcagacagggacatttaagtctgcagaggttactgctgtctttttgtttgtctgtgtcctgcccccagaggtggagcctacagaggcaggcaggcctccttgagctgtggtgggctccacccagttggagcttcctggctgctttgtttacctaagcaagcctgggcaatggcgggcgcccctcccccagccttgctgccgccttgcagtttgatctcagactgctgtgctagcaatcagcgagactctgtggggtaggaccctccgagccaggtgcgggatataatctcatggtgcgcccttttttaagcccgtcagaaaagtgcagtattcgggtgggagtgacccgattttccaggtgctgtctgtcacccctttctttgactaggaaagggaactccctgacccttgctcttcccgagtgaggcaatgcctcgccctgcttcggctcgcgcaacatgcgctgcacccactgtcctgggcccactgtctggcactccctagtgagatgaacccggta

SEQ ID NO: 12374 - DNA, 1155 bp, Homo sapiens
tccgtccagctttgttctgttgctggtgcggaactgtgttcctttggaggaggagaggcgctctgctttttaaagtttgcagtttttctgctctgttttttccccatctttgtggttttgtctacttttggtctttgatgatggtgatgtacagattagtttttggtgtggatgtcctttctgtttgttagttttccttctgacagacaggaccctcaactgcaggtctgttggagcttgctggaggtccactccaaaccctgtttgtctgggtattagcagcagtgggtgcagaatagcggattttcgtgaatcgcgaatgctgctgtctgatcgttcctctggaagttttgtctcagaggagtacccggctgtgtgaggtgtcagtctgcccctgcttggggggtgcctcccagttaggctgctcgggggtcaggggtcagggacccacttgaggaggcagtctgcccgttctcagatctccagctgcgtgctgggagaaccactgctctcttcaaagctgtcagacagggacatttaagtctgcagaggttactgctgtctttttgtttgtctgtgtcctgcccccagaggtggagcctacagaggcaggcaggcctccttgagctgtggtgggctccacccagttggagcttcctggctgctttgtttacctaagcaagcctgggcaatggcgggcgcccctcccccagccttgctgccgccttgcagtttgatctcagactgctgtgctagcaatcagcgagactctgtggggtaggaccctccgagccaggtgcgggatataatctcatggtgcgcccttttttaagcccgtcagaaaagtgcagtattcgggtgggagtgacccgattttccaggtgctgtctgtcacccctttctttgactaggaaagggaactccctgacccttgctcttcccgagtgaggcaatgcctcgccctgcttcggctcgcgcaacatgcgctgcacccactgtcctgggcccactgtctggcactccctagtgagatgaacccggtacctcagatggaaatgcagaaatcacccatcttctgccttgctcacgctgggagctgtagactggagctgttcctattcggctgtcttggctgccccccttccatttcttgta

SEQ ID NO: 12375 - DNA, 628 bp, Homo sapiens
gagcctccacagcctgcaggtatccagacgacgttctgcacacagagactcagactcccaccagggcctcacgccccactgcctctccgggatgcctgcgtgtggctcactcccaccacgggcacatcagccctggtgcccagctggccttctgcagagcctggtgctggagcagcttctcgaattctctgctgcctcctccccacagccttccagggcctcagagctgctgccaggccagcacctccttgggcccgtgttgaggccccacggggctgggctcatgtgggagctgatcttggccgggtgatccctcactgctctggacaaaagggagccatgggccgggcatggtggctcacgcctgtaatcccagcactttgggaggccaaggtgggcggatcacctgaggtcggagtttgagaccagcctggctaatgtggtgaaaccccgtctctattaaaaatacaaaaattagccgggtgttgtggtgggtgcctgtagtcccagctactcgggaggctgagacaggagaatggcgtgaacccgggaggtggaggttgcagtgagccaagattgtcccatccagcctgggtgacggaggaagactctgtctccaaaaaaaaaa

SEQ ID NO: 12376 - DNA, 816 bp, Homo sapiens
cagttcaactcccgtgctctccaaagctagtcccatcattacacgcgccatttaggacgctccaggccatctcggtcaccaggggcctggcggtcaccgtgtttcctcatgaggctcagtgggtgctgtgtgtctgtgggtgccggtgatgaaataaatgtaaggcatcagagcattttaatagatgggagcctccacagcctgcaggtatccagacgacgttctgcacacagagactcagactcccaccagggcctcacgccccactgcctctccgggatgcctgcgtgtggctcactcccgccacgggcacatcagccctggtgcccagctggccttctgcagagcctggtgctggagcagcttctcgaattctctgctgcctcctccccacagccttccagggcctcagagctgctgccaggccagcacctccttgggcccgtgttgaggccccacggggctgggctcatgtgggagctgatcttggccgggtgatccctcactgctctggacaaaagggagccatgggccgggcatggtggctcacgcctgtaatcccagcactttgggaggccaaggtgggcggatcacctgaggtcggagtttgagaccagcctggctaatgtggtgaaaccccgtctctattaaaaatacaaaaattagccgggtgttgtggtgggtgcctgtagtcccagctactcgggaggctgagacaggagaatggcgtgaacccgggaggtggaggttgcagtgagccaagattgtcccatccagcctgggtgacggaggaagactctgtctccaaaaaaaaaa

SEQ ID NO: 12377 - DNA, 677 bp, Homo sapiens
gctgcagtccctgtctcttcagaccctctgtgctcttaggagactgtcgttgttctctcctttttaaaccatcctgtgccttttaacagaataaacggcaaggggtccccactgaggtcgaataatgctggaggagggccgtgggtccaggcatggtgggggctgcctcctggttgttgatgagcagaaattcaggccggtttgacggcaggcacgtgagggaggttgctgtgtgtcagtggccctgtgtccctggcactgtgtccgaacctgacagccgccgctgtgtcactgggcacctgccctgcgcaccctcccctgtgacgggcactctcacagctttcctggcgaggctgagggaaaaacatggcaaacaactcgcacatgactttgcgtttttggccttgtcatataataaaagtaatttgtgggcctaaaataaatcagggctggggatcagatgcctccaatctggcctttaattgcaggcgtgacatggcttgcctcggcgagtctgctcctaattaaagtgggctggcggtgtatgaagttcgcacggatcctcagggtgctgacccagccccggttccggagggccagtgtgacgacacctcgtggcccaggagagcagggcgggccacccatggccaccgtgccaggaatggggtcttctggct

SEQ ID NO: 12378 - DNA, 425 bp, Homo sapiens
gcccgcttccaggctgtggcatgccaggcgagtcaccggcatcctgtccctgcccaccgctttaagaaactgttagttctgtttgaaatgtcatcactgggcgtgaattcccatcttcagataatcccgccaggcggtgtttggatgaggagtttattcaggctgtgggggtctgtgcgtgcccgcgggtccctcccactgcagccggcgaggctggccctgacccagagtcgcccgcccacccagtctacgtaggcattagaggtttgggttctgagctcagggcctggtttccatggcaaatttctctcccttcggcgaggctgctgccggcggggttcagctccccagaagggagatggcagcaaatctgcgggaggagagtcttcgttatctttgcttaaaaattgggcagcgcatggctt

SEQ ID NO: 12379 - DNA, 425 bp, Homo sapiens; identical to SEQ ID NO: 12378

SEQ ID NO: 12380 - DNA, 677 bp, Homo sapiens
gctgcagtccctgtctcttcagaccctctgtgctcttaggagactgtcgttgttctctcctttttaaaccatcctgtgccttttaacagaataaacggcaaggggtccccactgaggtcgaataatgctggaggagggccgtgggtccaggcatggtgggggctgcctcctggttgttgatgagcagaaattcaggccggtttgacggcaggcacgtgagggaggttgctgtgtgtcagtggccctgtgtccctggcactgtgtccgaacctgacagccgccgctgtgtcactgggcacctgccctgcgcaccctcccctgtgacgggcactctcacagctttcctggcgaggctgagggaaaaacatggcaaacaactcgcacatgactttgcgtttttggccttgtcatataataaaagtaatttgtgggcctaaaataaatcagggctggggatcagatgcctccaatctggcctttaattgcaggcgtgacatggcttgcctcggcgagtctgctcctaattaaagtgggctggcggtgtatgaagttcgcatggatcctcagggtgctgacccagccccggttccggagggccagtgtgacgacacctcgtggcccaggagagcagggcgggccacccatggccaccgtgccaggaatggggtcttctggct

SEQ ID NO: 12381 - DNA, 1014 bp, Homo sapiens
cacaactatagattacagttctagatcttagtggtctgaattatgtggaaaaggtatacaccacacttcgaggactggctactttcactacaaaaaaatggagtcaccctaagctttttgtaagaagcatgtattgaatttgtaatcattgtaaagggtttaaaaaatggcatttctcaaaggatggctaccattttgctggagccaaagaagtatccattcttatttatgatttctggggcctccctgacccaactacttgttcaagacttttattttgacttagaatgatgtaaaaatgacttctgttttggtgaaggaggctgaaagtgaacggaaatgtttgtagagggaaataaagtataatgtgccatttcacagatcattgaattagaacagaagactcccctttttaaaatgtttgctgctgcaactgtgtggtacaatgaaggaaaattcacgcttgcagatgctttgttcaagggcatttgtagtttccatgtgtgttcaactgacttctaaaggcctttcaaacatatgatcttgcctccacttcctgtgaaattaacctcctttctttaaaaatacaatgatttaaagaaaattgccaccataaacaaagctaaaagactaggggaaaatatttgctgcatatgtagtcaacaggattaccatctataatatataaagaggtcctataaattgaaaatttggccaggtgtggttgttcatacctgtaatcccagcactttgggaggccaaggcaggagaatcactcgagctgaggagtttgagaccagccctggcaacacagggagaccccatctctacaaaaattaaaaattagctggacatgatggtgtgcctgtagtcccagctgcttgggaggctgaggtggaaggaccacttgagtctgggaggtcaaggctgcagggaactatggtcacaccactgcactccagcctaggtgacagagcaaaaccctatctcaaaaaaaaaaaaaaaaaaaaaaaa

SEQ ID NO: 12382 - DNA, 1014 bp, Homo sapiens; identical to SEQ ID NO: 12381

SEQ ID NO: 12383 - DNA, 105 bp, Homo sapiens
aggctgaggtaggagaatcgcttgaacccgggaggcagaggttgcagtgagctgagatcgcaccattgcactccagcctgggcaacaagagtgaaactctgtctc

SEQ ID NO: 12384 - DNA, 279 bp, Homo sapiens
agaagaaatacaaatagccaataaacttactagtaatcacaagaaccgtaatgagaaaaacaagaaaataggacatttgcccatctgatagcaaaaatttaagagtgattatatccagttttcaatataaaatgataatccaatttaataaaatataccatagaaatgataagcacaaacaacttatgacccagccaatccacttccagaattttattctggaatacacatgaggccaggtgcagtggttcatgcctgtaatcccaacactttgggaga

SEQ ID NO: 12385 - DNA, 279 bp, Homo sapiens; identical to SEQ ID NO: 12384

SEQ ID NO: 12386 - DNA, 418 bp, Homo sapiens
gctttacaaatctgacagtgttttgagaaaggaacacagaacattgccagaaggagcctatgattgaggtgaacctcacgaatgtctttgaaaacctgactctaaccaaaaagtatgagggagggagagttctggctgctgtagacgacactacctcatgaaagtgacttagaaatcagcctggagtccctagagcaggtctaacaatgagggaggcaagattaaaatggagaaagaagcctgctaggggttgcatgagctggttgagttcaccaagccagattttccaacgcaacattttatgtgtgtgtgcttgtattcgtttatctggggagagaatgaataactttccatcagattttcagaggaacctgtgaacccttcccctgcctactccctgctcccaattaaaaactac

SEQ ID NO: 12387 - DNA, 13371 bp, Homo sapiens
agttgccttgttgaaggggatgctaaagaagaaatactgcagccaccggaacctcatccagtgccacccatcttgacaccttctcccccttcagcttttccaacagtcactactgtgtggcaggacaatgatagataccatccaaagccagtgttgcatatggtttcatcagaacaacattcagcagacctcaacagaaactatagtaaatcaacagaacttccagggaaaaatgaatcaacaattgaacagatagataaaaaattggaacgaaatttaagttttgagattaagaaggtccctctccaagagggaccaaaaagttttgatgggaacacacttttgaataggggacatgcaattaaaattaaatctgcttcaccttgtatagctgataaaatctctaagccacaggaattaagttcagatctaaatgtcggtgatacttcccagaattcttgtgtggactgcagtgtaacacaatcaaacaaagtttcagttactccaccagaagaatcccagaattcagacacacctccaaggccagaccgcttgcctcttgatgagaaaggacatgtaacgtggtcatttcatggacctgaaaatgccatacccatacctgatttatctgaaggcaattcctcagatatcaactatcaaactaggaaaactgtgagtttaacaccaagtcctacaacacaagttgaaacacctgatcttgtggatcatgataacacttcaccactcttcagaacacccctcagttttactaatccacttcactctgatgactcagactcagatgaaagaaactctgatggtgctgtgacccagaataaaactaatatttcaacagcaagtgccacagtttctgctgccactagtactgaaagcatttctactaggaaagtattgccaatgtccattgctagacataatatagcaggaacaacacattcaggtgctgaaaaaggtaataatatagtgtcaaatacttaaatgtctttcctatgtgctagtcactgttttaagcactttagctgtattgatttattatgttttattccacactctaccatagaacctacagcaaaatctgtcttagatactaattttttaatataagcttttaatgtattgttaacaatttggtcacattatattactgggttttgtgtttctaaattattttagtagttataactggataacttattttctttttcttctgtattatagatcttagtgtttttgtatcggtcaaaaatttatctgactgaataattagaaataatttagggaagaatcacttaaaataacagtggcaaaaatactgtagaatgtcttgattggccatataatgttactcgtttttcctaaatgtttagtcattttttactgttcctttaactacagattacatttttttgtttgtttgtttttactgtcttcacaaatgcttccaaatatggctgcttccaaccctgagtttaacccaggaacaatactgcaaactgctcaattcagtagtgagtgggctatatgcatacctactcatcaaagctattatttaaagaattattatttttttagcactcttagcatttcaagataatgcatgcactcagttcccaaagtgtattattgcttcttgaaactcctctttgatctgctgaaagtaatgatggctaccatcttaaacagaccctaaggttgagagtaaacatataaatttgaaagctgtttattgatatattgattatcagtggtcacttacctatcagtgaactttggtagtgacacatacagactggtatttataacgtgcaggcaaaataagtactgtgaccttgaaagatttttttttttttttgagacttgcactcaaaagattttttttttgagtcttgcactgtcacccaggctagagtgcagtggcaagatctcggctcagcctcccaagtagctgggattacaggcacccactaccacacccagctaatttttatgtttttagtagagacagggtttcgatatgtttgccaggctggtctcaaattcctggcctcaagtgatctgcccacctaggcctcccaaagtgctgggattacagacgtgagctaccacacctggccttgaaagattattttctatttctgacccattatataccacccatactgtagtgcttgtattttctctcacacatactgtattttttaacttgagagagtgtatttggtagactagatgacagtctttttgagacagagttttgctcttgttgcccaggctgaagtgcagtggcgcaatcttggctcactgcaacctccgcctcctgggttcaaggaattctcctgcctcatcctccctagtagttgggaatacaggcatgcgccaccatgcctggctaattttttgtatttttagtagagacagggtttcactgtgttagccaggatggtctggatctcctgacctcgtgatccgcccacctcggcctcccaaagggctgggattacaggcgtgagccaccacgcccagccaggtgacagtcttaaactatttgcttaaattacagaattatcttttcttgatttatctttgttttatttgaaggatctttagaagataatgaatagtataatattactttaccagtttaccataattttaaattgctaatgtcttttgttcctcagcttcagaatttgaaatataactgcccagctgtaactatataagaaaatatgtagataagaaattttcattttgagtttttagtatatcaagcatgtggtattgtacctaggaagttttattgtttttttgttgttgttttgttcttttgcttttttttttaaaaaaaaccaaaaaaccattactggaaataggatttggtgagggccagaaagatgtatgatgtgatatgcttattaaaagttactactacatgacgagtctgttggtggctcatgcctgtaatcccagcattttgggaggctgaggcaggaagttcacttgagcccaggagttcataaccagtctgggtgacatagtgacacccaatctctacaaaagataaaaaactagccgggcatggtggtgcacacttgtggtcccagctactctggaggctgaggtaggaagatcacttgagcctaggagctcaaggctgcagtgagccataattgcgtcccggcactctgcctgggcaacagagggagaccctgtctcaaaaaaaaaaaaaaaaaaagagtaagatatagctaaaagcaccctactatgtgccagctcatttctgtttgtttggttttgtatttcaaagcaaaaatcactatacatgtgatttctggtttctttttactcaaccttaactatgttattggtttgattttaaccgaagattttcctgtgtgtaaatgttctttgttgcagcataactacaagtagtctcatttttaatgtgttgccaaatatttaccatatggattatttactttatagattgtttatttaccttatagattattatttcctttgtagatcattatcttatagagccattggcaccagaattagagttttggggggttttttggtcctagaacttgttagtgaattacagtcacacatttcttaatggcagggatatgttctaagaaaaatatgtcattaggcagttttgccattgtgtgaatgtcatagaatgtatttacacaaacctagatggtatagtatatactacacatctgggccatacaatgtaacctcttgctcctaggctacaaacttgtatagcatattaccatactcaacaattgtaacacaatggtaagtatttgtgtatctaaacatagaaaaggtacagtaaaaatatggtatcataatcttacaggaccgctgttgtttatgcggtcttgttgatgaaaacatcattatgtagtgcatgactataatggaatacttttgtattgatacctaaaaaaaacttttgcataagttactgcctgacaaaaattcttagctatcaattctaatttcagtcttgacttaggcctcctgaaagatttctcagattcaactacagaaggccccatacagtgtatgatttgcaaaagcctatataaaatacgcaatatctggttggataacctctaaaacaaaagtttttaacaggaaaggcagcccaaagttccagggagaaacatgcatttgcaaagcaagggccacgcttagaaaataaaagtttttaagggtgagaactgccatgagagaaaaagcacagagtttctggaagataactgatagaaaaagggctgaactgccctttttgttttgttcatttaatttaagaaatggtaccagaatgccaagattatgtgtcccttccttccaacagccatctcttcactgtgcgctgttagtagcaagagggcaaggagacatatggtgatgactcagactaccactactggataaggtagatagttctttagtggcaagagagagttctggtactcttggtagatgtatcaagtattggactggaactcctctttcaggaggacccagaagctgtattttcttgcgtctccagctaaataaatgtaggtggggcaaaagcaatcatactcacctcatgcgtgttgaaaattgacaagacctatgcatagccatcaggtgtggtaaaatagcagagtatcatggcagaactgtgtgttcatttaagaacaatgggcaaggctcaagacaaaataatacaggaccgtcgcatttctttttctttatcccaccctccccaacctgagagttcacacacaggattgtattcttatattttctttctattcctccagtgaaaactcaaagatcaaatacactcatttaccttaagccataataaagctaaccaatgaggcttacttaatgcactctctttcccaagagctaattttgtttttactagtgaaaaacctgtatatagcttcagtcagcattctcaaagtacagccatgtgccactgtacacaaaatctttagcaataaataaatgaagattttttaaaaaactttaatagctatatctttatctgttttggaaaaataactagtatttccaatgttatttcagttattgctgtttaagacatgactgaggtacacagttaagtttaaaatgagtcagattttaaaagtgaataggacacatgttacatagtatggcaaaaatcatgaaaggtgttaagcaattgaatcctgtttgggaaacactggcttaggcgtttcataacgcaaatgaccaaagctttcctttttggacacaaaacatcatcagtaagctcagtagagaagtcacttgccagctgacttctctactgaagattcccttcaggcttggagaactgaatgatgtctgtagagtgacaggaaagtcatgggagagagtcatttctgtatacattatctttgctcaataagcatcataattcttgataatgagtggaaaaggtttcttgcatttttttgcatttttaaaaactgatctagatatttgtgacaggaatttttagaatgtcaagaaagctctctgattttgtttagatgacatgttaatttgtctaaatttttatgtgtttaatttagatgttgatgttagtgaagattcacctcctcccctacctgaaagaactcctgaatcgtttgtgttagcaagtgaacatagtgagtgtctcttttgcttttacatttacttcatattctaataataaactccgaaaaacatacctgattttaatctattagctattgtgctacataattaaattcaaaaacaagtaaattgatgttgacatgcttttaattctttgtttgaaaaatgcttttaaattatattttttacttgctaagatcgatagaaattactgcatttatgttagatatcagaattcaattcatttaaatgtaattataggctgggcatggtggttcaagcctgtgatcctagcactttgggaggcctaggcaggtggatcacctgaggtcaggagttggagaccagcctggccaacatggtgaaactccatctctactaaaaatataaaaattagctgggcatggtggtggacacctataatctcagctacttgagaggctgaggcaggaaaatgacttgaacccgggagttggaggttgcagtgagccgagattgcgccattgcattccagcctgggcgaagagcaagatttcgtctcaaaaagtaaataaataaataaatgcaattacaaagccaggtgcagtggctcatacctgtaatcccagcaccttgggaggctgagatgcactgatcacctgaggtcaggagttcaagaccagcgtgaccaacatggagaaaccccgtctctactaaaaatacaaaattagccaggcgtggtggcgcatgcctgtaatcccacctacttgggagactgaggcaggagaattgcttgaacctgggaggtggatattgcagtgagccgagatcacactattgcactccaacctgggcaacaagagcgaaactccatcttaaaaaaaaaatgcaattataagtgtatttgcaatctggtgtattttcattcattaaaaatagcacttattgactcatgcctgtaatcctgccactttgggagaccaaggcgggcagatcacgaggtcaggacatcaagaccatcctggctaacacactgaaaccctgtctctactagaaatacaaaaaattagctgtgtgtggtggcatgcaccagtagtcccagctgctcgggaggctgaggcaggagaatcgcttgaaccccggaggcagaggttggagtgagccgagaccatgccactgcactccagcctgggcaacagagcaagactccatctcaaaaaaaaaaaaagtagcacttatttatgaaaacattaattgctttccttagatttaggtcagtaaacatttctgttgggtgggcgtcactggattggtgttaactgaaagacatttaacaccactggagtagactgagcacattggctcatacctgtaatcgcagcactttgggagtccaaggcgcgaggattgcttgagcctaagagtttgagaccagcctgggcaacacagtgatacctcctctcttctaaaaataaaataactgtccagttgtggtggtgggcgcctgtaatcccagctgcttgggaggctgaggcaggagaattgcttgaacccaggatgcagaggttgcagcgagctgagaccacgccattgcattccagcctgggcaacaagagcaaaaaactttgtctcaaaaaataataataacaacaaaaaattagccaggtgtggtggcatgtgcctgtagtccttgctactcaggaggctgaagaagaaggattgcttgatccctgtagttggaggctgcagtgagccatgatcgcaccactgtactccagtttggtaacagtgagaccccgtctgtggaagaaaaaaaaaagaccactggagtatcagaactgggagaaagtgatgatactttaaaacattgataatatacttctccctattaatcctctaaaaaagagtgcagaaacagcttgattgtatttacagtgtctcatgctcagtggaggtgctcacttgtctaagtacattttaccaatatattaattttgactgatttttgttttgtttcatttggttttctttttatttatttattttttatttattcatttttttgagatggagtctcattctgtcgccccggctggagtgcagtggcacgatctcggctcactgcaagctccacctcttgggttcatgccattctcctgcctcagcctcccatgtagctgggactacaggtgcctgccaccacacccggcttatttttttgtattttttttagtagagacagggtttcaccgtgttagccaggatggtccatctcctgacctcatgatccgcccacctcagcctctcaaagtgctgggattacaggcatgagccaccacgcccggctaatttttttgtatttttttagtagagacagggtttcaccatgttagccaggatggtctccatctcctgacctcgtgatcgcccgcctcagcctcccaaagtgctgggattacaggcgggagccaccacgcccggccttgttttgttttatttcgagttggagttccactctgtcactcaggctggagtgcagtggcacgatctgggctcaagctgttctcctgcctcagcctcctgagtagctgcgattagaggcatacaccgtcactcccaactaatttttttattagagatagggtctcaccatgttggccaggctggtcttgaactcctgacctcaagtgatctgcctgcctcagcctcccaaagtgaattttgactgattttaagataaatgttaaagagccaagcacaatggcttatgcctgtgatcccagcactttgggagaccaaggcaggtggatctctgttccatttgccctaggagtttgagaccagcctgggcaacatggcaaaaccctgtctgtataaaatcaaaaattagccaggcgaggtggcatgcacctatagtcccagctactcaagaagctgagatgggaagattgcctgagcctgggaggttgaggctccagtgagccgagatcgcgcctggtcaacagagtgagaccctgtctcaacaacaattaaaaagaatgttgaaagcaatgaaacggtatacttcagttgtctaagtctgtcacgttgtctgtagattaagcagtatacttcacttgtctgtcacattatctatagactgtaatacactgatgactgaatttatttacttaggttttgaaggaaggaaacagaatgttctcgaattaatagaaactacaattttttttttttagaaacttcagaaatatgcttacccagaaactacaaaatttttgtggaagcgatagtttctaaaatctttaggatctgttttttgtattactttaatgcaaagaaatttcagaaattcaaggtgttaataacaataagatttcatttttctcagatacacctgtaagatcggaatggagtgaacttcaaagtcaggaacgatctgaacaaaaaaagtctgaagtaagtccttttggaattggaacagttatagcttaacatttctactcttttgttaactaatcttgcagttgttgaaatagctgtcatcttaagatcgttaaatatagtttgtaatttttgatcggcatttcttatactaagatttcagatgaaaagcccatataaaaggtaggttctgaaattttttaaaagggtaacctgatctacatacaactatcactttaaagtattgttttctcaagctgtttttgaaatatgtaaattatgcttcaaataattttgaaggtatgaatgaaataggagttactattttcagggtcctaattctttcttacatttctagatgcttcccattataacactaggcacatagtcgcttcttttgtttttttctggctacctggcatttctttgacattcgagaaatgttttggcaattaaatattttgagggcgtggcatggtggctcatgtctgtaatcacagcactttgggaggccaagcagaaggatcacttgagcccaggagttcaagaccatcctgggcaacatggggagaccttatctctacaaaaatttttaaaattagccaggcgtggtggcgcatgtctatggtcccagctttttgggaggctgagatgggaggattgcttgggccccagaggtcaaggctgcagtgagccatgatcacaccactgcactccagcctgagtgacagagtgagaccctgtctcagcaacaacacatttgtccataggagataacattttttattaacattaatactttttgtattttctcccatactttaatatctctgaaatttagctacatcttatatttgattttaagacatgatgtagtttaattgacatataaaatacaataatgatataattagtaatagtggctggcaaaacacagctgtatgttccttcatgcagtagcccatgcttttcagtgctcatccagaaacatttactccaaggagaaatagcataacattttaaaattttaagcctaattaaaaaacaattgtttgcttttcctctgatgctgaaaatgataggccttgatttcttgggatatatacccataacagacccagctttctattatttgtatataaaatgaatgtattgtaataggtattaaatgtcttcctcgtagggcttgataacctctgaaaatgagaaatgtggtaagttgttagattttttttttcctttttactgtagattttattgattaatttctacaaaataacatgcttcatagttcatgctatatagttatttctgtatgtgaaaatgtctaggacaactcttgtagaagcttaatattgtactataattcttccaaattaattattaccaccagatagtagtattgatctggaaaatcatgggagcatttactatcaataattacaggctaatgggaaagagattttttaaaaatatttttctgttttttattttctgtttttaaaaacacctagaagttagatcccgacttaaataaatgatggaattgcttctgtagaaacctattgttttagaaatcttccttttagtactttttcatttatttgtgaagaccaataaaattgtgaaagaatgaatgaattttagtagttaacatcttttgttactaatcttaaacactggtaattaaagagtaaactacaatctaaacaacataaaactttaaaagtggagttattaggcctggcgtggtggctcacacctataatcccagcactttgggagacccaggcaggcaatcacctgaggtcaggagttcgaaaccagccttgagcaacatggtgaaaccccgtctctactaaaaataaaaaaaatagctaggcgtcatgccatctgcctgtaatcccagctactagggagactgaggcaggagaatcccttgaaccccggaggcagaggttgcagtgcgccgagattgcgccattgcactccaacccgggcaacaagagggaaactccgtctcaaaaaaaaaaaaaaaaaaacaagtagagttattatttcaaggtgcaaatagtgcattaattaaccctgaccttgttgatttcttaaaatttttttttttttttttttttttttttttgagacagaggtcttgctctgtcgcccaggctggagtgcagtggcgcgatctcggctcactgcaagctccacctcctgggttcacaacattctcctgcctcagcctcctgagtagctgggactacaggcgcccgccaccacgcctggctaatttttttgtatttttagtagagacggggtttcaccatgttagccaggatgatctcgatatcctgacctcatgatcggctcgcctcggcctcccaaagtgctgggattacaggcatgagccaccgcgcctggcctgaccttgttgatttctatacaaagacatttcagttgcaactattcccttagaacataggcatatagtatagctaccttaagggaatgtaatatgtcaagacctagatttatgaagtaagaataacgagaatcctcacattgcagaagtactcactgcagatttctgtgtgaccacaataatacctgacatgattttctgtgcacactacacttgtatttatattgttcttgacctgtaaaattatggtgcccaggagagaaagttttctcttttcatgcttgccaacatttaaaaaattaaagagttatatatatatgatgctacaaaggatggtgattaacaaaggctttgtgttgctacttagatcatccagcgggaggtattcactatgaaatgtgcatagaatgtccacctactttcagtgacaagagagaacaaatatcagaaaatccaacagaagccacagatattggtaatttgtttaataaataatttttagtaagtagttaacactggcaggaatgagaaaagctcatttgccattgtgaaatgacacttgccaagaataaaacatgattttccaaagttgcttggactagtcatgaaataaatgaaatacttaattctatttcacattgagattaaaaactaaaatagaaaactgcagtataaaaaatcttttgtgttggaaagactaaattatcatggatatttttcttacattgtgataaaattggttttatttccagcataagatttttaaaagaagcaatcattttcagttattccaaataaatttacaattgttttgcatttaccaagttttgtttggcttaaattctaaattcccttgtggaaatttatttgttccagaaaatgagaatgtctgtggacatggtttttagtagtttgaaagtatttctgaacactgactagttattgtggtgttttcactgtaggttttggtaatcgatgtggaaaacccaaaggaccaagagatccaccttcagaatggacatgattcagggagctagaagacactttaagttatactggaaaattcaggtgccactgaaagccagatttatagtattccatctttaatatgtgggactaacagcagtgtagattgttaccttaatattttttgctgggaccatctacctgccttatactacacttaggaaaaagtattacatatggtttattttgaaacttcaagtattattgccttaatgtctcttaaccctgttacacgctgcttgtagacatgttaatatagtaatacctttatgatatattgagtttaaggactactctttttctgttttatcatgtatgcattattttgtatatgtacagggcaagtaggtatataatttgataaagttgcaattgaaatattattaacagaagatgtaagaaatttctgcatggtctaaatctttgtgtactttatttgtaaattatttgccctggagttttagaaaatagtttctgaattttaaacttgctggattcatgcagccagctttgcaggttatcagagatcaaagattgtaataataattttgtaaattgtaagcaaaaagttatttttatattatatacagtctaattgttcatcctaattgttcctgttttcatctagtcagagattcagtaagtgccttggaacaatattgaattctcttagcttgtgtgtgtttctttaatatttgaactcaagtgggattagaagactatcaaaatacatgtatgtttcaggatatttgacctgtcattaaaaaaaacaaacagttttacagtgccta

SEQ ID NO: 12388 - DNA, 264 bp, Homo sapiens
ggagacagtcttgctctgtcgcccagactggagtgcagtggcgtgatctcaactcactgccatctccacctcctgggctcaagcaattctcctgcctcagcctcccaagtatctgggactgcaggtgtgtgccaccacacctggcaaatttttgtattattagtagagatggggttttactgtgttgctcaggctggtctcaaactcctgagctcaattgatccacccaccttggcctcccaaagtgctgggattacaggcgtg

SEQ ID NO: 12389 - DNA, 1220 bp, Homo sapiens
atttttgttataaagataatacacacagagagaagcgcctgcagtgaatctttgtgtaaccatcatgcagatcaggagacaaaccatggcggcccctcagaactctgccacgtgtttcttcccatcttttcctgctgctgctcccagaagtaaccctattccgacttttctgggttttcttggtaatcaatttctggtttttctttatagagttgttgcctaagtatgcacccttcaacacgatactgttgttttgcttgtactttttgttaactgtacatataataaattatgttatatatttctttattgcaggctcctttaatccagtgttatgtttgggagacgcacccatacaactgcatgtcaccgtagcttgttcatttccagtgtcgtgtagtgtcccttcatgtgaatttatcacagtttattagtatcttccactctgatggacatttggtagttggaattttcattactaatgatgcccctgcctgtggtcattcctgcctgcctcttgatgcacacaggcacgcatttctgctgggtatgtcctagttccagactcactggttatacggtatggatgtaattattgttagttttccagtgtgattaaacatcagattagcgcccattagcaatgtctgaggctgcctgttgctccactcgggtgcccgtttggtattaggagcttcttcagccattcttgtgtttgtgttcatgtatctcattgtggttttaattttcatttctataatgactaatgtggttgaatatgtttttgtatgattatttgccatttgtatttgctctttttaaagtatttgtacaggactttcacccattctcttattgtgttgccttatataggaattatttctatgttctagatatggatcctttgctggccatatatgttgaaagtatctccactctttggcttgcctttcattattttaattgtgtcttgctgaacagaaggttttaatgtcaaggtagtttttagtcaatcccctcatttatgattggtgcattttgtcaggtttaagaagtcttttctctcccataagaacgtgaagaaaacatattctcctatgttttatagaccataggttggcaaacttttttctgtaaaggactaaatagtaaacattttaagctttgtggaccacagatagtctctgctacatattcatcttaaaaaaaaaaaaagaata

SEQ ID NO: 12390 - DNA, 409 bp, Homo sapiens
caggactgatggtgaaacctgaaggcatagacatgacccatagctgcctttatgttttacaacttcctgttgattttcattttcctcgtttgtcagtcatctcccttgacttcccacatctatctatgttgcatcctagcctggtgcctggcctggcggaggcattggagcattggaaagaatgaatgaatgagtttagccctctggagagtgtatgctgaaaaactgttacctcgcctttaagagcttaaaagtgaagagaatgaattttgatagaaccattttttaaagtaaggaccatccttctgtgtccccagaaaattaaatagagtcagaaaatggcaaagccaagttagaagcattcaggtgtggaagttgtatagggcacttgagttaaaaaaaaaaaaaa

SEQ ID NO: 12391 - DNA, 409 bp, Homo sapiens; identical to SEQ ID NO: 12390

SEQ ID NO: 12392 - DNA, 599 bp, Homo sapiens
aaataatgacttttggtgctgtgggatttgtgagctcaaggacttgtgctgcaagaacaacaaatagcagcctgcttatttaatagaaagtgccctcagtgagggtctgatctgcttttggcttgaggaatgcttcagaattttaattatttggaggagcttccttgaagttgctttatggttgctttctcttcacatcaaactgaagacataactgtaacaaatgagtattcctacaccaagatgtgacacagcaaatgaatttatggatgatgacattaatgatcatcatcagcatggctagggttctggtttgattagtagctcagactgctttcttaagatgaaatagtcatttaaatgaacatggcatcttctcttgaacaatgcttaggttatttttttttctcatagagattgaagacccattactcagcattatctccctctctcccctgaaacttttgtctgttcggaatgagctactccaggaagatttattgcttttcctcagtgttcttattagcatgctttatatagcttattgtgacacttatgataatacaaaaagtaataaaaatacaattattatcattcgg

SEQ ID NO: 12393 - DNA, 599 bp, Homo sapiens; identical to SEQ ID NO: 12392

SEQ ID NO: 12394 - DNA, 10117 bp, Homo sapiens
gaagccaggagtcctttagaagtctatgattcccatcaccgcggggctggacagctctcttggggaccttccctgtgcacctgtgaccgtgtctgcccctcataacaccctagtcacaatgccctttcagttccccaaaaaagctagactggtcccacttctgggcctctgcctggagtattcacagaccctcagtcgggccccagcttggatgagtgtcagcagaggccctccccactccacctggattaaagcaggtctgcctggcgccctgcaccacacacccttccctccctcagcgtgtctggcccgaccagcacgcagcttccatgatggcagggcctggcctctcctgcacgccatgcaggcctggcccttgccaaccactggaccttagtaaatatttgaggagcaaaagaatgaaacgctaggtgggtgcatgagtggtggcagagtctggttctgaggtttctgagcttaaggccgtgcagcagctggctctgctcccttgagattctggtgcccactcccttgccaggtttcaggcacccgtggatgagcagtcagagagtctacagaacacgcacgacgacagcaggaacaacgcggcctcagccaggtaaagcaagtctctccactggagagtgtgcacgcgatgtggcttctgaggccaacaggacgacaaaggaaactccaggcttttcccctttggcgccagctctggggccctggctgggcctctttgtaaaacaaggggtcagagaggctctcagcccagatgagtaacttataagtgacctcatagataaaacaggtgttcctttgatagacagaaccccattttaccattataaacagccatggctgctgcctgcatccactttcaccactgggagctgcacgtgcttatgctaggggactcgggtcactgaaatgagaaagtgaccgaggactgttccccagagccagcgcatgcgccccagtacctgccagaggaagacggctgtgcattaacacctacgacacagtcacaggctgatctttgtgtattttgctttcaggaaaacatagtcacagggcagaggacagcactgtagaatgagaaccagaagagcctaggggtgtgcagagggttgctgaagtggccagagtcacagcgcggctggtgacagagcagagtctggccccagcctcccctgcacagccgccatttattagctcagatgcttccaaattcaaaatgcagtgtcaccagaaaccgctgacacaggctgatggttcagcaactcacagccatcccctggggatgggctcctactcagaagtagacaaggtccttttggagacagagccttcctggttctcactcactgaggccttccaggaagacgttccattctgagtgctttggcccaagtggattttagtgcagggatatggtgaaatgggggagcgggctgggcttacatgaggctgtccctttaggaataatccaggaagtgtcccggaaaagagagagaagacatcagagcctaaaggaaacagctgggctccgaacggcctctcagaagagcctctactgaaaaatatggatcatcacagatccaaacagaaaaatgggggcgatgtccccacatggagggaacacccgacttagcaaatgggaccggtccccagggtcaggctcttagagcaggcacaagactgggacactggacagaaggttgttcccatgatggttttttttattttttatttttgagatggagtttcgctctgttgcccaggctggagtgtaatggtgcaatctcggctcactgcaacctctgcctcctgggttcaagcgattctcctgcctcagcctcccgagtagctgggattacaggcgcctgacaccacgccccgctaattttttgtatttttagtagagatggggtttcaccatgttggccaggctggtctcaaacgccagacctcaggtgatccacctgcctcagcctcccaaagtgctgagattacaggggtgagtcaccgcgcctggccaatgttgttgttgtttttaagacagaatttcactctttgttgcccaggctggagtgcaatggcgcaatctctggctcaccgcaacctccgcctcccaggttcaagcgattctcctacctcagcccccagagtagctgggattacaggcatgtaccatcacacccggctaattttttgtattttaagtagagagggggtttctccatgttggtcaggctggcctcgaactcccaacctcaggtgatccgcccacctcggcctcccaaaatgctgggattacaggggtaagccactgtgcccggccggttatttctttaaaaggtaatcatttgtcaagagtaaaacccagaagctctgacaggccataatttcagatcctttggcttgggcagttttgattttccccgtgtttgcatggcatgaagtcttcgtccttgtcacagtagcttgggatgactcccagtccacatggaaaacatcagggagtgacaatccagcaagaaatccctcgctagttccacacctacgcaccgagcgtcggtgtgccaggccctgtgctgggcagagtgtggtatgtcagggtgtgccggttttaggtaacaagactccaccactgagtggcacctgccctattgcaaaggaatccagttcctccggaataacagtcccactgttaacctggtgctactgggaagttccacacagtaatctgagcagtgactcatggaaggatgaggaacgtttgctccagcttctctccctttccagcaagggcagagctcctaaagccaggggttagcacctggccagcttatgtggcagatggtctcagttacaacttcgctgctttcccaaactcctgcagccctcctgagtccgacttccgttgatagcaaggcactgggtggcagcaaccttttttctagtagttttttcccagcagttttccatttctccacagtatccttttcatttagaggagcttaataaatgctttttaaaaagtaacccacgtgacgtaaaattttacaagtttttgtggcaaaatgatgcccagatagtcacatttaagcaaatattcagcttgattcagtgattaacagcaaatgggtctacgtgctaacatggcagcacattcaacacataacacatcactcacattgacgtccactgtccctgcacctgctacttcaggggcactgaggctcctgttccaaggccttacaaacctatgtggtggcctgcagggcaaaaggaattatcattacaactggttagaggtaggaattcagaaagaaattgaggaggccaaacacacgtcgtttgaggctaaaggcttaagacgcttcttacccaagagtgacctcagagtttcacatcccagacaatcacactgtggttgagtgaaatcaagtgcagttttatttaagaactggaaagaataatcagtatctgtgaaagaaaatccaatttagaatatttaaataaacatttatgtaaaaagaagagtagaataattactccgttcagttcctctccttgcaatgggataggctgcctctgctgcagatggctgggtcttccaaacccatgacaagtgccacggcctctgcagcagtggcccagagagtaggcacttcccagcatgacagagaggccgaggccttctaaccttgccaaaccactacaaaagcaaactagggtgggcaagcccaactacctaaggcaggaagaaagtgcagtgaagggacagtggtgtgctgtgcgtatcgtgggggtactcctaagcagctagctgttggcgagatcttacaaagcctgatcggctaacgcagcttcctggtttaggaacattttccccggtcgtatcaatcccccaggttggtaaatgaacagaagggatgaataaagcctactttttaggctcaaggagcagctcgtgaaggggtggcaggtgcgctgctgccttgttttctgtcctgctaagaggctcaccccgcgacctcttctgtaaactgccactcagcagcggcctgcaagccctcacgaaaggcttcactctatgctgtttccaggtagctttgttctgacagtacctattttccacttcagaatctccactttaaaacctgcaatggaaaaataaatctcttgacagttttttaaatcgagaaaattggtgatgtggccttggcagcaaatacccagaaagcctttacctcattaacctgattctccacgggccctgccactgctaaatttataaagctaaaaataatctcaagatcatggaactaaaaagaagtcaatcacttaccaaatcctgtccttaaggagttcatcttggctgggcgtggtggctcacgcctgtaatcccagcactttgggaggccgaggcgcgtggatcacttgaggtcaggagttcgagaccagcctggccatcatggtgaaaccccgtctctactaaaaatacaaaaaaattagctgggcatggtggcccaagcctgtaatcccagctactcaggaggctgaggcaggagaatcgcttgaacccgggaggcagaggttgcggtgagccgaaatggtgccactgcactccagcctccagcctgggccacagagcaagactgtcttaagaaaataaaaaaaatggagttcatcttttatccctaagtaattgctgacttctgctctgggattataaacagggtgggaatgttctcccaccatccctacccctggaattcctctccaaagcagagtacgtcaagttttccctggtgtcagacagcatttcaccatgaaaccctaagacctgcctcctgggctccttccagctggtgggcctggtgtgaaggtgggcttcctgggcctctggcagatggaggatggcattaaatgccaacacagtcagcttaccatccacaaggccagcagctgccaacagctgccctagacctatcaacaagacaacttcatggctcccaatgggaatggaggctgggcccgccctacttagagcaggggaaagaacttttccctcaaagagccggggcaggatgccagaatctaactacatcctctcccggtttgcagttctaggaagtggaatttgctgccctaggcgtggtctaaaggacaagtttagaaatgattcaactcaagttcctaaacagagtaagtgccagttgatgtcccaccgtggatcctttactccagaaaaattgtaatgatggctcggccaccgccttggctagagtcccactgcacgcgtgtcgtgagggccgatgggcaagtccgtccggttttttttgttgttgttgttgttttttgagatggagtctcgccctgttgcccagactgaagtgcaaaggcccgatctcaactcactgcaacctccgcctcctgggttcaaaggattctcctgtctcagcctcctgagtagctgggattacaggcacccgccagcacgcccagctatttttttgtatttttagtagagacggggttttatcatgttggccaggctggtctcgaacgcctgacctcatgatccacccgccttggcctcccaaattgctgggattacaggcgtgagccaccgcgcccggccgtctgtctggttttcaaaccaatcaatgaacccgtaagcctctttggtatatataacaatgaaaaaattcattaagccatgaaatctagaaataagtcatatttctgagttgataaaatgcttttctgaacatacattttaggtatctggcacaattaaccaaatgtctgcccatttttgtgtagctttcatacagtacagatttcattgatgtcgctcccacatctgagtattaaaaacatttgacattgttcttctcagtcctcacaacacccctgtgaggtaggtggtattgaccccattccacagatggggaggtctaggcacggaaaggtttagtggctcctcacaggccgcgtggtggggcagcagagtggtgctctggccccgcgccgacgccgccttcacattcacacttcttcagtgccaccgcaacactgcatggcaggatctcacgctgaggccaagttcctgtctagtccagaatgaagccagcgtctcacctcttaaagcttcgatgtgtgactcaaagccaacttactctcccaaacttgcaaaacaaacatactgactgaatcttagttgggactatttgcagtatttaagattatttttgagagtcaatctgcttggatttgtagttgtatatgctcaaatccctttggaaaacagtttgaaatgacatgagggacaatgtaattttgagaacagaacacagaaaacaagagttctgagactggcattgaaattgagaatataagctatggtaaaatgagaatcaaatcccaaataaacggagagcagcacttctcaatgtttaaggccacgcacagggcaggcattcagtaagcacttcttggatcaaaagaaactgatgctcctttgagccgcctatcactgacaacaggagctgagacccccgggaaagccagccagggccatgatccccttggcctggggccacggtcacacaaagccactcagccaaatcgtgtagagttatctaggcttacttgctgcaggataaaagttgaactagaacaccaagcattgagctaggaatacccctttgaatgtgtactgctacttataaaaaataggtatgtagctatgattaaatagatgaagggccaaagcatcctatgaggaagtatttttaaaattgtatagatgttcatgcagtgggggacagaaataaagaggttaaagcggtctgtgtttttcggttaaatgaaaggttgtaaatgcatttttaccgctgataagaaggggtacctgctacccctttctgctgtggagtgttgctgaggacagagtccatctctcccagcgagtcctggttatcctttacttacactctggcctcgggggcagtggcgtgtggcctcggtcctccccaggtaactctggagggcgctgtggaatattgctgtgatttgccccttactcgtctttcacccatgttccgccttgattcggcataaggacagactgctccagtggggccttgggtcctcaggccttctgaccgcttggtcttgagtgacattccagaagagtgactaatgacataaaacgattaagaaaatccatgtggcagcggccaaccggaaacagttttgtcccaggctgcacagggtcggaggccccaaggtcaccggggccactgcccgtcacaggtccaccttgaccccctttatgaaaggcaggcccgtgggcaccctcttcttatactccaggtactcctctccaaaaaagtgaattagtgagatttcttcttcttctgttcgatcgcggaagaatcgccacactgtcagggcatagctgacgccgcagatggggttacacagcatcacctaacagagggagacaccaggctcatcagggtgaccgtgggatgacgccctgtgctttggtaggcgtctgtctctaatacccagaggatttctgtgcccatgccctgctgagaccgtcagggtctctgggagcagtactgtcaccttagccctgagcactcagtgctgcaggcctttctcacgtgctttcctgttgctcctcttacatgagagagatctgtaaatcacaagatcaacctcttggatttcaaccctcagcttggggtgacagcaatgccccccacctccaggtgtgagctccccaacatgaggtcccatgcacgctgccttcctgcccaggaccctcccaccacaaatgcattcgcttacaccacagctgcctgggcctctgcctcctaaacccacagcctctgcttcagcacgagatacagtgccacaaaactcagcttccgaaatgccccttccagcagattacctccacgctcagagagctccagagactgaaccccaccccctgagtctgggtttccaaccccagaagagcagcacttcgcccacttccccagtctcctgccctccccacgctgtgcccactttgcctcttttttttcccccgagacagattgtcactctgtcacgtggagtgcagtggcgtgatcatggctcactgcagccttaactgcttgggctcaagtgattctcccacctcagcctcccaagtagctgggactaagggcacatgccaccacacccagctaatttttgtattttttgtagagatggggtttcacaatgttgcccaagctggtctcgaactcctggccctttcttccacctttaagaacatcctggccaggtacggtggctcatgtctgttaattgcagtactttgggaggccaaggagggcagatcacctgaggtcaggagcttgagacaagcttggccaacatggcgaatccccgtctctaccaaaaatagaaaaattagctgggcgtagtggtgggagcctgtaatcccagctacttgggaggctgaggcaggagaattgcttgaacccaggaggcagaggttgcagtgagctgagatcgccactgcataccagcctgggcgacagagcgaaactccctctcaaaaaaaacaaagaacatccttcccactgatctccagccaaacagtccttcaaggccaaaagcattccccagctcctcagggaaccactcacctacacctgcccactggtcccctgtggatgtgcatcttccccaacatacattttctgtatgttttctgaatatatattttaggctccaatacagccacccggagagccaggctcatgtcctgacctctcacaccttctcttattgagcacttactatgttcccagcgccatgctaagccctttacaatcattaccctgttcaactctcatggcaaacctttgagggcacgctactatccccactttgttttttttaaaattttattattttttaaagacagggtctcactatattgcccaggctggacttgaactcttggcctcaagccatcctcctgcctcagcttccagagtagggggaactacaggcatgtgccactatgtctagctgcccccactttaacatgagaggagaaggaggccaagcagtgaatgtcagaatcaggactggcccagtcagtgactccggggcctgtaccctcacatctggcatagcttgctggggataccctacagtgggagttctctatagcaggctgcagcctgttactaagccatgaaatcatttagtacattatgaacagtattgaaataataagatagaaaacaggattttgtaaacagtaagtgtaagtattatatcaggaaagacatgttcctttcatacacacacaagtgctggagcacaatgtaaaaaaaatctatgggcaaaaaggtatggaaaaccctttggttctagtgcacacacatatacaggaagcaagcatttatggcaaattacattattcagtcataactaatttgttcccagggaaggtgattgttaatgtggcggttttacatgtttcagaaacaaaaattgtaaatgctatgtgatcatttgccccacctataccgttaggggtcaccagagtcaccaaggaccatgcattgctgatgggatgcctgagagatctctggatttgcccaaagacttggagacttttcccaaacacttcgtgaattttccaagatctattcacattctttggccaagtttttctaggaccaagagtaaagaatcaagaaacagtttcaagaaataaggcggccaggcgcgatggctcacgcctgtaatcccagcactttgggagactgaggcaagtggatcatgaggtcaggagattgagatcatcctggctaacacagtgaaaccccgtctctactaaaaatacaaaaaatttagccaggcatggtggcgggcgcctgtagtcccagctactcaggaggctgaggcaggagaatggcgtgaacccaggaggcggagcttgcagtgagccgagattgcgccactgcactccagcctgggcgacagagcgagactctgtctcaaaaagaaaaaa

SEQ ID NO: 12395 - DNA, 7507 bp, Homo sapiens
gaagccaggagtcctttagaagtctatgattcccatcaccgcggggctggacagctctcttggggaccttccctgtgcacctgtgaccgtgtctgcccctcataacaccctagtcacaatgccctttcagttccccaaaaaagctagactggtcccacttctgggcctctgcctggagtattcacagaccctcagtcgggccccagcttggatgagtgtcagcagaggccctccccactccacctggattaaagcaggtctgcctggcgccctgcaccacacacccttccctccctcagcgtgtctggcccgaccagcacgcagcttccatgatggcagggcctggcctctcctgcacgccatgcaggcctggcccttgccaaccactggaccttagtaaatatttgaggagcaaaagaatgaaacgctaggtgggtgcatgagtggtggcagagtctggttctgaggtttctgagcttaaggccgtgcagcagctggctctgctcccttgagattctggtgcccactcccttgccaggtttcaggcacccgtggatgagcagtcagagagtctacagaacacgcacgacgacagcaggaacagcgcggcctcagccaggtaaagcaagtctctccactggagagtgtgcacgcgatgtggcttctgaggccaacaggacgacaaaggaaactccaggcttttcccctttggcgccagctctggggccctggctgggcctctttgtaaaacaaggggtcagagaggctctcagcccagatgagtaacttataagtgacctcatagataaaacaggtgttcctttgatagacagaaccccattttaccattataaacagccatggctgctgcctgcatccactttcaccactgggagctgcacgtgcttatgctaggggactcgggtcactgaaatgagaaagtgaccgaggactgttccccagagccagcgcatgcgccccagtacctgccagaggaagacggctgtgcattaacacctacgacacagtcacaggctgatctttgtgtattttgctttcaggaaaacatagtcacagggcagaggacagcactgtagaatgagaaccagaagagcctaggggtgtgcagagggttgctgaagtggccagagtcacagcgcggctggtgacagagcagagtctggccccagcctcccctgcacagccgccatttattagctcagatgcttccaaattcaaaatgcagtgtcaccagaaaccgctgacacaggctgatggttcagcaactcacagccatcccctggggatgggctcctactcagaagtagacaaggtccttttggagacagagccttcctggttctcactcactgaggccttccaggaagacgttccattctgagtgctttggcccaagtggattttagtgcagggatatggtgaaatgggggagcgggctgggcttacatgaggctgtccctttaggaataatccaggaagtgtcccggaaaagagagagaagacatcagagcctaaaggaaacagctgggctccgaacgccctctcagaagagcctctactgaaaaatatggatcatcacagatccaaacagaaaaatgggggcgatgtccccacatggagggaacacccgacttagcaaatgggaccggtccccagggtcaggctcttagagcaggcacaagactgggacactggacagaaggttgttcccatgatggttttttttattttttatttttgagatggagtttcgctctgttgcccaggctggagtgtaatggtgcaatctcggctcactgcaacctctgcctcctgggttcaagcgattctcctgcctcagcctcccgagtagctgggattacaggcgcctgacaccacgccccgctaattttttgtatttttagtagagatggggtttcaccatgttggccaggctggtctcaaacgccagacctcaggtgatccacctgcctcagcctcccaaagtgctgagattacaggggtgagtcaccgcgcctggccaatgttgttgttgtttttaagacagaatttcactctttgttgcccaggctggagtgcaatggcgcaatctctggctcaccgcaacctccgcctcccaggttcaagcgattctcctacctcagcccccagagtagctgggattacaggcatgtaccatcacacccggctaattttttgtattttaagtagagagggggtttctccatgttggtcaggctggcctcgaactcccaacctcaggtgatccgcccacctcggcctcccaaaatgctgggattacaggggtaagccactgtgcccggccggttatttctttaaaaggtaatcatttgtcaagagtaaaacccagaagctctgacaggccataatttcagatcctttggcttgggcagttttgattttccccgtgtttgcatggcatgaagtcttcgtccttgtcacagtagcttgggatgactcccagtccacatggaaaacatcagggagtgacaatccagcaagaaatccctcgctagttccacacctacgcaccgagcgtcggtgtgccaggccctgtgctgggcagagtgtggtatgtcagggtgtgccggttttaggtaacaagactccaccactgagtggcacctgccctattgcaaaggaatccagttcctccggaataacagtcccactgttaacctggtgctactgggaagttccacacagtaatctgagcagtgactcatggaaggatgaggaacgtttgctccagcttctctccctttccagcaagggcagagctcctaaagccaggggttagcacctggccagcttatgtggcagatggtctcagttacaacttcgctgctttcccaaactcctgcagccctcctgagtccgacttccgttgatagcaaggcactgggtggcagcaaccttttttctagtagttttttcccagcagttttccatttctccacagtatccttttcatttagaggagcttaataaatgctttttaaaaagtaacccacgtgacgtaaaattttacaagtttttgtggcaaaatgatgcccagatagtcacatttaagcaaatattcagcttgattcagtgattaacagcaaatgggtctacgtgctaacatggcagcacattcaacacataacacatcactcacattgacgtccactgtccctgcacctgctacttcaggggcactgaggctcctgttccaaggccttacaaacctatgtggtggcctgcagggcaaaaggaattatcattacaactggttagaggtaggaattcagaaagaaattgaggaggccaaacacacgtcgtttgaggctaaaggcttaagacgcttcttacccaagagtgacctcagagtttcacatcccagacaatcacactgtggttgagtgaaatcaagtgcagttttatttaagaactggaaagaataatcagtatctgtgaaagaaaatccaatttagaatatttaaataaacatttatgtaaaaagaagagtagaataattactccgttcagttcctctccttgcaatgggataggctgcctctgctgcagatggctgggtcttccaaacccatgacaagtgccacggcctctgcagcagtggcccagagagtaggcacttcccagcatgacagagaggccgaggccttctaaccttgccaaaccactacaaaagcaaactagggtgggcaagcccaactacctaaggcaggaagaaagtgcagtgaagggacagtggtgtgctgtgcgtatcgtgggggtactcctaagcagctagctgttggcgagatcttacaaagcctgatcggctaacgcagcttcctggtttaggaacattttccccggtcgtatcaatcccccaggttggtaaatgaacagaagggatgaataaagcctactttttaggctcaaggagcagctcgtgaaggggtggcaggtgcgctgctgccttgttttctgtcctgctaagaggctcaccccgcgacctcttctgtaaactgccactcagcagcggcctgcaagccctcacgaaaggcttcactctatgctgtttccaggtagctttgttctgacagtacctattttccacttcagaatctccactttaaaacctgcaatggaaaaataaatctcttgacagttttttaaatcgagaaaattggtgatgtggccttggcagcaaatacccagaaagcctttacctcattaacctgattctccacgggccctgccactgctaaatttataaagctaaaaataatctcaagatcatggaactaaaaagaagtcaatcacttaccaaatcctgtccttaaggagttcatcttggctgggcgtggtggctcacgcctgtaatcccagcactttgggaggccgaggcgcgtggatcacttgaggtcaggagttcgagaccagcctggccatcatggtgaaaccccgtctctactaaaaatacaaaaaaattagctgggcatggtggcccaagcctgtaatcccagctactcaggaggctgaggcaggagaatcgcttgaacccgggaggcagaggttgcggtgagccgaaatggtgccactgcactccagcctccagcctgggccacagagcaagactgtcttaagaaaataaaaaaaatggagttcatcttttatccctaagtaattgctgacttctgctctgggattataaacagggtgggaatgttctcccaccatccctacccctggaattcctctccaaagcagagtacgtcaagttttccctggtgtcagacagcatttcaccatgaaaccctaagacctgcctcctgggctccttccagctggtgggcctggtgtgaaggtgggcttcctgggcctctggcagatggaggatggcattaaatgccaacacagtcagcttaccatccacaaggccagcagctgccaacagctgccctagacctatcaacaagacaacttcatggctcccaatgggaatggaggctgggcccgccctacttagagcaggggaaagaacttttccctcaaagagccggggcaggatgccagaatctaactacatcctctcccggtttgcaggtctaggaagtggaatttgctgccctaggcgtggtctaaaggacaagtttagaaatgattcaactcaagttcctaaacagagtaagtgccagttgatgtcccaccgtggatcctttactccagaaaaattgtaatgatggctcggccaccgccttggctagagtcccactgcacgcgtgtcgtgagggccgatgggcaagtccgtccggttttttttgtagttgttggtgatttttgagatggagtctcgccctgttgcccagactgaagtgcaaaggcccgatctcaactcactgcaacctccggctcctgggttcaaaggattctactgtctcagcctcctgagtagctgggattacaggcacccgccagcacgcccagctatttttttgtatttttagtagagacggggttttatcatgttggccaggctggtctcgaacgcctgacctcatgatccacccgccttggcctcccaaattgctgggattacaggcgtgagccaccgcgcccggccgtctgtctggttttcaaaccaatcaatgaacccgtaagcctctttggtatatataacaatgaaaaaattcattaagccatgaatctagaaataagtcatatttctgagttgataaaatgcttttctgaacatacattttaggtatctggcacaattaaccaaatgtctgcccatttttgtgtagctttcatacagtacagatttcattgatgtcgctcccacatctgagtattaaaaacatttgacattgttcttctcagtcctcacaacacccctgtgaggtaggtggtattgaccccattccacagatggggaggtctaggcacggaaaggtttagtggctcctcacaggccgcgtggtggggcagcagagtggtgctctggccccgcgccgacgccgccttcacattcacacttcttcagtgccaccgcaacactgcatggcaggatctcacgctgaggccaagttcctgtctagtccagaatgaagccagcgtctcacctcttaaagcttcgatgtgtgactcaaagccaacttactctcccaaacttgcaaaacaaacatactgactgaatcttagttgggactatttgcagtatttaagattatttttgagagtcaatctgcttggatttgtagttgtatatgctcaaatccctttggaaaacagtttgaaatgacatgagggacaatgtaattttgagaacagaacacagaaaacaagagttctgagactggcattgaaattgagaatataagctatggtaaaatgagaatcaaatcccaaataaacggagagcagcacttctcaatgtttaaggccacgcacagggcaggcattcagtaagcacttcttggatcaaaagaaactgatgctcctttgagccgcctatcactgacaacaggagctgagacccccgggaaagccagccagggccatgatccccttggcctggggccacggtcacacaaagccactcagccaaatcgtgtagagttatctaggcttacttgctgcaggataaaagttgaactagaacaccaagcattgagctaggaatacccctttgaatgtgtactgctacttataaaaaataggtatgtagctatgattaaatacatgaagggccaaagcatcctatgaggaagtatttttaaaattgtatagatgttcatgcagtgggggacagaaataaagaggttaaagcggtctgtgtttttcggtaaactgaaaggttgtaaatgcatttttaccgctgataagaaggggtacctgctaaccctttctgctggtggagtgttgctgaggacagagtccatctctcccagcgagtcctggttatcctttacttacactctggcctcgggggcagtggcgtgtggcctcggtcctccccaggtaactctggagggcgctgtggaatattgctgtgatttgccccttactcgtctttcacccatgttccgccttgattcggcataaggacagactgctccagtggggccttgggtcctcaggccttctgaccgcttggtcttgagtgacattccagaagagtgactaatgacataaaacgattaagaaaatccatgtggcagcggccaaccggaaacagttttgtcccaggctgcacagggtcggaggccccaaggtcaccggggccactgcccgtcacaggtccaccttgaccccctttatgaaaggcaggcccgtgggcaccctcttcttatactccaggtactcctctccaaaaaagtgaattagtgagatttctctatcttctgttcgatcgcggaagaatcgccacactgtcaggggatagctgacgccgcagatggggttacacagc

SEQ ID NO: 12396 - DNA, 150 bp, Homo sapiens
tggtttctttttcttttttttttttgagatggagtctcgctctgtcgcccaggctggagtacggtggcgcgatctcggctcactgcaagctccgcctcccgggttcacgccattctcctgcctcagcctcccaagtagctgggactacag

SEQ ID NO: 12397 - DNA, 428 bp, Homo sapiens
ggctcaatcaatcctcccacctcagcctcctgggtagctgtgactacaggcatgtgccaccatgcccggctaatttttatagttttggtagagatggggttgtgctatgttgccaaagatggtctccaactcctgggctaagtgatcctcccacctcagccttccaaaatgctgggattatagacgtgaccgtgcctagccatgttagtcttcagtacaccttctctttgctgacagccccgcgctcccatgctcctgccagcctctccagccgttccttcctggtctctggctggctctgcctcctcagctcagtgcccagatatgtttttccccagggctcagccttaggcattctccacagcctacgctcactccttgggcgacctcattcagtccctggctttaagaccccatcatgacgcaga

SEQ ID NO: 12398 - DNA, 428 bp, Homo sapiens; identical to SEQ ID NO: 12397

SEQ ID NO: 12399 - DNA, 1765 bp, Homo sapiens
gggattcggcggcggcggcggcgcgggcgcgcgcttcctagtgacgcaggcggcggggccgcgcacgcacggggctgggagggccggacacttatttggcgctcgcggaggaggaaggcggggccgtgaaataaggcccgacgggccccggggcgcgtgcgcggaccgacactgtcagctcctaacgccgcaggttcctcctggtccccgaggcccccggtcgggcgttgcctgccccgcgcgggcggccgggccgagggacgatggtcagtggacggacggcgccagggagcagtgcccacgcgcggcagggcggtaccttcaggcctccaggtacgggcgctcctcgcccggacgctgctgtgtgtgaatgggcgcgaggggactcccctgcggggcggacgcctgaacacgaggctgtggaggaggacgctgtagggtgcgcggactcacgcggaacatgccagaggctcagccagccacggcgctcccagcgtggagggcgaggggcatccgggagcggccgggagggctcggtcacccctcaagctgtcaccccagtcccacaaccagcaccccgatcctatcgcagtcccacagccgacaccccgatcccacccctgcccaacagccggcacccaccccaatcccatagctaacaccccggtcccaccgctgtcccacggccggcaccccgatcccaccccagtcccgcagctggcaccccgatcccaccccagcccaacagctggcacccaccccgatcccaccgctgtcccacagccggcaccccgatcccaccccagtcccgcagccggcaccccgatcccacagccggcactcaccccgatcgcatagcatagctgataccccgatcccaccccagtcccatagccagcaccccgatcccaccccagtcccatagccagcacctcgatcccatagatgacaccccgatcccgccccagtcctatagcccgcaccccgatcccacccgagtcccgcagccggcaccccatcccacccatgtcccacagtcggcaccccgatcccactcggatccggcagccagcttggatcctgtggccctcctccagcccccagggctcatttatatgttttattggcagaggctggggctggctctgttggcctctgtgctgggtttcttcctctgcaccgcaggactggctctcctgacctctccaggtgtcatcgaacacccttgtgcttgctgtcacccgctgcctgtctgcaggatcccggattccgtatcaggggaccgaaattagtcggaaaataggaagcaggtgctcgcttggatggaaccctgaccctgtgctcacacttgtaggaggagggctctgcaggccgcctcccggaacgggaggttcccaagccactgcacttcggaggggctgtaattagagttgcacattcattcagttcccagtaaagtagaacgtgctccagccagtgaggaaaaggtgtttttaaaaattagattggccgagtgcggtggctcatgccttttacctcaacactttgggagacaaaggtgggaggatcacctgtggccaggagttcaagaccagcctgggcaacagagcctgtctctggggaagaataaaaaaaaaaattgagcctttgtcagtgctactattttattatctggtaaatatgagagggttcacgcggtctatgtgtgtcatttatctgagtttgcctatcgtcacgttttggaaataaatgtcaataaagtcga

SEQ ID NO: 12400 - DNA, 5135 bp, Homo sapiens
  SITE (5110): n equals a,t,g, or c
gagaccatcctggctaacactgtgaaaccccctctctactaaaaatacaaaaaattagcctggcgtggtggcaggcgcctgtagtcccagctactcgggaggctgaggcaggagaatggcgtgaacccaggaagcggagcttgcagtgagccgagatggcgccactgcactccagcctaggcaacagagcaagactccgtctcaaaaaataaataaataaaactgcaaatgtattctctaactgttctgtaggtcggaagtccagcccagcctcactccgccaaaatcagggtgtctgcagggccgattgcttttggagctccaggggagaagctgttctggcctttccagtttctggaagcacttgagccccttgtctcgtggcctatcccacacctgaaagccagccaaagccagttgagtcctcaccctgttggccccgacactgatctcctgcctccctcatctgctgtcaaggccccttgtgatgacatggggccaccagctggcccagggcacctcctgtcagagtccgccgaccagtgaccttcattccatctgtcgctgtaattcccctttgcttggaaccaacgttcacagatcccaggggttaggatgtgaatatcttgggcagggctgtgggggggctattcttccttctaaaatatttatcatttttgttttggggatttttttggtttggttttttttgagacagagtctcgctctgtcgcccaggttggagtgcaatggtgcaatctcagctcactgcaacctctgcctccgggcagacgtgagccactgcaccaggcctgtttttgtttttgtttgttttgttttgtttttgagatggagtctcggccgggcgcggtggctcacgcctgtaatcccagcactttgggaggccgaggcgggcggatcacgaggtcaggagatcgagaccatcctggctaacacggtgaaaccccgtctctactaaaaatacaaaaaattagccgggcgtggtagcgggcgcctgtagtcccagctactcgggaggctgaggcaggagaatggcgtgaacccgggaggcggagcttgcagtgagccgagatcgcgccactgcactccagcctgggcgacagagcgagactccgtctcaaaaaaaaaaaaaaaaaaaaaaaagagatggagtctcactttgtcacccaggctggagtgtagtggcgggattataggtacgcgccatcatgcccagttactttttgtatttttagtagagacagggttttaccatgttggtcagactggtctcaaactcctgatctcaggtaatccacccgcctcagcctcccaaagtgctgggattacagacgtgagccaccgtgtctggccatatttattaactacaaagggaaagatgataatttttttttttgagatggagtctcactctgtcacccaggctggagtacaatagcgtgatcttggctcactgaaacctctgcctcccaggttcaagcgattctcctgcctcagcctcccaactagctgggattacaggcgcacgctaccaagcccagctaatttttgtatttttagtagaaacggagtttcaccatgttggtgaggctggtctcgaactcctgaccttgtgatctgcccacctcggcctcccaaagtgctgggattataggcatgagccactgcaaccggctgaaagatggtaattttaaagtagagaaactgggttggctgggcatggtggcttatgcctgtaagctcagcactttggaagtccaaggcaagaggatcgcttgagtccaggagtttgagaccagcctggacaatatagcaagaccccatctccgcaaaagctaaaaagttagccaggtgtggcggcacatgcctgtagtcccagctactcaggaggctgacgtgggaggatcacttgagaccaggaggtcaaggctgaagtgagctgttattgtgccactgcactcagcctgggcaacagagcgagagtctgtctccaaaggtaaaaaaaggtccaggcacagtggctcacacctgtaatctcagcactttgggaggccgaggcgggcagattcgttgaggtcaggagttcaaaacgagcctggctaaatggtgaaaccccgtctctactaaaaatacaaaaaaattagccaggcatggtgacgggcgcctgtaatctcagctacttgggagactgaggcaggagaatcatgtaaacccaggaggctgaggttgcagcgagccaagatcatgccactgcacttcagcctgggcgacagagcaagactgtctcaaaacaaaacaaaagaatcttgagtcctgagttcctctaagggaaattccaggcacctcgccacccttgacaggcaaaggaacaatctgatgaggaagaagatagaaacagcttaaacaatagtctcccggccgggggcagtggctcacgcctgtaatctgagcactttgggaggccgaggcgggtggatcacaaggtcaagagatcaagaccatcctggctaacatggtgaaaccccgtctctactaaaaatacaaaaaattagccgggcgtggtggtgggtgcctgtagtcccagctactcgggaggctgaggcaggagaatggcgtgaacccaggaggcggagctttcagtgagctgatatcgcgcctctgcactccagcctgggcgacagagcctcgagactccatctcaaaaaaaaaaaaaaattagctgggtgtggtggctcacacctgtaatcccagctacgtggcaggctgaggcaggagaatcgcttgaacctgggaggcggaggttgtagggagctgagatcgcaccactgcactccagcctgggcaacagagcgagactctgtctcaaagaaaaaaaaaaaaaacaaaaaaacaatagtctcccaagtaagtcagagtcacaaggtgttttgattccctgtggaaactaaaatataacagcttaacatatgttcttgagttatttttcagaaacttggacatccaccaggtggaaaatgctgagctaggaacagtggctataatttcagccttttgagaggccaaggtggaaggatcacttgaggccaggagttagagaccagcctggccaacatggtgaaaccccgtctctagtaaaaatacaaatattagctgggcatggtggtgcaacctgaaatcccagctacttgggagacctagctgggaggatcgcttgaacctggtaggaggagtttgcagtgagctgaaattgtgccactgcactctagcctgggcaacagagtgagactctgtctcaaaaaataaataaataaaaagagaaaaaagtgttgcctgcaggccgggcacagtggctcacgcctgtaatcccaacactttgggaggccgagatgggcagatcacctgaggtcaggagtgcaagaacagcctggccaacatggtgaaaccccatctctactaaaaatacaaaagttagctgggtgtgtacatgtagtctcagctacttgggaagctgaggcaggagaatctcttcaaccggggaggtggaggttgcgatgagctgagatcacgccaccacactccatccagcctgggtgacagagtgagactccatctcaaagcaaaaaaagaaacataggtgggacccttggtgtgtccttagggcatgatggttgaggtatactgctggtcctgtcatgtaaaagaaaacgagccgactctgtgtctactggagaaagcactgcatatatcagccacagtcaatacctcgcttctgcagggacggtggctgccagagtgggaggctttggtagcacccatgtcgtggaatcacaatgttgtcgatagctctggggtcttgtacaaaatgccagatcctcccatttggtttccttatgggaaggatcgcagtactataatacatgggcttgtgcaagggatcattatacccttttctctttttttgcttttctttgagacagagtttcactctcgtcacccaggctggagtgcaatggcgcgatcttggctcactgcaacctccacctcctgggttcaagtgattttcctggctcagccttctgagtagctgggattacacatgcccgccaccaggcctgacttatttttgtatttttagtagagacagggtttcaccaagttggtcaggctggtcttgaactcctgacctcaggtgatccacccacctcggcctcccaaagtgttgggatttcaggcataagccaccaggcccagcctttctttctttttaaaattaatctttgtttaaaaatactctcattttttatttaattgtagcactcctagatcccgaaagcagatacactcttgttatgggtctgattcttttcattgcttcacgccttagaggatattgtccaatactggataaaagtttactcaggtctacttccactttaacggggatggctgaatatctcttccacttggctgttcgtttataatgaactgacaaacatacaaattttcttgagttctgtgagacattctagtaaatcatctaacctgaagagcaggttgtgagaacccctgatttagaaagcccagtggtcataaatataagtggctctggactggctcccggggtctgaagtgtgggcagtcggttaggattgagcccttgtaatttgtaggatctgacacaccctccaggaaggcagtgtcagaatttacctgtattatattggacacccagttagcggttggagaattggttgctggtatagaaaaataccaaatattttatgtcaggggagtgaaagaaaaaacaaaaacccggccgggcgcggtggctcacgcctgtcatcccagcactttgggaggccgagacgggcggatcacgaggtcaggagatcgagaccatcctggctaacacggtgaaaccccatctctactaaaaatacaaaaattagccgggcgtggtggcgcgcgcctgtagtcccagctactcgggaggctgaggcaggagaatggcgtgaacccgggaggcggagcttgcagtgagcccagatcgcgccaccgcactccagcctgggcgacagagcgagataangtctcaaaaaaaaaaaaaaaaaaaa

SEQ ID NO: 12401 - DNA, 1012 bp, Homo sapiens; identical to SEQ ID NO: 7978
  SITE (39): n equals a,t,g, or c
  SITE (40): n equals a,t,g, or c
  SITE (41): n equals a,t,g, or c
  SITE (42): n equals a,t,g, or c
  SITE (43): n equals a,t,g, or c
  SITE (44): n equals a,t,g, or c
  SITE (45): n equals a,t,g, or c
  SITE (46): n equals a,t,g, or c
  SITE (47): n equals a,t,g, or c
  SITE (48): n equals a,t,g, or c
  SITE (49): n equals a,t,g, or c
  SITE (50): n equals a,t,g, or c
  SITE (51): n equals a,t,g, or c
  SITE (52): n equals a,t,g, or c
  SITE (53): n equals a,t,g, or c
  SITE (54): n equals a,t,g, or c
  SITE (55): n equals a,t,g, or c
  SITE (56): n equals a,t,g, or c
  SITE (57): n equals a,t,g, or c
  SITE (58): n equals a,t,g, or c
  SITE (59): n equals a,t,g, or c
  SITE (60): n equals a,t,g, or c
  SITE (61): n equals a,t,g, or c
  SITE (62): n equals a,t,g, or c
  SITE (63): n equals a,t,g, or c
  SITE (64): n equals a,t,g, or c
  SITE (65): n equals a,t,g, or c
  SITE (66): n equals a,t,g, or c
  SITE (67): n equals a,t,g, or c
  SITE (68): n equals a,t,g, or c
  SITE (69): n equals a,t,g, or c
  SITE (70): n equals a,t,g, or c
  SITE (71): n equals a,t,g, or c
  SITE (72): n equals a,t,g, or c
  SITE (73): n equals a,t,g, or c
  SITE (74): n equals a,t,g, or c
  SITE (75): n equals a,t,g, or c
  SITE (76): n equals a,t,g, or c
  SITE (77): n equals a,t,g, or c
  SITE (78): n equals a,t,g, or c
  SITE (79): n equals a,t,g, or c
  SITE (80): n equals a,t,g, or c
  SITE (81): n equals a,t,g, or c
  SITE (82): n equals a,t,g, or c
  SITE (83): n equals a,t,g, or c
  SITE (84): n equals a,t,g, or c
  SITE (85): n equals a,t,g, or c
  SITE (86): n equals a,t,g, or c
  SITE (87): n equals a,t,g, or c
  SITE (88): n equals a,t,g, or c
  SITE (89): n equals a,t,g, or c
  SITE (90): n equals a,t,g, or c
  SITE (91): n equals a,t,g, or c
  SITE (92): n equals a,t,g, or c
  SITE (93): n equals a,t,g, or c
  SITE (94): n equals a,t,g, or c
  SITE (95): n equals a,t,g, or c
  SITE (96): n equals a,t,g, or c
  SITE (97): n equals a,t,g, or c
  SITE (98): n equals a,t,g, or c
  SITE (99): n equals a,t,g, or c
  SITE (100): n equals a,t,g, or c
  SITE (101): n equals a,t,g, or c
  SITE (102): n equals a,t,g, or c
  SITE (103): n equals a,t,g, or c
  SITE (104): n equals a,t,g, or c
  SITE (105): n equals a,t,g, or c
  SITE (106): n equals a,t,g, or c
  SITE (107): n equals a,t,g, or c
  SITE (108): n equals a,t,g, or c
  SITE (109): n equals a,t,g, or c
  SITE (110): n equals a,t,g, or c
  SITE (111): n equals a,t,g, or c
  SITE (112): n equals a,t,g, or c
  SITE (113): n equals a,t,g, or c
  SITE (114): n equals a,t,g, or c
  SITE (115): n equals a,t,g, or c
  SITE (116): n equals a,t,g, or c
  SITE (117): n equals a,t,g, or c
  SITE (118): n equals a,t,g, or c
  SITE (119): n equals a,t,g, or c
  SITE (120): n equals a,t,g, or c
  SITE (121): n equals a,t,g, or c
  SITE (122): n equals a,t,g, or c
  SITE (123): n equals a,t,g, or c
  SITE (124): n equals a,t,g, or c
  SITE (125): n equals a,t,g, or c
  SITE (126): n equals a,t,g, or c
  SITE (127): n equals a,t,g, or c
  SITE (128): n equals a,t,g, or c
  SITE (129): n equals a,t,g, or c
  SITE (130): n equals a,t,g, or c
  SITE (131): n equals a,t,g, or c
  SITE (132): n equals a,t,g, or c
  SITE (133): n equals a,t,g, or c
  SITE (134): n equals a,t,g, or c
  SITE (135): n equals a,t,g, or c
  SITE (136): n equals a,t,g, or c
  SITE (137): n equals a,t,g, or c
  SITE (138): n equals a,t,g, or c
  SITE (139): n equals a,t,g, or c
  SITE (140): n equals a,t,g, or c
  SITE (141): n equals a,t,g, or c
  SITE (142): n equals a,t,g, or c
  SITE (143): n equals a,t,g, or c
  SITE (144): n equals a,t,g, or c
  SITE (145): n equals a,t,g, or c
  SITE (146): n equals a,t,g, or c
  SITE (147): n equals a,t,g, or c
  SITE (148): n equals a,t,g, or c
  SITE (149): n equals a,t,g, or c
  SITE (150): n equals a,t,g, or c
  SITE (151): n equals a,t,g, or c
  SITE (152): n equals a,t,g, or c
  SITE (153): n equals a,t,g, or c
  SITE (154): n equals a,t,g, or c
  SITE (155): n equals a,t,g, or c
  SITE (156): n equals a,t,g, or c
  SITE (157): n equals a,t,g, or c
  SITE (158): n equals a,t,g, or c
  SITE (159): n equals a,t,g, or c
  SITE (160): n equals a,t,g, or c
  SITE (161): n equals a,t,g, or c
  SITE (162): n equals a,t,g, or c
  SITE (163): n equals a,t,g, or c
  SITE (164): n equals a,t,g, or c
  SITE (165): n equals a,t,g, or c
  SITE (166): n equals a,t,g, or c
  SITE (167): n equals a,t,g, or c
  SITE (168): n equals a,t,g, or c
  SITE (169): n equals a,t,g, or c
  SITE (170): n equals a,t,g, or c
  SITE (171): n equals a,t,g, or c
  SITE (172): n equals a,t,g, or c
  SITE (173): n equals a,t,g, or c
  SITE (174): n equals a,t,g, or c
  SITE (175): n equals a,t,g, or c
  SITE (176): n equals a,t,g, or c
  SITE (177): n equals a,t,g, or c
  SITE (178): n equals a,t,g, or c
  SITE (179): n equals a,t,g, or c
  SITE (180): n equals a,t,g, or c
  SITE (181): n equals a,t,g, or c
  SITE (182): n equals a,t,g, or c
  SITE (183): n equals a,t,g, or c
  SITE (184): n equals a,t,g, or c
  SITE (185): n equals a,t,g, or c
  SITE (186): n equals a,t,g, or c
  SITE (187): n equals a,t,g, or c
  SITE (188): n equals a,t,g, or c
  SITE (189): n equals a,t,g, or c
  SITE (190): n equals a,t,g, or c
  SITE (191): n equals a,t,g, or c
  SITE (192): n equals a,t,g, or c
  SITE (193): n equals a,t,g, or c
  SITE (194): n equals a,t,g, or c
  SITE (195): n equals a,t,g, or c
  SITE (196): n equals a,t,g, or c
  SITE (197): n equals a,t,g, or c
  SITE (198): n equals a,t,g, or c
  SITE (199): n equals a,t,g, or c
  SITE (200): n equals a,t,g, or c
  SITE (201): n equals a,t,g, or c
  SITE (202): n equals a,t,g, or c
  SITE (203): n equals a,t,g, or c
  SITE (204): n equals a,t,g, or c
  SITE (205): n equals a,t,g, or c
  SITE (206): n equals a,t,g, or c
  SITE (207): n equals a,t,g, or c
  SITE (208): n equals a,t,g, or c
  SITE (209): n equals a,t,g, or c
  SITE (210): n equals a,t,g, or c
  SITE (211): n equals a,t,g, or c
  SITE (212): n equals a,t,g, or c
  SITE (213): n equals a,t,g, or c
  SITE (214): n equals a,t,g, or c
  SITE (215): n equals a,t,g, or c
  SITE (216): n equals a,t,g, or c
  SITE (217): n equals a,t,g, or c
  SITE (218): n equals a,t,g, or c
  SITE (219): n equals a,t,g, or c
  SITE (220): n equals a,t,g, or c
  SITE (221): n equals a,t,g, or c
  SITE (222): n equals a,t,g, or c
  SITE (223): n equals a,t,g, or c
  SITE (224): n equals a,t,g, or c
  SITE (225): n equals a,t,g, or c
  SITE (226): n equals a,t,g, or c
  SITE (227): n equals a,t,g, or c
  SITE (228): n equals a,t,g, or c
  SITE (229): n equals a,t,g, or c
  SITE (230): n equals a,t,g, or c
  SITE (231): n equals a,t,g, or c
  SITE (232): n equals a,t,g, or c
  SITE (233): n equals a,t,g, or c
  SITE (234): n equals a,t,g, or c
  SITE (235): n equals a,t,g, or c
  SITE (236): n equals a,t,g, or c
  SITE (237): n equals a,t,g, or c
  SITE (238): n equals a,t,g, or c
  SITE (239): n equals a,t,g, or c
  SITE (240): n equals a,t,g, or c
  SITE (241): n equals a,t,g, or c
  SITE (242): n equals a,t,g, or c
  SITE (243): n equals a,t,g, or c
  SITE (244): n equals a,t,g, or c
  SITE (245): n equals a,t,g, or c
  SITE (246): n equals a,t,g, or c
  SITE (247): n equals a,t,g, or c
  SITE (248): n equals a,t,g, or c
  SITE (249): n equals a,t,g, or c
  SITE (250): n equals a,t,g, or c
  SITE (251): n equals a,t,g, or c
  SITE (252): n equals a,t,g, or c
  SITE (253): n equals a,t,g, or c
  SITE (254): n equals a,t,g, or c
  SITE (255): n equals a,t,g, or c
  SITE (256): n equals a,t,g, or c
  SITE (257): n equals a,t,g, or c
  SITE (258): n equals a,t,g, or c
  SITE (259): n equals a,t,g, or c
  SITE (260): n equals a,t,g, or c
  SITE (261): n equals a,t,g, or c
  SITE (262): n equals a,t,g, or c
  SITE (263): n equals a,t,g, or c
  SITE (264): n equals a,t,g, or c
  SITE (265): n equals a,t,g, or c
  SITE (266): n equals a,t,g, or c
  SITE (267): n equals a,t,g, or c
  SITE (268): n equals a,t,g, or c
  SITE (269): n equals a,t,g, or c
  SITE (270): n equals a,t,g, or c
  SITE (271): n equals a,t,g, or c
  SITE (272): n equals a,t,g, or c
  SITE (273): n equals a,t,g, or c
  SITE (274): n equals a,t,g, or c
  SITE (275): n equals a,t,g, or c
  SITE (276): n equals a,t,g, or c
  SITE (277): n equals a,t,g, or c
  SITE (278): n equals a,t,g, or c
  SITE (279): n equals a,t,g, or c
  SITE (280): n equals a,t,g, or c
  SITE (281): n equals a,t,g, or c
  SITE (282): n equals a,t,g, or c
  SITE (283): n equals a,t,g, or c
  SITE (284): n equals a,t,g, or c
  SITE (285): n equals a,t,g, or c
  SITE (286): n equals a,t,g, or c
  SITE (287): n equals a,t,g, or c
  SITE (288): n equals a,t,g, or c
  SITE (289): n equals a,t,g, or c
  SITE (290): n equals a,t,g, or c
  SITE (291): n equals a,t,g, or c
  SITE (292): n equals a,t,g, or c
  SITE (293): n equals a,t,g, or c
  SITE (294): n equals a,t,g, or c
  SITE (295): n equals a,t,g, or c
  SITE (296): n equals a,t,g, or c
  SITE (297): n equals a,t,g, or c
  SITE (298): n equals a,t,g, or c
  SITE (299): n equals a,t,g, or c
  SITE (300): n equals a,t,g, or c
  SITE (301): n equals a,t,g, or c
  SITE (302): n equals a,t,g, or c
  SITE (303): n equals a,t,g, or c
  SITE (304): n equals a,t,g, or c
  SITE (305): n equals a,t,g, or c
  SITE (306): n equals a,t,g, or c
  SITE (307): n equals a,t,g, or c
  SITE (308): n equals a,t,g, or c
  SITE (309): n equals a,t,g, or c
  SITE (310): n equals a,t,g, or c
  SITE (311): n equals a,t,g, or c
  SITE (312): n equals a,t,g, or c
  SITE (313): n equals a,t,g, or c
  SITE (314): n equals a,t,g, or c
  SITE (315): n equals a,t,g, or c
  SITE (316): n equals a,t,g, or c
  SITE (317): n equals a,t,g, or c
  SITE (318): n equals a,t,g, or c
  SITE (319): n equals a,t,g, or c
  SITE (320): n equals a,t,g, or c
  SITE (321): n equals a,t,g, or c
  SITE (322): n equals a,t,g, or c
  SITE (323): n equals a,t,g, or c
  SITE (324): n equals a,t,g, or c
  SITE (325): n equals a,t,g, or c
  SITE (326): n equals a,t,g, or c
  SITE (327): n equals a,t,g, or c
  SITE (328): n equals a,t,g, or c
  SITE (329): n equals a,t,g, or c
  SITE (330): n equals a,t,g, or c
  SITE (331): n equals a,t,g, or c
  SITE (332): n equals a,t,g, or c
  SITE (333): n equals a,t,g, or c
  SITE (334): n equals a,t,g, or c
  SITE (335): n equals a,t,g, or c
  SITE (336): n equals a,t,g, or c
  SITE (337): n equals a,t,g, or c
  SITE (338): n equals a,t,g, or c
  SITE (339): n equals a,t,g, or c
  SITE (340): n equals a,t,g, or c
  SITE (341): n equals a,t,g, or c
  SITE (342): n equals a,t,g, or c
  SITE (343): n equals a,t,g, or c
  SITE (344): n equals a,t,g, or c
  SITE (345): n equals a,t,g, or c
  SITE (346): n equals a,t,g, or c
  SITE (347): n equals a,t,g, or c
  SITE (348): n equals a,t,g, or c
  SITE (349): n equals a,t,g, or c
  SITE (350): n equals a,t,g, or c
  SITE (351): n equals a,t,g, or c
  SITE (352): n equals a,t,g, or c
  SITE (353): n equals a,t,g, or c
  SITE (354): n equals a,t,g, or c
  SITE (355): n equals a,t,g, or c
  SITE (356): n equals a,t,g, or c
  SITE (357): n equals a,t,g, or c
  SITE (358): n equals a,t,g, or c
  SITE (359): n equals a,t,g, or c
  SITE (360): n equals a,t,g, or c
  SITE (361): n equals a,t,g, or c
  SITE (362): n equals a,t,g, or c
  SITE (363): n equals a,t,g, or c
  SITE (364): n equals a,t,g, or c
  SITE (365): n equals a,t,g, or c
  SITE (366): n equals a,t,g, or c
  SITE (367): n equals a,t,g, or c
  SITE (368): n equals a,t,g, or c
  SITE (369): n equals a,t,g, or c
  SITE (370): n equals a,t,g, or c
  SITE (371): n equals a,t,g, or c
  SITE (372): n equals a,t,g, or c
  SITE (373): n equals a,t,g, or c
  SITE (374): n equals a,t,g, or c
  SITE (375): n equals a,t,g, or c
  SITE (376): n equals a,t,g, or c
  SITE (377): n equals a,t,g, or c
  SITE (378): n equals a,t,g, or c
  SITE (379): n equals a,t,g, or c
  SITE (380): n equals a,t,g, or c
  SITE (381): n equals a,t,g, or c
  SITE (382): n equals a,t,g, or c
  SITE (383): n equals a,t,g, or c
  SITE (384): n equals a,t,g, or c
  SITE (385): n equals a,t,g, or c
  SITE (386): n equals a,t,g, or c
  SITE (387): n equals a,t,g, or c
  SITE (388): n equals a,t,g, or c
  SITE (389): n equals a,t,g, or c
  SITE (390): n equals a,t,g, or c
  SITE (391): n equals a,t,g, or c
  SITE (392): n equals a,t,g, or c
  SITE (393): n equals a,t,g, or c
  SITE (394): n equals a,t,g, or c
  SITE (395): n equals a,t,g, or c
  SITE (396): n equals a,t,g, or c
  SITE (397): n equals a,t,g, or c
  SITE (398): n equals a,t,g, or c
  SITE (399): n equals a,t,g, or c
  SITE (400): n equals a,t,g, or c
  SITE (401): n equals a,t,g, or c
  SITE (402): n equals a,t,g, or c
  SITE (403): n equals a,t,g, or c
  SITE (404): n equals a,t,g, or c
  SITE (405): n equals a,t,g, or c
  SITE (406): n equals a,t,g, or c
  SITE (407): n equals a,t,g, or c
  SITE (408): n equals a,t,g, or c
  SITE (409): n equals a,t,g, or c
  SITE (410): n equals a,t,g, or c
  SITE (411): n equals a,t,g, or c
  SITE (412): n equals a,t,g, or c
  SITE (413): n equals a,t,g, or c
  SITE (414): n equals a,t,g, or c
  SITE (415): n equals a,t,g, or c
  SITE (416): n equals a,t,g, or c
  SITE (417): n equals a,t,g, or c
  SITE (418): n equals a,t,g, or c
  SITE (419): n equals a,t,g, or c
  SITE (420): n equals a,t,g, or c
  SITE (421): n equals a,t,g, or c
  SITE (422): n equals a,t,g, or c
  SITE (423): n equals a,t,g, or c
  SITE (424): n equals a,t,g, or c
  SITE (425): n equals a,t,g, or c
  SITE (426): n equals a,t,g, or c
  SITE (427): n equals a,t,g, or c
  SITE (428): n equals a,t,g, or c
  SITE (429): n equals a,t,g, or c
  SITE (430): n equals a,t,g, or c
  SITE (431): n equals a,t,g, or c
  SITE (432): n equals a,t,g, or c
  SITE (433): n equals a,t,g, or c
  SITE (434): n equals a,t,g, or c
  SITE (435): n equals a,t,g, or c
  SITE (436): n equals a,t,g, or c
  SITE (437): n equals a,t,g, or c
  SITE (438): n equals a,t,g, or c
  SITE (439): n equals a,t,g, or c
  SITE (440): n equals a,t,g, or c
  SITE (441): n equals a,t,g, or c
  SITE (442): n equals a,t,g, or c
  SITE (443): n equals a,t,g, or c
  SITE (444): n equals a,t,g, or c
  SITE (445): n equals a,t,g, or c
  SITE (446): n equals a,t,g, or c
  SITE (447): n equals a,t,g, or c
  SITE (448): n equals a,t,g, or c
  SITE (449): n equals a,t,g, or c
  SITE (450): n equals a,t,g, or c
  SITE (451): n equals a,t,g, or c
  SITE (452): n equals a,t,g, or c
  SITE (453): n equals a,t,g, or c
  SITE (454): n equals a,t,g, or c
  SITE (455): n equals a,t,g, or c
  SITE (456): n equals a,t,g, or c
  SITE (457): n equals a,t,g, or c
  SITE (458): n equals a,t,g, or c
  SITE (459): n equals a,t,g, or c
  SITE (460): n equals a,t,g, or c
  SITE (461): n equals a,t,g, or c
  SITE (462): n equals a,t,g, or c
  SITE (463): n equals a,t,g, or c
  SITE (464): n equals a,t,g, or c
  SITE (465): n equals a,t,g, or c
  SITE (466): n equals a,t,g, or c
  SITE (467): n equals a,t,g, or c
  SITE (468): n equals a,t,g, or c
  SITE (469): n equals a,t,g, or c
  SITE (470): n equals a,t,g, or c
  SITE (471): n equals a,t,g, or c
  SITE (472): n equals a,t,g, or c
  SITE (473): n equals a,t,g, or c
  SITE (474): n equals a,t,g, or c
  SITE (475): n equals a,t,g, or c
  SITE (476): n equals a,t,g, or c
  SITE (477): n equals a,t,g, or c
  SITE (478): n equals a,t,g, or c
  SITE (479): n equals a,t,g, or c
  SITE (480): n equals a,t,g, or c
  SITE (481): n equals a,t,g, or c
  SITE (482): n equals a,t,g, or c
  SITE (483): n equals a,t,g, or c
  SITE (484): n equals a,t,g, or c
  SITE (485): n equals a,t,g, or c
  SITE (486): n equals a,t,g, or c
  SITE (487): n equals a,t,g, or c
  SITE (488): n equals a,t,g, or c
  SITE (489): n equals a,t,g, or c
  SITE (490): n equals a,t,g, or c
  SITE (491): n equals a,t,g, or c
  SITE (492): n equals a,t,g, or c
  SITE (493): n equals a,t,g, or c
  SITE (494): n equals a,t,g, or c
  SITE (495): n equals a,t,g, or c
  SITE (496): n equals a,t,g, or c
  SITE (497): n equals a,t,g, or c
  SITE (498): n equals a,t,g, or c
  SITE (499): n equals a,t,g, or c
  SITE (500): n equals a,t,g, or c
  SITE (501): n equals a,t,g, or c
  SITE (502): n equals a,t,g, or c
  SITE (503): n equals a,t,g, or c
  SITE (504): n equals a,t,g, or c
  SITE (505): n equals a,t,g, or c
  SITE (506): n equals a,t,g, or c
  SITE (507): n equals a,t,g, or c
  SITE (508): n equals a,t,g, or c
  SITE (509): n equals a,t,g, or c
  SITE (510): n equals a,t,g, or c
  SITE (511): n equals a,t,g, or c
  SITE (512): n equals a,t,g, or c
  SITE (513): n equals a,t,g, or c
  SITE (514): n equals a,t,g, or c
  SITE (515): n equals a,t,g, or c
  SITE (516): n equals a,t,g, or c
  SITE (517): n equals a,t,g, or c
  SITE (518): n equals a,t,g, or c
  SITE (519): n equals a,t,g, or c
  SITE (520): n equals a,t,g, or c
  SITE (521): n equals a,t,g, or c
  SITE (522): n equals a,t,g, or c
  SITE (523): n equals a,t,g, or c
  SITE (524): n equals a,t,g, or c
  SITE (525): n equals a,t,g, or c
  SITE (526): n equals a,t,g, or c
  SITE (527): n equals a,t,g, or c
  SITE (528): n equals a,t,g, or c
  SITE (529): n equals a,t,g, or c
  SITE (530): n equals a,t,g, or c
  SITE (531): n equals a,t,g, or c
  SITE (532): n equals a,t,g, or c
  SITE (533): n equals a,t,g, or c
  SITE (534): n equals a,t,g, or c
  SITE (535): n equals a,t,g, or c
  SITE (536): n equals a,t,g, or c
  SITE (537): n equals a,t,g, or c
  SITE (538): n equals a,t,g, or c
  SITE (539): n equals a,t,g, or c
  SITE (540): n equals a,t,g, or c
  SITE (541): n equals a,t,g, or c
  SITE (542): n equals a,t,g, or c
  SITE (543): n equals a,t,g, or c
  SITE (544): n equals a,t,g, or c
  SITE (545): n equals a,t,g, or c
  SITE (546): n equals a,t,g, or c
  SITE (547): n equals a,t,g, or c
  SITE (548): n equals a,t,g, or c
  SITE (549): n equals a,t,g, or c
  SITE (550): n equals a,t,g, or c
  SITE (551): n equals a,t,g, or c
  SITE (552): n equals a,t,g, or c
  SITE (553): n equals a,t,g, or c
  SITE (554): n equals a,t,g, or c
  SITE (555): n equals a,t,g, or c
  SITE (556): n equals a,t,g, or c
  SITE (557): n equals a,t,g, or c
  SITE (558): n equals a,t,g, or c
  SITE (559): n equals a,t,g, or c
  SITE (560): n equals a,t,g, or c
  SITE (561): n equals a,t,g, or c
  SITE (562): n equals a,t,g, or c
  SITE (563): n equals a,t,g, or c
  SITE (564): n equals a,t,g, or c
  SITE (565): n equals a,t,g, or c
  SITE (566): n equals a,t,g, or c
  SITE (567): n equals a,t,g, or c
  SITE (568): n equals a,t,g, or c
  SITE (569): n equals a,t,g, or c
  SITE (570): n equals a,t,g, or c
  SITE (571): n equals a,t,g, or c
  SITE (572): n equals a,t,g, or c
  SITE (573): n equals a,t,g, or c
  SITE (574): n equals a,t,g, or c
  SITE (575): n equals a,t,g, or c
  SITE (576): n equals a,t,g, or c
  SITE (577): n equals a,t,g, or c
  SITE (578): n equals a,t,g, or c
  SITE (579): n equals a,t,g, or c
  SITE (580): n equals a,t,g, or c
  SITE (581): n equals a,t,g, or c
  SITE (582): n equals a,t,g, or c
  SITE (583): n equals a,t,g, or c
  SITE (584): n equals a,t,g, or c
  SITE (585): n equals a,t,g, or c
  SITE (586): n equals a,t,g, or c
  SITE (587): n equals a,t,g, or c
  SITE (588): n equals a,t,g, or c
  SITE (589): n equals a,t,g, or c
  SITE (590): n equals a,t,g, or c
  SITE (591): n equals a,t,g, or c
  SITE (592): n equals a,t,g, or c
  SITE (593): n equals a,t,g, or c
  SITE (594): n equals a,t,g, or c
  SITE (595): n equals a,t,g, or c
  SITE (596): n equals a,t,g, or c
  SITE (597): n equals a,t,g, or c
  SITE (598): n equals a,t,g, or c
  SITE (599): n equals a,t,g, or c
  SITE (600): n equals a,t,g, or c
  SITE (601): n equals a,t,g, or c
  SITE (602): n equals a,t,g, or c
  SITE (603): n equals a,t,g, or c
  SITE (604): n equals a,t,g, or c
  SITE (605): n equals a,t,g, or c
  SITE (606): n equals a,t,g, or c
  SITE (607): n equals a,t,g, or c
  SITE (608): n equals a,t,g, or c
  SITE (609): n equals a,t,g, or c
  SITE (610): n equals a,t,g, or c
  SITE (611): n equals a,t,g, or c
  SITE (612): n equals a,t,g, or c
  SITE (613): n equals a,t,g, or c
  SITE (614): n equals a,t,g, or c
  SITE (615): n equals a,t,g, or c
  SITE (616): n equals a,t,g, or c
  SITE (617): n equals a,t,g, or c
  SITE (618): n equals a,t,g, or c
  SITE (619): n equals a,t,g, or c
  SITE (620): n equals a,t,g, or c
  SITE (621): n equals a,t,g, or c
  SITE (622): n equals a,t,g, or c
  SITE (623): n equals a,t,g, or c
  SITE (624): n equals a,t,g, or c
  SITE (625): n equals a,t,g, or c
  SITE (626): n equals a,t,g, or c
  SITE (627): n equals a,t,g, or c
  SITE (628): n equals a,t,g, or c
  SITE (629): n equals a,t,g, or c
  SITE (630): n equals a,t,g, or c
  SITE (631): n equals a,t,g, or c
  SITE (632): n equals a,t,g, or c
  SITE (633): n equals a,t,g, or c
  SITE (634): n equals a,t,g, or c
  SITE (635): n equals a,t,g, or c
  SITE (636): n equals a,t,g, or c
  SITE (637): n equals a,t,g, or c
  SITE (638): n equals a,t,g, or c
  SITE (639): n equals a,t,g, or c
  SITE (640): n equals a,t,g, or c
  SITE (641): n equals a,t,g, or c
  SITE (642): n equals a,t,g, or c
  SITE (643): n equals a,t,g, or c
  SITE (644): n equals a,t,g, or c
  SITE (645): n equals a,t,g, or c
  SITE (646): n equals a,t,g, or c
  SITE (647): n equals a,t,g, or c
  SITE (648): n equals a,t,g, or c
  SITE (649): n equals a,t,g, or c
  SITE (650): n equals a,t,g, or c
  SITE (651): n equals a,t,g, or c
  SITE (652): n equals a,t,g, or c
  SITE (653): n equals a,t,g, or c
  SITE (654): n equals a,t,g, or c
  SITE (655): n equals a,t,g, or c
  SITE (656): n equals a,t,g, or c
  SITE (657): n equals a,t,g, or c
  SITE (658): n equals a,t,g, or c
  SITE (659): n equals a,t,g, or c
  SITE (660): n equals a,t,g, or c
  SITE (661): n equals a,t,g, or c
  SITE (662): n equals a,t,g, or c
  SITE (663): n equals a,t,g, or c
  SITE (664): n equals a,t,g, or c
  SITE (665): n equals a,t,g, or c
  SITE (666): n equals a,t,g, or c
  SITE (667): n equals a,t,g, or c
  SITE (668): n equals a,t,g, or c
  SITE (669): n equals a,t,g, or c
  SITE (670): n equals a,t,g, or c
  SITE (671): n equals a,t,g, or c
  SITE (672): n equals a,t,g, or c
  SITE (673): n equals a,t,g, or c
  SITE (674): n equals a,t,g, or c
  SITE (675): n equals a,t,g, or c
  SITE (676): n equals a,t,g, or c
  SITE (677): n equals a,t,g, or c
  SITE (678): n equals a,t,g, or c
  SITE (679): n equals a,t,g, or c
  SITE (680): n equals a,t,g, or c
  SITE (681): n equals a,t,g, or c
  SITE (682): n equals a,t,g, or c
  SITE (683): n equals a,t,g, or c
  SITE (684): n equals a,t,g, or c
  SITE (685): n equals a,t,g, or c
  SITE (686): n equals a,t,g, or c
  SITE (687): n equals a,t,g, or c
  SITE (688): n equals a,t,g, or c
  SITE (689): n equals a,t,g, or c
  SITE (690): n equals a,t,g, or c
  SITE (691): n equals a,t,g, or c
  SITE (692): n equals a,t,g, or c
  SITE (693): n equals a,t,g, or c
  SITE (694): n equals a,t,g, or c
  SITE (695): n equals a,t,g, or c
  SITE (696): n equals a,t,g, or c
  SITE (697): n equals a,t,g, or c
  SITE (698): n equals a,t,g, or c
  SITE (699): n equals a,t,g, or c
  SITE (700): n equals a,t,g, or c
  SITE (701): n equals a,t,g, or c
  SITE (702): n equals a,t,g, or c
  SITE (703): n equals a,t,g, or c
  SITE (704): n equals a,t,g, or c
  SITE (705): n equals a,t,g, or c
  SITE (706): n equals a,t,g, or c
  SITE (707): n equals a,t,g, or c
  SITE (708): n equals a,t,g, or c
  SITE (709): n equals a,t,g, or c
  SITE (710): n equals a,t,g, or c
  SITE (711): n equals a,t,g, or c
  SITE (712): n equals a,t,g, or c
  SITE (713): n equals a,t,g, or c
  SITE (714): n equals a,t,g, or c
  SITE (715): n equals a,t,g, or c
  SITE (716): n equals a,t,g, or c
  SITE (717): n equals a,t,g, or c
  SITE (718): n equals a,t,g, or c
  SITE (719): n equals a,t,g, or c
  SITE (720): n equals a,t,g, or c
  SITE (721): n equals a,t,g, or c
  SITE (722): n equals a,t,g, or c
  SITE (723): n equals a,t,g, or c
  SITE (724): n equals a,t,g, or c
  SITE (725): n equals a,t,g, or c
  SITE (726): n equals a,t,g, or c
  SITE (727): n equals a,t,g, or c
  SITE (728): n equals a,t,g, or c
  SITE (729): n equals a,t,g, or c
  SITE (730): n equals a,t,g, or c
  SITE (731): n equals a,t,g, or c
  SITE (732): n equals a,t,g, or c
  SITE (733): n equals a,t,g, or c
  SITE (734): n equals a,t,g, or c
  SITE (735): n equals a,t,g, or c
  SITE (736): n equals a,t,g, or c
  SITE (737): n equals a,t,g, or c
  SITE (738): n equals a,t,g, or c
  SITE (739): n equals a,t,g, or c
  SITE (740): n equals a,t,g, or c
  SITE (741): n equals a,t,g, or c
  SITE (742): n equals a,t,g, or c
  SITE (743): n equals a,t,g, or c
  SITE (744): n equals a,t,g, or c
  SITE (745): n equals a,t,g, or c
  SITE (746): n equals a,t,g, or c
  SITE (747): n equals a,t,g, or c
  SITE (748): n equals a,t,g, or c
  SITE (749): n equals a,t,g, or c
  SITE (750): n equals a,t,g, or c
  SITE (751): n equals a,t,g, or c
  SITE (752): n equals a,t,g, or c
  SITE (753): n equals a,t,g, or c
  SITE (754): n equals a,t,g, or c
  SITE (755): n equals a,t,g, or c
  SITE (756): n equals a,t,g, or c
  SITE (757): n equals a,t,g, or c
  SITE (758): n equals a,t,g, or c
  SITE (759): n equals a,t,g, or c
  SITE (760): n equals a,t,g, or c
  SITE (761): n equals a,t,g, or c
  SITE (762): n equals a,t,g, or c
  SITE (763): n equals a,t,g, or c
  SITE (764): n equals a,t,g, or c
  SITE (765): n equals a,t,g, or c
  SITE (766): n equals a,t,g, or c
  SITE (767): n equals a,t,g, or c
  SITE (768): n equals a,t,g, or c
  SITE (769): n equals a,t,g, or c
  SITE (770): n equals a,t,g, or c
  SITE (771): n equals a,t,g, or c
  SITE (772): n equals a,t,g, or c
  SITE (773): n equals a,t,g, or c
  SITE (774): n equals a,t,g, or c
  SITE (775): n equals a,t,g, or c
  SITE (776): n equals a,t,g, or c
  SITE (777): n equals a,t,g, or c
  SITE (778): n equals a,t,g, or c
  SITE (779): n equals a,t,g, or c
  SITE (780): n equals a,t,g, or c
  SITE (781): n equals a,t,g, or c
  SITE (782): n equals a,t,g, or c
  SITE (783): n equals a,t,g, or c
  SITE (784): n equals a,t,g, or c
  SITE (785): n equals a,t,g, or c
  SITE (786): n equals a,t,g, or c
  SITE (787): n equals a,t,g, or c
  SITE (788): n equals a,t,g, or c
  SITE (789): n equals a,t,g, or c
  SITE (790): n equals a,t,g, or c
  SITE (791): n equals a,t,g, or c
  SITE (792): n equals a,t,g, or c
  SITE (793): n equals a,t,g, or c
  SITE (794): n equals a,t,g, or c
  SITE (795): n equals a,t,g, or c
  SITE (796): n equals a,t,g, or c
  SITE (797): n equals a,t,g, or c
  SITE (798): n equals a,t,g, or c
  SITE (799): n equals a,t,g, or c
  SITE (800): n equals a,t,g, or c
  SITE (801): n equals a,t,g, or c
  SITE (802): n equals a,t,g, or c
  SITE (803): n equals a,t,g, or c
  SITE (804): n equals a,t,g, or c
  SITE (805): n equals a,t,g, or c
  SITE (806): n equals a,t,g, or c
  SITE (807): n equals a,t,g, or c
  SITE (808): n equals a,t,g, or c
  SITE (809): n equals a,t,g, or c
  SITE (810): n equals a,t,g, or c
  SITE (811): n equals a,t,g, or c
  SITE (812): n equals a,t,g, or c
  SITE (813): n equals a,t,g, or c
  SITE (814): n equals a,t,g, or c
  SITE (815): n equals a,t,g, or c
  SITE (816): n equals a,t,g, or c
  SITE (817): n equals a,t,g, or c
  SITE (818): n equals a,t,g, or c
  SITE (819): n equals a,t,g, or c
  SITE (820): n equals a,t,g, or c
  SITE (821): n equals a,t,g, or c
  SITE (822): n equals a,t,g, or c
  SITE (823): n equals a,t,g, or c
  SITE (824): n equals a,t,g, or c
  SITE (825): n equals a,t,g, or c
  SITE (826): n equals a,t,g, or c
  SITE (827): n equals a,t,g, or c
  SITE (828): n equals a,t,g, or c
  SITE (829): n equals a,t,g, or c
  SITE (830): n equals a,t,g, or c
  SITE (831): n equals a,t,g, or c
  SITE (832): n equals a,t,g, or c
  SITE (833): n equals a,t,g, or c
  SITE (834): n equals a,t,g, or c
  SITE (835): n equals a,t,g, or c
  SITE (836): n equals a,t,g, or c
  SITE (837): n equals a,t,g, or c
  SITE (838): n equals a,t,g, or c

SEQ ID NO: 12402 - DNA, 973 bp, Homo sapiens
  SITE (972): n equals a,t,g, or c
agtgaattaatgtaggaacagaaaacgaaataccgcatgttctcttataagtgagagctaaacattgggtactcacggacataaagatggcaacaatagacactggggactattagagggggaatggagggagggggcaagggctgaaaaactacctattgggtactatgctcactacctattgggtactgtgctcactacctattgggtactgtgctcactacctattgggtactttggtgacagcatcatacaatataccaatgtaacaagcctgaacatgtatcccttaaatctaaaataaaagttgaaattactttttaacaaaagaaaattccacatatttatattgaaaccaagccaagctgtggtcttctgcaatgttataatcaccctgtaaagtcaatatacaaaatatattgtattaattttaacatttctaggctattcaggttaaattttgtgttccaaatctatctttcgtaatataagattcatattattctgatcacttctggctaaaccttaaaaagaattcccctatcaatacaaagaatattagttgggaaataatatatatataataaataataataataatatataacataatttaaaaaaattttaatggcaaacagttgtatctaataaagattctgaatcctggtcgggtgctgtggctcacacctgtaatcccagcactttgggaggccaaggcgggcagatcacttgagctcgggagttagcgaccaagcctgaccaacaggagaaacccagtctctactgaaaatacaaaattagtcaggcgtggtagcacatgcctataatcccagctactcaggaggctgaggcaggagaatggcttgaacccgggaggcagaggttgcagtgagccaagattgcatcattgcactccagcctgggcaacaagagcgaaactccatctcaaaaaaaaaaaaaaaaaaaaaaagnt

SEQ ID NO: 12403 - DNA, 970 bp, Homo sapiens
agtgaattaatgtaggaacagaaaacgaaataccgcatgttctcttataagtgagagctaaacattgggtactcacggacataaagatggcaacaatagacactggggactattagagggggaatggagggagggggcaagggctgaaaaactacctattgggtactatgctcactacctattgggtactgtgctcactacctattgggtactgtgctcactacctattgggtactttggtgacagcatcatacaatataccaatgtaacaagcctgaacatgtatcccttaaatctaaaataaaagttgaaattactttttaacaaaagaaaattccacatatttatattgaaaccaagccaagctgtggtcttctgcaatgttataatcaccctgtaaagtcaatatacaaaatatattgtattaattttaacatttctaggctattcaggttaaattttgtgttccaaatctatctttcgtaatataagattcatattattctgatcacttctggctaaaccttaaaaagaattcccctatcaatacaaagaatattagttgggaaataatatatatataataaataataataataatatataacataatttaaaaaaattttaatggcaaacagttgtatctaataaagattctgaatcctggtcgggtgctgtggctcacacctgtaatcccagcactttgggaggccaaggcgggcagatcacttgagctcgggagttagcgaccaagcctgaccaacaggagaaacccagtctctactgaaaatacaaaattagtcaggcgtggtagcacatgcctataatcccagctactcaggaggctgaggcaggagaatggcttgaacccgggaggcagaggttgcagtgagccaagattgcatcattgcactccagcctgggcaacaagagcgaaactccatctcaaaaaaaaaaaaaaaaaaaaaaa

SEQ ID NO: 12404 - DNA, 275 bp, Homo sapiens; identical to SEQ ID NO: 7981

SEQ ID NO: 12405 - DNA, 361 bp, Homo sapiens; identical to SEQ ID NO: 7982

SEQ ID NO: 12406 - DNA, 368 bp, Homo sapiens
atcttccctacttgcacgtccgtttataggctctctgcaagaagaaaaatatggctgtattttgcccgaccctgcaggcagtcagaccttatggttgtcttcccttgttccctgaaaatcgctgattttctgttctttttcaaggtgcactgatttcgtattgttcaaacacacatgttttataatcaatttgtacagttaacacaattatcacagtggtcctgagatgacgtacatcctcagcttacgaagataacaggattaagagattaaagtaagacaggcgtaagaaattatgaaagtattatttgggaactggtaaatgtccatgaaatcttcataatttatgttcctctgccatggctcca

SEQ ID NO: 12407 - DNA, 368 bp, Homo sapiens; identical to SEQ ID NO: 12406

SEQ ID NO: 12408 - DNA, 4625 bp, Homo sapiens
ccaggcgggccaggggtcgctgtactccctggaggccaccctggaggagccaccctgcaacgaccccatggtgtgccggctccccgtgtcaagaaaaccctggtgagtgatgaggctcttggggttccccgccccgaggccgagtaaagcagcagttggatgatgacgggtcaggtcaagacgcagggatctgaggtagctgctgccccaccttgagccacttcccaggccccgagggctggaaaccaagatgctatgaaggggaggatgccccggtgcaggccgtgcctcactgtccactgtgatggggtgattgccttaggggtggctctcatctgaggagcctccagctccatcttggccagatcttgctccccagatccagatccaggcccccagagcagcttcttcctctccctccagctctgcagcttccaagtcctggatgagctcggaagacacgtgctgctgcggaaggactgtggcccagtggacaccaaggttccaggtgctggggagcccaagtcagccttcactcagggctcagccatgatttcttctctgtcccaaaaccatccagacaacagaaacgagactttcagctcagtcatttccctgttgaatgaggatcccctgtcccaggtgaggagccctcagcttgaggagccctcagcttgaggagccagccgctgcctcatcacccttctcccttccctctggagtgggtttctctggtcagcctaaagactggtctgcctatccaggacttgcctgtgaagatggcttcaatcttcaagaactttgtcattacctataaccggacatatgagtcaaaggaaggtgaggacccagccttggctgtacctgttcctatcagaacaggactttccccccaacttggcaccttggtgtgtgggaggagaaagacaagaggcagtgtacctgttcaaggaccccataattcctgagctctccctaagccttcccagcctggcagccaccctgagtacctggccccttctcctaccttatcttcccgctcagaagccatgggtcttggccgggcgtggtggctcacctctgtaatcgcagtactttgggaggccgaggtgggcagattacctgaggtcaggagttcaagaccagcctggccaacatggtgaaaccccatctctactaaaaaaaaagtacaaaaattagccaggtgtggtggcgcacacctgtataccagctactcgggaggctgaggcaggaaaatcacttgaacctgggaggcggaggttgcagtgagcaaagattgtgccactgcactccagcatgggtgacaagcgaaaactctgtctcaaaaaaaaaaaaaagaagctctgcatctccatcactctggcagggtggaatggggcagaaggctggattttttgtgctggagagtccttgacaacatggcctttccccaccacctcttgtgggtggtgtcctttagaccccatttactgcttttgcacctgggaagtcatcacttcagtttggccctaaaagttgatcagacctcccactccatcacttgcatgtctggcccccacccctacctgctccccggggaaacccctgcctgctagccccaattgcccttccttttatctgcctggggtcgaacccctcctcttctgctccttggtcctcagaagcccggtggcgcctgtccgtctttgtcaataacatggtgcgagcacagaagatccaggccctggaccgtggcacagctcagtatggagtcaccaagttcagtgatctcacaggtagggatagtggccacagtcctcatggatccaggaagagacaggaccttgctcgcaaggcctctggtcaggtctggcttagaacactcttcctccccatgccctgcccacctttgcccgcagaggaggagttccgcactatctacctgaatactctcctgagaaaagagcctggcaacaagatgaagcaagccaagtctgtgggtgacctcgccccacctgaatgggactggaggagtaagggggctgtcacaaaagtcaaagaccaggttggacccctggaagtgagggtgggacatgggcactgcactggggctgacgaaggggcccggctctgactccaactccacccatctcttgtagggcatgtgtggctcctgctgggccttctcagtcacaggcaatgtggagggccagtggtttctcaaccaggggaccctgctctccctctctgaacagggtgagcatctcgctctactcctctgtccccagcctagcccctcaggagggcttcttgggaccagccttctgtctcctagagctcttggactgtgacaagatggacaaggcctgcatgggcggcttgccctccaatgcctactcggccataaagaatttgggtatgcattaatggggtcaggaggggcaaccggagccacttctccctgtacaagaagttacttcataatgggggggagacatgagcatgagagttacacagaactgggtccaggtcttaatgctgacccagccaggcgtggtggctcatgcctgtaattccaacactttgggaggccaacttgggaagatcacttaaggccagaagttcaggaccaggttgggcaacatagcaagaccccatctctacaaaaaattaaagacattagccaggcatggtggcttgcatctgtagtctcagctacttggggggctgaggcaggaggatcgcttgagcccaggaggttgaggctgtagtgaggcatgtttgtgccactgtactccagcctgggtgaaagactgctgggatgagctcttggtgaggagtcagaagttggagttgagttctgtctctgccacttttcttgctggctactggtccctcctccccatctctcccagcctcagatgtgtcatttctagaatgaagacattcttcagaggggatggcctgtggcctggggtggacgaggaatgtgaaacctcgcgtagagggcttagttcatttctggctgtgaatggcaaatgggagcctgcccttctctactcacccccaccgttccccaggagggctggagacagaggatgactacagctaccagggtcacatgcagtcctgcaacttctcagcagagaaggccaaggtctacatcaatgactccgtggagctgagccagaacgagcagagtgagtgaggggcagggtgaggtgaggtcaggtggggccggggcctgggtgcctactgatgccaccccttcccatctcagagctggcagcctggctggccaagagaggcccaatctccgtggccatcaatgcctttggcatgcaggtgaggccctagccccactgcacatgccccatctcttgttgacctccccgacctcttcttggagtcgatcccctactccttctccacctccagttttaccgccacgggatctcccgccctctccggcccctctgcagcccttggctcattgaccatgcggtgttgcttgtgggctacggcaaccgtgagttccgctgcctgtcctgcatccagccaggccacaggcaggggtgggatcacagcatctcaggtcctctagaggggaaatagggggaatgcctaggaaccctgtccttacccactgcctgggccatgaccagctgggcatcatctgtcctctctatggcagggaagctgagctgtgggagggtaaatattgatggcctaataacctgcaataggcgggtgggtgcgtgcttcctccctgccccagggcttctgcactgaggctggtaggtgggcccctcgctttctgctcttttcctagtccctgtcacacagtaggcccagtgcaagtatttgaagggtgcaaagtgattaaggctctgcctggagaattaaggaccctgatccttgcgctctgcactgcaccccaggctctgacgttcccttttgggccatcaagaacagctggggcactgactggggtgagaaggtgagtcttgctggcttggcccctggccctccagccgccatcctaccctggtgccctcaccagctccccctctcccccagggttactactacttgcatcgcgggtccggggcctgtggcgtgaacaccatggccagctcggcggtggtggactgaagaggggcccccagctcgggacctggtgctgatcagagtggctgctgccccagcctgacatgtgtccaggcccctccccgggaggtacagctggcagagggaaaggcactgggtacctcagggtgagcagagggcactgggctggggcacagcccctgcttccctgcaccccattcccaccctgaagttctgcacctgcacctttgttgaattgtggtagcttaggaggatgtcggggtgaagggtggtatcttggcagttgaagctggggcaagaactctgggcttgggtaatgagcaggaagaaaattttctgatcttaagcccagctctgttctgcccccgctttcctctgtttgatactataaattttctggttcccttggatttagggatagtgtccctctccatgtccaggaaacttgtaaccacccttttctaacagcaataaagaggtgtccttgtcccgag

SEQ ID NO: 12409 - DNA, 2895 bp, Homo sapiens
cagaagatccaggccctggaccgtggcacagctcagtatggagtcaccaagttcagtgatctcacaggtagggatagtggccacagtcctcatggatccaggaagagacaggaccttgctcgcaaggcctctggtcaggtctggcttagaacactcttcctccccatgccctgcccacctttgcccgcagaggaggagttccgcactatctacctgaatactctcctgaggaaagagcctggcaacaagatgaagcaagccaagtctgtgggtgacctcgccccacctgaatgggactggaggagtaagggggctgtcacaaaagtcaaagaccaggttggacccctggaagtgagggtgggacatgggcactgcactggggctgacgaaggggcccggctctgactccaactccacccatctcttgtagggcatgtgtggctcctgctgggccttctcagtcacaggcaatgtggagggccagtggtttctcaaccaggggaccctgctctccctctctgaacagggtgagcatctcgctctactcctctgtccccagcctagcccctcaggagggcttcttgggaccagccttctgtctcctagagctcttggactgtgacaagatggacaaggcctgcatgggcggcttgccctccaatgcctactcggccataaagaatttgggtatgcattaatggggtcaggaggggcaaccggagccacttctccctgtacaagaagttacttcataatgggggggagacatgagcatgagagttacacagaactgggtccaggtcttaatgctgacccagccaggcgtggtggctcatgcctgtaattccaacactttgggaggccaacttgggaagatcacttaaggccagaagttcaggaccaggttgggcaacatagcaagaccccatctctacaaaaaattaaagacattagccaggcatggtggcttgcatctgtagtctcagctacttggggggctgaggcaggaggatcgcttgagcccaggaggttgaggctgtagtgaggcatgtttgtgccactgtactccagcctgggtgaaagactgctgggatgagctcttggtgaggagtcagaagttggagttgagttctgtctctgccacttttcttgctggctactggtccctcctccccatctctcccagcctcagatgtgtcatttctagaatgaagacattcttcagaggggatggcctgtggcctggggtggacgaggaatgtgaaacctcgcgtagagggcttagttcatttctggctgtgaatggcaaatgggagcctgcccttctctactcacccccaccgttccccaggagggctggagacagaggatgactacagctaccagggtcacatgcagtcctgcaacttctcagcagagaaggccaaggtctacatcaatgactccgtggagctgagccagaacgagcagagtgagtgaggggcagggtgaggtgaggtcaggtggggccggggcctgggtgcctactgatgccaccccttcccatctcagagctggcagcctggctggccaagagaggcccaatctccgtggccatcaatgcctttggcatgcaggtgaggccctagccccactgcccctgccccatctcttgttgacctccccgacctcttcttggagtcgatcccctactccttctccacctccagttttaccgccacgggatctcccgccctctccggcccctctgcagcccttggctcattgaccatgcggtgttgcttgtgggctacggcaaccgtgagttccgctgcctgtcctgcatccagccaggccacaggcaggggtgggatcacagcatctcaggtcctctagaggggaaatagggggaatgcctaggaaccctgtccttacccactgcctgggccatgaccagctgggcatcatctgtcctctctatggcagggaagctgagctgtgggagggtaaatattgatggcctaataacctgcaataggcgggtgggtgcgtgcttcctccctgccccagggcttctccctgaggctggtaggtgggcccctcgctttctgctcttttcctagtccctgtcacacagtaggcccagtgcaagtatttgaagggtgcaaagtgattaaggctctgcctggagaattaaggaccctgatccttgcgctctgcactgcaccccaggctctgacgttcccttttgggccatcaagaacagctggggcactgactggggtgagaaggtgagtcttgctggcttggcccctggccctccagccgccatcctaccctggtgccctcaccagctccccctctcccccagggttactactacttgcatcgtgggtccggggcctgtggcgtgaacaccatggccagctcggcggtggtggactgaagaggggcccccagctcgggacctggtgctgatcagagtggctgctgccccagcctgacatgtgtccaggcccctccccgggaggtacagctggcagagggaaaggcactgggtacctcagggtgagcagagggcactgggctggggcacagcccctgcttccctgcaccccattcccaccctgaagttctgcacctgcacctttgttgaattgtggtagcttaggaggatgtcggggtgaagggtggtatcttggcagttgaagctggggcaagaactctgggcttgggtaatgagcaggaagaaaattttctgatcttaagcccagctctgttctgcccccgctttcctctgtttgatactataaattttctggttcccttggatttagggatagtgtccctctccatgtccaggaaacttgtaaccacccttttctaacagcaataaagaggtgtccttgtcccgag

SEQ ID NO: 12410 - DNA, 4193 bp, Homo sapiens
tcggcactttcaaagtcctggatgagctcggggggcgcgtgctgctgcggaaggactgtggcccagtggacaccaaggttccaggtgctggggagcccaagtcagccttcactcagggctcagccatgatttcttctctgtcccaaaaccatccagacaacagaaacgagactttcagctcagtcatttccctgttgaatgaggatcccctgtcccaggtgaggagccctcagcttgaggagccctcagcttgaggagccagccgctgcctcatcacccttctcccttccctctggagtgggtttctctggtcagcctaaagactggtctgcctatccaggacttgcctgtgaagatggcttcaatcttcaagaactttgtcattacctataaccggacatatgagtcaaaggaaggtgaggacccagccttggctgtacctgttcctatcagaacaggactttccccccaacttggcaccttggtgtgtgggaggagaaagacaagaggcagtgtacctgttcaaggaccccataattcctgagctctccctaagccttcccagcctggcagccaccctgagtacctggccccttctcctaccttatcttcccgctcagaagccatgggtcttggccgggcgtggtggctcacctctgtaatcgcagtactttgggaggccgaggtgggcagattacctgaggtcaggagttcaagaccagcctggccaacatggtgaaaccccatctctactaaaaaaaaagtacaaaaattagccaggtgtggtggcgcacacctgtataccagctactcgggaggctgaggcaggaaaatcacttgaacctgggaggcggaggttgcagtgagcaaagattgtgccactgcactccagcatgggtgacaagcgaaaactctgtctcaaaaaaaaaaaaaagaagctctgcatctccatcactctggcagggtgggatggggcagaggctggattttttgtgctggagagtccttgacaacatggcctttccccaccacctcttgtgggtggtgtcctttagaccccatttactgcttttgcacctgggaagtcatcacttcagtttggccctaaaagttgatcagacctcccactccatcacttgcatgtctggcccccacccctacctgctccccggggaaacccctgcctgctagccccaattgcccttccttttatctgcctggggtcgaacccctcctcttctgctccttggtcctcagaagcccggtggcgcctgtccgtctttgtcaataacatggtgcgagcacagaagatccaggccctggaccgtggcacagctcagtatggagtcaccaagttcagtgatctcacaggtagggatagtggccacagtcctcatggatccaggaagagacaggaccttgctcgcaaggcctctggtcaggtctggcttagaacactcttcctccccatgccctgcccacctttgcccgcagaggaggagttccgcactatctacctgaatactctcctgagaaaagagcctggcaacaagatgaagcaagccaagtctgtgggtgacctcgccccacctgaatgggactggaggagtaagggggctgtcacaaaagtcaaagaccaggttggacccctggaagtgagggtgggacatgggcactgcactggggctgacgaaggggcccggctctgactccaactccacccatctcttgtagggcatgtgtggctcctgctgggccttctcagtcacaggcaatgtggagggccagtggtttctcaaccaggggaccctgctctccctctctgaacagggtgagcatctcgctctactcctctgtccccagcctagcccctcaggagggcttcttgggaccagccttctgtctcctagagctcttggactgtgacaagatggacaaggcctgcatgggcggcttgccctccaatgcctactcggccataaagaatttgggtatgcattaatggggtcaggaggggcaaccggagccacttctccctgtacaagaagttacttcataatgggggggagacatgagcatgagagttacacagaactgggtccaggtcttaatgctgacccagccaggcgtggtggctcatgcctgtaattccaacactttgggaggccaacttgggaagatcacttaaggccagaagttcaggaccaggttgggcaacatagcaagaccccatctctacaaaaaattaaagacattagccaggcatggtggcttgcatctgtagtctcagctacttggggggctgaggcaggaggatcgcttgagcccaggaggttgaggctgtagtgaggcatgtttgtgccactgtactccagcctgggtgaaagactgctgggatgagctcttggtgaggagtcagaagttggagttgagttctgtctctgccacttttcttgctggctactggtccctcctccccatctctcccagcctcagatgtgtcatttctagaatgaagacattcttcagaggggatggcctgtggcctggggtggacgaggaatgtgaaacctcgcgtagagggcttagttcatttctggctgtgaatggcaaatgggagcctgcccttctctactcacccccaccgttccccaggagggctggagacagaggatgactacagctaccagggtcacatgcagtcctgcaacttctcagcagagaaggccaaggtctacatcaatgactccgtggagctgagccagaacgagcagagtgagtgaggggcagggtgaggtgaggtcaggtggggccggggcctgggtgcctactgatgccaccccttcccatctcagagctggcagcctggctggccaagagaggcccaatctccgtggccatcaatgcctttggcatgcaggtgaggccctagccccactgcccctgccccatctcttgttgacctccccgacctcttcttggagtcgatcccctactccttctccacctccagttttaccgccacgggatctcccgccctctccggcccctctgcagcccttgcgtcattgaccatgcggtgttgcttgtgggctacggaaccgtgagttccgctgcctgtcctgcatccagccaggccacagcgaggggtgggatcacagcatctcaggtcctctagaggggaaatagggggaatgcctaggaaccctgtccttacccactgcctgggccatgaccagctgggcatcatctgtcctctctatggcagggaagctgagctgtgggagggtaaatattgatggcctaataacctgcaataggcgggtgggtgcgtgcttcctccctgccccagggcttctccctgaggctggtaggtgggcccctcgctttctgctcttttcctagtccctgtcacacagtaggcccagtgcaagtatttgaagggtgcaaagtgattaaggctctgcctggagaattaaggaccctgatccttgcgctctgcactgcaccccaggctctgacgttcccttttgggccatcaagaacagctggggcactgactggggtgagaaggtgagtcttgctggcttggcctgccctccagccgccatcctaccctgtgccctcaccagctccccctctccccagggttactactacttgcatcgcgggtccggggcatgtggcgtgaacaccatggccagctcggcggtggtggactgaagaggggcccccagctcgggacctggtgctgatcagagtggctgctgccccagcctgacatgtgtccaggcccctccccgggaggtacagctggcagagggaaaggcactgggtacctcagggtgagcagagggcactgggctggggcacagcccctgcttccctgcaccccattcccaccctgaagttctgcacctgcacctttgttgaattgtggtagcttaggaggatgtcggggtgaagggtggtatcttggcagttgaagctggggcaagaactctgggcttgggtaatgagcaggaagaaaattttctgatcttaagcccagctctgttctgcccccgctttcctctgtttgatactataaattttctggttcccttggatttagggatagtgtccctctccatgtccaggaaacttgtaaccacccttttctaacagcaataaagaggtgtccttgtcccgag

SEQ ID NO: 12411 - DNA, 1198 bp, Homo sapiens
gggagagacccagagagggatctttattcagaagcacttggctggcttttctcttaggcccttgctccgagggacggatgggatcagccacagggtgcatcctctctccatcttgcatagagaacctcagtggttggggtcaaaggtcgctctccccatagagggcactggagaaggccacgtagtccagggctccagccggggccccggatcccttgtagggcaccatacggcggatgcagtactcggcctgcttggcagggagctcgcgccgcagctcctcgggggtgatgtagttctggggagaagaggcgttgaggacccacaggtcccgtgccctgccctagcccaccagcccctccaccgcctgggactcaccttgtctcctgccaagatcttgaaggaagctacaacttgctcagtcgtgtcagtctcggctgtctctcgggtcatgaagtctatgaaggcctggaaggtcaccaccccagctgcgttggggtccaccatggtcatgatgcgagcaaactccacttccccctgcagggatagaggccaggcactatgcccatgagcactaaagccaggagggctcccagtgtcccctcctggggactgtccaacctcagctagcagagccccagtaacaagggagttcccttcctccagagaccttagccctggctgtaggaagtcctttatggtaggctgaaatctgcatcctacccacagcaggaagcagatttgctccctggtcctgattttttttccagggccacacccgtttctgtagtgctgtttccctacaggtaaaaatgttgcaagctcagactttgggtccacacagaactgggtccaagtgagttttacctccctgagccttgctagcccctgtgtggatgtagtgaagatgcaggggatggtgtatgtgaagatgggaggtgcacagtaggtgatcagcacagaggagggggtactttgggactcctgggaaggagctggggagctctcaccaggtcatagcccatggagatgaggcaagctcggaagtcatcaggctccatcatcccattccgcttctgtagggggtgagtggttatcaggcttggtctccagcctccaccagcccccaagtgtcttaccccacagggccaggcccctgctgaccctgtcaaagtggttgaaggatgctcggaactcg

SEQ ID NO: 12412 - DNA, 3073 bp, Homo sapiens
gggagagacccagagagggatctttattcagaagcacttggctggcttttctcttaggcccttgctccgagggacggatgggatcagccacagggtgcatcctctctccatcttgcatagagaacctcagtggttggggtcaaaggtcgctctccccatagagggcactggagaaggccacgtagtccagggctccagccggggccccggatcccttgtagggcaccatacggcggatgcagtactcggcctgcttggcagggagctcgcgccgcagctcctcgggggtgatgtagttctggggagaagaggcgttgaggacccacaggtcccgtgccctgccctagcccaccagcccctccaccgcctgggactcaccttgtctcctgccaagatcttgaaggaagctacaacttgctcagtcgtgtcagtctcggctgtctctcgggtcatgaagtctatgaaggcctggaaggtcaccaccccagctgcgttggggtccaccatggtcatgatgcgagcaaactccacttccccctgcagggatagaggccaggcactatgcccatgagcactaaagccaggagggctcccagtgtcccctcctggggactgtccaacctcagctagcagagccccagtaacaagggagttcccttcctccagagaccttagccctggctgtaggaagtcctttatggtaggctgaaatctgcatcctacccacagcaggaagcagatttgctccctggtcctgattttttttccagggccacacccgtttctgtagtgctgtttccctacaggtaaaaatgttgcaagctcagactttgggtccacacagaactgggtccaagtgagttttacctccctgagccttgctagcccctgtgtggatgtagtgaagatgcaggggatggtgtatgtgaagatgggaggtgcacagtaggtgatcagcacagaggagggggtactttgggactcctgggaaggagctggggagctctcaccaggtcatagcccatggagatgaggcaagctcggaagtcatcaggctccatcatcccattctgcttctgtagggggtgagtggttatcaggcttggtctccagcctccaccagcccccaagtgtcttaccccacagggccaggcccctgctgaccctgtcaaagtggttgaaggatgctcggaactcgttgagctgctcctggctcagtcccttggcgtctcgggtcagtacctggttctccacttcattgatggtgcgggcaatggaggtgagcagctgctcccagcccacgcggatgtgctggcggtcaggggacaggccactgtcagtgggcggccagtgcctggccactggctctagctccacatccagttcactgaatgaccctgggcaagtcctccccctcactgggcctccatccccatctggaggctccactgagtaacccacccccaccccagcagtccttcctgtcttttgataaccagctatggccaatcttggcctggttttggacggctttgtgactctggaagggtcactttccatcgctgggtcttaagggacctggccaagctgaactggggactctgctgggacacacatgctctgtccagctgtgatctccctgggcctcctcagccagtgctgcctccccactctcctgagagggtgtgatcccacctccatgctgtagacggtgtgcttattgtcgaacaccaggctctcctgcagcagctggtggtcaccctccagccggtcaatgttagtcttgtagttgataatgttctgctcctgctgccgtagcccagccatctgctcctccagagagccagctagccctgctgccagccgccccacttcctgcaggggttcccaggcagcatgagggctcccaactccctgtggcccagccctggccccatccccccaggttggacccactatcccagcccttacctccaccttcgcctggatccagggtccaatggcattggcctgggccgcaaactgtcgccggagcctctcgtttacctgctgccgtgccagctcctcctgcagtgtctggtcacagctgggcaccagctttcggacctgggaggagggcagttatgccagagccagctctgggggctgggaaatggctttaggggagatgggctccagcccctcaaacctcagcccctgttgctttgagccaacttgtctgggatatacgagaaagctcttgggcaagtcactaacccatgtgggcttcagttttctcatctgcaaaatggggctgatggcatcatttactaatatgggtggatttataaaagatgtccacacacaaggcttaattctacttcacatcagtcctgacaggagaatgctgctgttacagctcatcatatacagatgagcccgagacaggcaaggcgatttatccaatcccacgtggagtctgtggcagaccccacatctgaagatggactttattctccatatcttgggccacccgagatttcagggtggtcacagtatgcaggagggggtgggaggaaggctgcaggtggcactgaccatatcccacttggtgttgatgtcctgcgggctgagggtgatgtagggattggtggagcagggccgcagcccatacgtctggcagatcttctggatctcaccctggatgcccatgatggcacctcgctctcagtcagcctcgggcagtgttgccttgaactgatcgtgcgctgtcagcaggctctggggacgacaggcaggaagtgtcagctggtgtcccccacttaccacaggcaacagaaagggcagcagtgtgccccaggccacccaccagtcctgggcagtcctgacacaagaaccccggcctcctgtcttccagcccagcactcgggaactggggttttcctcccatccctatgccccaggagcctaaagttgtgggtggcagaatttggggccagctttcctgtcatcctatccatcccctgcaaccctggcacccacctgggtctcctccacagagtgtaccagccacacgtcctgcaggtcctccacg

SEQ ID NO: 12413 - DNA, 4463 bp, Homo sapiens
  SITE (2621): n equals a,t,g, or c
  SITE (2631): n equals a,t,g, or c
  SITE (2753): n equals a,t,g, or c
  SITE (4121): n equals a,t,g, or c
  SITE (4182): n equals a,t,g, or c
  SITE (4192): n equals a,t,g, or c
gggagagacccagagagggatctttattcagaagcacttggctggcttttctcttaggcccttgctccgagggacggatgggatcagccacagggtgcatcctctctccatcttgcatagagaacctcagtggttggggtcaaaggtcgctctccccatagagggcactggagaaggccacgtagtccagggctccagccggggccccggatcccttgtagggcaccatacggcggatgcagtactcggcctgcttggcaagggactcggccgcagctcctcgggggtgatgtagttctggggagaagaggcgttgagcccacaggtcccgtgccctgccctagcccaccagcccctccaccgcctgggactcaccttgtctcctgccaagatcttgaaggaagctacaacttgctcagtcgtgtcagtctcggctgtctctcgggtcatgaagtctatgaaggcctggaaggtcaccaccccagctgcgttggggtccaccatggtcatgatgcgagcaaactccacttccccctgcagggatagaggccaggcactatgcccatgagcactaaagccaggagggctcccagtgtcccctcctggggactgtccaacctcagctagcagagccccagtaacaagggagttcccttcctccagagaccttagccctggctgtaggaagtcctttatggtaggctgaaatctgcatcctacccacagcaggaagcagatttgctccctggtcctgattttttttccagggccacacccgtttctgtagtgctgtttccctacaggtaaaaatgttgcaagctcagactttgggtccacacagaactgggtccaagtgagttttactccctgagccttgctagcccctgtgtggatgtagtgaagatgcaggggatggtgtatgtgaagatgggaggtgcacagtaggtgatcagcacagaggagggggtactttgggactcctgggaaggagctggggagctctcaccaggtcatagcccatggagatgaggcaagctcggaagtcatcaggctccatcatcccattccgcttctgtagggggtgagtggttatcaggcttggtctccagcctccaccagcccccaagtgtcttaccccacagggccaggcccctgctgaccctgtcaaagtggttgaaggatgctcggaactcgttgagctgctcctggctcagtcccttggcgtctcgggtcagtacctggttctccacttcattgatggtgcgggcaatggaggtgagcagctgctcccagcccacgcggatgtgctggcggtcaggggacaggccactgtcagtgggcggccagtgcctggccactggctctagctccacatccagttcactgaatgaccctgggcaagtcctccccctcactgggcctccatccccatctggaggctccactgagtaacccacccccaccccagcagtccttcctgtcttttgataaccagctatggccaatcttggctggttttggacggctttgtgactctggaagggtcactttccatcgctgggtcttaagggacctggccaagctgaactggggactctgctgggacacacatgctctgtccagctgtgatctccctgggcctcctcagccagtgctgcctccccactctcctgagagggtgtgatcccacctccatgctgtagacggtgtgcttattgtcgaacaccaggctctcctgcagcagctggtggtcaccctccagccggtcaatgttagtcttgtagttgataatgttctgctcctgctgccgtagcccagccatctgctcctccagagagccagctagccctgctgccagccgccccacttcctgcagggggttcccaggcagcatgagggctcccaactccctgtggcccagctctggccccatccccccaggttggacccactatcccagcccttacctccaccttcgcctggatccagggtccaatggcattggcctgggccgcaaactgtcgccggagcctctcgtttacctgctgccgtgccagctcctcctgcagtgtctggtcacggctgggcaccagctttcggacctgggaggagggcagttatgccagagccagctctgggggctgggaaatggctttaggggagatgggctccagcccctcaaacctcagcccctgttgctttgagccaacttgtctgggatatacgagaaagctcttgggcaagtcactaacccatgtgggcttcagttttctcatctgcaaaatggggctgatggcatcatttataactaattatgggtggatttataaaagatgtccacacacaaggcttaattctacttcacatcagtcctgacaggagaatgctgctgttacagctcatcatatacagatgagcccgagacaggcaaggcgatttatccaatcccacgtggagtctgtggcagaccccacatctgaagatggactttattctccatatcttgggccacccgagatttcagggtggtcacagtatgcaggagggggtgggaggaaggctgcaggtggcactgaccatatcccacttggtgttgatgtcctgcgggctgagggtgatgnagggattggnggagcagggccgcagcccatacgtctggcagaacttctggatctcaccctggatgcccatgaaggcacctcgctctcggccagcctcgggcagctcgttgccttgaactgatcgtgcgctgncagcaggctctggggacgacaggcaggaagtgtcagctggtgtccccacttaccacaggcaacagaaagggcagcagtgtgccccaggccacccaccagtcctgggcagtcctgacacaagaaccccggcctcctgtcttccagcccagcactcgggaactgcggttttcctcccatccctatgccccaggagcctaaagttgtgggtggcagaatttggggccagctttcctgtcatcctatccatcccctgcaaccctggcacccacctgggtctcctccacagagtgtaccagccacacgtcctgcaggtcctccacggcaccatccagccagttgttgaagggcgcgcggccgggcaaactccagttgcagctggtcaatggtctccaggagcttctccatccgctagaggtgggaggcgtagtgggtcagaagcctgccctgcagacctggcctcacccacctacccaccccccagctccccggcccccagccccacctctagcgcatcccgcctcttctgggtcagggtgcccaggttgtcccactgatcgcagatggcctggcagcggctattcactgaggctgcctcgtggtagtccagctcactgggagcgagaagtagggcgagtgtggggccagccccagcccagatgtcctaactgcactcccagggctggaacctgctccccggatgggggtgaaggcgtgcgggagccagggcaggtggtgggtaaagctgggtgctttccaagaggggcggtaccagcgcatccctctgggcaggtgggcgcccgcgggtccttagctgcagtccatggaggtgcttgggtggaggggcggggttgcgcaagaaggggcgggttcatgggagggggtggccaggccaaggctgatggggagggtttggagcagtaagccgggtgaagagagcgggcaggttagagggcaggtcacggagtgagacaggtcaagcgccagtgggaagagtgtgagcagcagagcggggtccggaggtgggggtggggttccaggaggggcggagcgaatgggacctgggtaccacggcgggttacagaacccaggagagcctagtgtcttgagaagggcaatggggatcagggtggggctcgccaccgggggcggggccgggggtgttgggggcgggccccgcgagccccgcctacttgagctcctgggccagcgcggcaatgtgctccacgcggtcctggtgcgccgccaggtcgctctcaaagcctcgtggcgccgcagcaacgcccgcacctcctgtagcaaagccgaatcgtagtcgcgctggctcagcatctcctcctttcctgctcaaagagatgccggctccggtcncccagtggcggcaggggcaggggtgcgcggcgggctgcgtgaccatgaagcgtctctgctnaaggtggcgntcgcaccggcctagctcgtcctagggatttgctctgcggcgtcggtgtaataacgtaggtgaaagtcctcttccgtggcgtgatccgcaaatgacatcagcgtcccctgagcgagctacgtccagggggcccttggtacagttttagcataatttgaccttaaaatagctctcaacgattctgtaacccccatgagcccctgacccggcctcctttgttcactacagaaatcctcgacagaacaacgaatggatgtttctatccagagtaa

SEQ ID NO: 12414 - DNA, 4606 bp, Homo sapiens
gaactgacgctccccaaccgtcccgcaactgtcctgtcccagactttggcaccgtcggggtccgtcgtccccgaatgtgacagcatccccaccccggctgctgcccaggatccgccggaccccggcctcgatatgggagacctggaactgctgctgcccggggaagctgaagtgctggtgcggggtctgcgcagcttcccgctacgcgagatgggctccgaagggtgaggcacccgggtcaggcggagtcccggagtcattgtccttgagtcggggagctggggcctgactcgggggaggggctgcccagtgtggaggggctcccaaatgggggagcagagcgttccgagacaggagtattactgctcctgagccccctgtgtcccctcaggatcaggttaggcttcagtaggatccagcccccatccccactcctaatgcacacacgtggacgcacatgcacttaccctctgaggcaggtggaaccagcagcatgagaacctggagaagctgaacatgcaagccatcctcgatgccacagtcagccagggcgagcccattcaggagctgctggtcacccatgggaaggtaccccgaggtcacaggcagggttcctgccttcccccatacctcacctactctacccctccggagtcccctgtgtgcccttcccctctggcctggtacacctgttctccctgaaggacaaagaggaatgtgttacatgtttcattttgtatccctattggacaggactctggcacaccaggctgggtgcagggcatgagttgattagggagaaagctgtaggtcctagaacagcttaggcttcaaggggaaggcccaaatgctaaaggcatctgtgaattgactgtaaggctggtggtggggaaggggtggggaggggttggggagggcgggagggaggggagataacctaactggaggtggaacttcggcatggaaggaagcagccttcccaacatgaaagggggaagttagaaaccagggagatgcctggctggaacatggaccagggagtgtcaccagcagatgacctgagatatcaattgaccaaaaaaaaaaaaaaaaaagccgggcatggtagctcatgcctgttatcccagcattttgggaggccaagacgggtggatcatctgaggtcaggagttcaaggccagcctggccaacatggtgaaaccccacctctactaaaaatacaaaaatttgcagagcatggtggtgcacacctgtaatcccagctactcgggaggctgaggcaggagaatcgcttgaacctgggaggcagaggttacagagagccaagatcatgccactgcactccagcctgggtgacaagagtgaaactccgtctcaaaaaaaaaaaaaaaaaaaagaaaggtcctttgcaaaagaaagatggaactcatactaggggataggataggaacagggcactgtgaagggtcctgagtaggagtgaggccaaggcacacaagagctttggaggaccacagacagggactagagggagggcatgaggagaagggctggcttgaaagggatgcctgaatgggcgggcagaggataagggtgcaggtgcaggcagggcaaggcagtctgggaactgggcaggagccagtcacataagcatgagggacatccacagaggtgttgggagcagctggtaatgaaggtccaaggtgcaagagagaagtcaggaaggatactcatgggtctggaatagtttaggggcccagcagtgtttggggatatcagggttgagctgagccggggatgggagggttgccaggcaaaggtaggcccatctcatccctgtcctttaccctacccttcaaaggtcccaacactggtggaggagctgatcgcagtggagatgtggaagcagaaggtgttccctgtgttctgcagggtggaggacttcaagccccagaacaccttccccatctacatggtggtgagctgggcccctggttcatacctcttctcactccttcagagggctctggaccggggaggagagctggtagcccctatcccttcctcaggccctgtccttctctttatctgacaggtgcaccacgaggcctccatcatcaacctcttggagacagtgttcttccacaaggtgagggactatctctgcccatgggccacagttccgggtcagggcctggcaggaagggagattgtgtctgtgtggggaaggcatcagacacagaaagtttccctcctccttttcccaggaggtgtgtgagtcagcagaagacactgtcttggacttggtagactattgccaccgcaaactgaccctgctggtggcccagagtggctgtggtggcccccctgagggggagggatcccaggacagcaaccccatgcaggtgggttgaggttacctagggttgtgaaagcctaggtctgggttccccaaggcctgcgcaggtgagggtggcccagcgtgaacactgtgtgacctcccaggagctgcagaagcaggcagagctgatggaatttgagattgcactgaaggccctctcagtactacgctacatcacagactgtgtggacaggtgagcagtccgactgggcctgggcctactgtggagggctggaagaccgggcctgtagcctgcctctactcacctccttcacaacgtccctgcccctagcctctctctcagcaccttgagccgtatgcttagcacacacaacctgccctgcctcctggtggaactgctggagcatagtccctggagccggcgggaaggaggtagggtcctcccccaccagcctaagccccaggctactgcttcagggtatctttttgatagaggggggcagcttgcacacacgaagacaaaccctgtccccaagcccactgaggataccaggatgcctcagccaaggttggcctagacctgagctctgcagcaggccaggcccatgtgtccactactgaggctcaccctgctctggggtcagcagccctatagcctgggcaagtcctgcagcccaggttctcccattcccaggcagtggtcagtctcccagcccccacagctggctcacttgaagagaattcaacgtctgcacccagtgtgctggttcctctccccaggcaagctgcagcagttcgagggcagccgttggcatactgtggccccctcagagcagcaaaagctgagcaagttggacgggcaagtgtggatcgccctgtacaacctgctgctaagccctgaggctcaggcgcgctactgcctcacaagttttgccaagggacggctactcaaggtcagactccctccgcaccagcccccacagccccagtaccgccctccccatcctaccccgactgcgtccctgctgtttatctttgcccacccacctcaaccccagtgctcttttcagtccttgggcctcaggtgacacaccagctagtgggacatgggcccccacaggcattctcagcccaacccagccccttccttttccttggccccctggccagcacctgcatcacactggcctccactggacacccttgcagcttcgggccttcctcacagacacactgctggaccagctgcccaacctggcccacttgcagagtttcctggcccatctgaccctaactgaaacccagcctcctaagaaggacctggtgttggaacaggtaggcactggaaagttagctgctcaggaccactgtcccactttaccagcaccttcctgccactctccacttctctctcctagatcccagaaatctgggagcggctggagcgagaaaacagaggcaagtggcaggcaattgccaagcaccagctccagcatgtgttcagcccctcagagcaggacctgcggctgcaggcgcgaaggtaaggcctgtggaaatggcagggagggtggaggggatgcaggaggcatggatgtgggtggggtgcccccaccttccagggccagtcagaccttcctgactttcccccaggtgggctgagacctacaggctggatgtgctagaggcagtggctccagagcggccccgctgtgcttactgcagtgcagaggcttctaagcgctgctcacgatgccagaatgagtggtattgctgcaggtgagggtatcctagaaccttggacctctaagccctactcccacatcccccacatgcattgccatcctcaatacccacctgcctgcagggagtgccaagtcaagcactgggaaaagcatggaaagacttgtgtcctggcagcccagggtgacagagccaaatgagggctgcagttgctgagggccgaccacccatgccaagggaatccacccagaatgcacccctgaacctcaagatcacggtccagcctctgccggagccccagtctccgcagtggagagcagagcgggcggtaaagctgctgaccgatctccctcctcctcaccccaagtgaaggctcgagacttcctgccccacccagtgggtaggccaagtgtgttgcttcagcaaaccggaccaggagggccagggccggatgtggggaccctcttcctctagcacagtaaagctggcctccagaaacacggg

SEQ ID NO: 12415 - DNA, 6750 bp, Homo sapiens
ttttcagtcattttttacaaattttttacttttttctctcctaaaatttctgaacatacagtacaagtatgagctgccttgcaggagaggcagtcttgcagccccagcttcatccagacacatgatgcctatgttcctctgggatgacagagaaaggggaaggaaatgggaggcactccagcatgaggagcaggaattcacacacgggcctccaaatgcccaactgtcccagtgcctgaggtgtcccctgactcagctgagagagttcaacaggtccctaggcccagctcctacatggaggggcaaatccaggcttcccctaggctgggaagagctcatggttggatcctcttgcggtataggtaggcattgctcacctggttcataatgaccaagctggtgaggacagggcataatacagccaggtaccaggctgcaccagtgacagaggcagtgaaccagagtgagcacatgcccagcaagaggctggcactacccagcaggtagcccaccagcccagaagtagcatggtatagcttgagcttcgccaggggccatcggggcagcagcttggggtagagcagccccaccccacctgagcactgcagccctgcccacagcacagccagcagccctgcctgcccatgccgcgtaaccaggtgggctttgccaagctgctctttgtggaggatgacaaggccgaggcccagcagtgcacacagcagggccagcagctgcagcacccagtggcagcgtgctcggcctttccgtgagagggagtgcagcagcgaactctcaggagaaaacaccagtagtgcctcggtcatcaggaaggagaactgaggaaacaggggatgggaagctcaagtgagggtgctgccccagaagaggagaagagggctttatgtaacccttagctgccagtgagtctgggctgattcccctttttctttctctccccactgacaagactatccatttggtggggcaagagtggaaaaccccatctgggatgatatatgtgccctgaataatctccacacttcctcctaggtgccagtctgaaatgtcatctgtcgtatgttaccaagcaaacacagggtttgagatgtggcagttataaatgattcacaagctttgtttccctaacgtggggctggatacaatttcttggcaagagctggccacatgggtgcactgtttcagggaaagttaggtgcatcaccagaaattaaagtaaaaagggacagaggtacatccaaatgcaatgtctcagctttctgcctagaggtgggtgaagcctcattgtgcttagacaaatcttacccatttgacctgggtcctgggtcttcattactctgattcaagtctctttttttttttttttttttttttggagatagtctctctctgtcacccaggctggagtgcagtggcctgatctcggctcactgcaatctccgccttccgggttcaagcaattctcctgcctcaggctcctgagtaactgggattacaggcacctgccaccacacccagctaatttttggttttttggggggtttttttgtttttgggtttttttttttttttgggacagagcctcgctctgtcgcctaggttagaggttagagtgcagtggcgcaatcttggctcactgcaacctccgtctcctgggttcatgcgattctcctgcctcagcctcccgagtagctgggactacaggcgcgtgccaccatgcccggctaattttttgtatttttagtagagacggggtttcaccatgttggccaagatggtctcgatctcctgacctcaggtgatgtgcccgcctcggcctctaagtgctgggattacaggcatgagccaccgtgcccagcctcaagtctgaaatatataccatgggcaggagtagttggagcatgcaactcttccaaacagatattaaatgtggacaaagattcagaggctgccagggccaccaaccatgcccatgctcccacccctaagaactgcccaggcccactacttacagccaaagacataagcaccgggtgccaggagaacaggcctggaatgagaagaggaggcctcatggggctgaggcaagaagaaaccagccataccaatccttaagggttgaggaataccagcagcccatcacccaaggaggtgctgccaaactgtgagccccttcttgctctgcaacaagctgaccccacacctatcctctcttcctggcctcttcctggatcagaggccatgctttgccactcctctggcagtcctccctccttcccttacacctcctgagaggcagccaaatggagcacccagagaaggaaagacaaaccaggaattctgtgtgccctggccatacctacctgctccacctcactcatcgctccagcacagaattccctcaaccagccaggcctgttcccggaagtcccactgcccttcctccccaggaacagtggcccttcccttcccagaagtcagctatgaattctacttactggagccaggcctggcaagcacagccacaaagatggtaaagcccagggccacaaggtgggcggcagcgccagaagcagtacgcagagctcggtagatgtgtgactcggtctccgcagaaagggccatcgtcagccgtgctagtggttgtagcctgaaagcatagtagcgtgggccaggatctcaggtgcccactgttcactcctcactggagaaaaggctgcaaggcaggaatgccaccctcttccaataagttatggtaggaaagaacagtaccaagaccagcaccaggaatggtcacaacatgccagtcgacggccggcggcctgtcaacgtgtacccatgtctgaactggtaccaatcgctggcccgccttccaggtaggaggcgcaaagccatgtaagactacaaatcccagcgtgtaccacgccgtcgccggcagtagagccagctgggagggcgcggagcactatggaaattgtagttccctgctgcggtcccagttacagcgtgaatcccttagcgcaccgcctccccaagtgctgccagcatgctgcccctccacgctagggacttgcctgcctctgccgcagcgcagatctgatgcggtggtttcctccaaagaaagcgggatactccgggccctgccgcgcgcaccgccgctccgtcacggagccgctttacttccgggtgcgacgtctacccacccaggacttcctgggacgagccgtcccccgccccagccacgcctctgagtcgcgctgcgcaggcgccattgggcagagggattggcaagcttgcgtgccccagcgacacaggcctcgaggctgtctctgacaagtgttcacaggaggtggggacgcctctgcgcgaggaacgaggagctacgggcctgggcccggttattgccatgggcagcggctgccgcatcgaatgcatattcttcagcgagttccaccccacgctgggacccaagatcacctatcaggtgccacccgggctcgcgggactgggcgggaagagggacgttctcgagagctcaactggctgcctgaaggcagtagtttcccgtgctgcacgcaggcatgctgcttcattcgcagacaactgtgaggctagaggatagtcagacccaggcccccggctcccaatgtggcagggaagacatacgtcacattggcagtgtttgtaggatatcgggctgtagggatccggttggggggttccaggtcccacagaaggtgagttgggtgacccatgagtatccctgaactgagtgaagagtaaatgatgcataggaagtttaggtaaggcaggagaaagtgttccaggtagagggaacagcatatgcagaagccaggaaggaggtgagatcatagcgtatgtttggaaacagaaagaagtaataggcctgagtggatgggagagaggggaacgctggagaagaggacttgggcttggggggcatgaggaggtcaccatttgtactacacccagtacagatgtccactgaggggcccattgccactcccctccccaggtccctgaagacttcatctcccgagagctgtttgacacagtccaagtgtacatcatcaccaagccagagctgcagaacaagcttatcactgtgtgagaccctagctcggggtgagcggtgggtggcaggggttgtcccaggaggaggaagggacaggcttgggggcctgactgtgttccaattatccagcacagctatggaaaagaagctgatcggctgtcctgtgtgcatcgaacacaagaagtacagccgcaatgctctcctcttcaacctgggcttcgtgtgtgatgcccaggccaagacctgcgccctcgagcccattgttaaaaagctggctggctatctgaccacactagaggtctgcaatgagatgggcttgggtttaccgacaggcagagttggggaaggtgttcccatgtctccaaagtcccccaaacctgggaccctgcaaaccagctcaggactcagggcagccaaccagccaggggtcctgggatgtgcccaccatgctttccatgctctgtctagctagagagcagcttcgtgtccatggaggagagcaagcagaagttggtgcccatcatgaccatcttgctggaggagctaaatgcctcaggccggtgcactctgcccattggtatggccagcctctgcaaggacagcagaggggtagaggagagatgggaaagtgaacccagctagtcagggagaagggcaagactcatgaacacattggtgggcaggaaatagccatgggctgaggtgcccatgtccagggtccaatgcatgatggagctgggactgggggtagggggaaagcagagctctccagctctgccccttgggcaattccttcccctttgtgggcctccgtttctcactccataaaaagagaaagattagccctacccagaggcacctgcttgccccaagggatgctgggaggcctggatggtaattgaggacctcttggaagaagtggcactgaggatatggatggggccccctgcagatgagtccaacaccatccacttgaaggtgattgagcagcggccagaccctccggtggcccaggagtatgatgtacctgtctttaccaaagacaaggaggatttcttcaactcacagtgggacctcactacacaacaagtatgccatccctccctgggtatcatcacctggggctggccacagccctggcctcatcctgtttcttctgaccttgtcccactctgcccagatcctgccctacattgatgggttccgccacatccagaagatttcagcagaggcagatgtggagctcaacctggtgcgcattgctatccagaacctgctgtgagtgggcctacagtcatacctgggacaaggtcaccagccagggaagacctcaggggccctgggtgtgagggttgggaaggcatggtcctcagaagctgagcacagctctctctctcaggtactacggcgttgtgacactggtgtccatcctccaggtaggtgagttgggtttggttaagtggagagtggatcatgtggctggaccagaccagggctgtgtcagcttcccaagcccctcactcaggcccctatgccttctgctaccctctagtactccaatgtatactgcccaacgcccaaggtccaggacctggtagatgacaagtccctgcaagaggcatgtctatcctacgtgaccaagcaaggtagtggtgggttctgggggaagccatcttggggagggcagggccacatgatgagctgatccctggcacccacagggcacaagagggccagtctccgggatgtgttccagctatactgcagcctgagccctggcactaccgtgcgagacctcattggccgccacccccagcagctgcagcatgttgatgaacggtcagaggagaatttgctggggcatttgggagttacctgagggaagctagaccctttatgtctctcaggagccctggatcatggggcactgccaatccaagcaggcttcctggagatgatgggctacagagacaaaattgaagggagactacaggaaagggttggcctgcctgaaagaaggcctggccagggcgtcaccccgtcctctgatcctcaccctaggaagctgatccagttcgggcttatgaagaacctcatcaggcgactacagaagtatcctgtgcgggtgactcgggaagagcagagccaccctgcccggctttatacaggctgccacagctatgacgagatctgctgcaagacaggtggaggcaggcgggcagtcagggtgggttcagggcagggtggccaggccaaggccactgacctctcctccaccaccccacccaggcatgagctaccatgagctggatgagcggcttgaaaatgaccccaacatcatcatctgctggaagtgaggctggtagtgactggatggacacattgctgtgggtagtccctcctactaggaggcttgtcatactgtctagaggttgactcttagttctgtaaataaagacatccatttcaaacagcctttattgagtgctgtttctgggccagccgtgggagacccagcagtgaatgaaatagccacgagccgtgggctagatcgccatctggtgggcaggaccgacaatcgacaaataaaagtgccggttaattacaaaaaaaaaaaaaaaaaaaaaaaaaaa

SEQ ID NO: 12416 - DNA, 10273 bp, Homo sapiens
cccaggtttccattgcgcggctctcctcagctccttcccgccgcccagtctggatcctgggggaggcgctgaagtcggggcccgccctgtggccccgcccggcccgcgcttgctagcgcccaaagccagcgaagcacgggcccaaccgggccatgtcgggggagcctgagctcattgagctgcgggagctggcacccgctgggcgcgctgggaagggccgcacccggctggagcgtgccaacgcgctgcgcatcgcgcggggcaccgcgtgcaaccccacacggcagctggtccctggccgtggccaccgcttccagcccgcggggcccgccacgcacacgtggtgcgacctctgtggcgacttcatctggggcgtcgtgcgcaaaggcctgcagtgcgcgcgtgagtagtggccccgcgcgcctacgagagcggaaggggcagccaaggggcagcgcagtcgccgcgggtcaagtcgcggcagagggggtcggcggggacagctcccgaggactaggtccgttactttcgccccatcgctgaagagtgcgcgaaaatggtttatcccttgtcgcactccactcgtatctgggccacagatgagcagaggtggctgcttatatgtaaaaatacgctgattttaagtttcttatctttaaaatgccttggcccttcttgagaaagggtttgtgcctactgtcctcggagtccatcttcccaggcttgcctcttctcaaacactcatgaccccctccagaacctttagggtgaagggaaattaccacctatgggagggagcctggaaaaatttagaacctttggtgggccccctgcaagcaggagttttgttgagtctttatttagcaaacacccttttctgacccagtgaatcagatgctaaaatatgcacgcagccacacacccagcagtccttctgcacccctgggaatcgccagcaagcaaaggttgctctcccctgggtagacaccagctggaatcaccaggggtgcttttacagtcctccccgctagcctggatcccaccgcagacctgttgaatcaactgctgggagtggaccctaggcatcagtaaattttaaaaactccccaaattattgtaacatggagtctgggttgagcatcactgctctggcctatttaggaacttgtggatggatagtgtcccaggtctgtgtgtgcatggagaccctctcatccggtacaagaggacatcacaaattcagctggggggagcacaaagttgtgacagaatgcaaagaatgaacaaggggccgagcgcggtggctcatgcctgtaatcccagcacttcggaaggcggaggcgggtggatcacctgaggtcaggagttcaagaccagcctggccaacatggtgaaacctcatgtctactaaaaaataaaaaaaaatgagccaggcgtagtggcgggtgcctgtaatcccagctactcgggaggctgaggtgggagaattgcttgaacacaggaggcggaggttgcagtgagccgagatcgtgccactgccctccagccttggcgacagagtgagactctgtctcaaaaaaaaaaaaaaaaaaaaaaagaacaaggctgggacattgcagcgttctcaaagagaaataaagtagccatggagataagaagcaggatgatttgggcatgtttatcagaggtagagacaagggagaaatcaaagataagtttgggcttttgtctccagtaactgggagcctagtggccatttttgctgcaaagaggaagctgggcaagtgtagcagtgaggctgaagaaaagggaattaaattttggccatgttcacttgaaacgtcttttagacatcctagtgaaggtactggcacggaggatctagtctgagggtttaggtcagtgtttcagccgtggatctggggcagatgaatgtagacagaccaggccagtgatcaggactgagcccagacttcatcgtgagatatggaagttgagtcagaatctgcaaaggagctgagcaggagctgcagggggtaggaggaaaactgggagagtgtagcccctgggagtcaaagggagcaagcttcaaatgatgctgagggggtgagaatggagaatggaacactggattccatttggtagtacacagatcgctgaggaccctgtcccgggcagtttcctggaggaagaggcaagcctggctggagtgggtagaggggagagtgaaggcgaaggattagagtgtatagagaccagtgtcttggtctgaggggagtagagacaggtgacaaccacagggcagacgtaggttaaaggtgtttagtttttccttcaagtaaatgggcagatgtattccatatacgttcccagtgaagggccgggtgcggtggctcaagcctgtagtcccagcactttggaaggccgaggcgggtggatcacctgagatcaggagtttgagaccagcctggctaacatggtgaaaccccgtctctactaaaaatacaaaaattagctgggcatggtggcgggcgcctgtaatcctaggtactcaggaggctgaggcagaagaatcgcttgaacccaggaggcggaggttgcggtgagccgaaatcgcgccattgcactccagcctgggtgacaaaagcaagacgcagttttttgttgttgtttttttaattgccaatgaggaaaggggaagttctgtgctaggcgatagagatccaactgttgagcaggcctctctgcctgtggccttccggccggtttccagacgcccaggtggccaacattagagtccgcgtagcagtgtgaggtaacccactgagataggtcgggcctgcggagcctggcgagcagcggccctctccctggggcttcccttcaatctccgggacatttccccgacctggagctcctccgcctcaccgccaggcctctctgcagattgcaagttcacctgccactaccgctgccgcgcgctcgtctgcctggactgttgcgggccccgggacctgggctgggaacccgcggtggagcgggacacgaacgtggtgagcgcggggccgagggcgtatgggaagggcgaggatgggcaggccacagtgcaggcattctcgagggctgcctgggtgccgcgcgcaaggagcgttctaattgccgatttcccggcggcacagagaggctaattctgcgcgggggctgggaggggagcctggattgccggctccgcaagtactccacccgctgcaagcggacccgggcccaggctgacccaggctccgcgcacgcgcacttcccgcaccttcccgccctcgcctccggccagaggccactcttgtgcgcttgcccggacgctggcacccgcccccgttccctgtggtaggtggggtctgtgagtggagctccggagcgatgaggtcattcctgggggcgaagcgtgcgtgtccccgccccggcgttcctgccccaatgagacaagagctagatcccggcgatctacgtttcagtcttaacggttgcggcgcggctctggcccgggcgcacgcgcacactgacacgcgtacacgcacgcacgcgaccggggcggtggttggcggctacggacgcgcaggactgggggacgggcgggtacggctatgggcgaggcggaggcgccttctttcgaaatgacctggagcagcacgacgagcagtggctactgcagccaagaggactcggactcggagctcgagcagtacttcaccgcgcgaacctcgctagctcgcaggccgcgccgggaccaggtgggagccagggggtgccggcgggcgggaggggaagcggtcgctggagctccgccctccccggtccgttgccgcgtcctgggtcggtgggcagccccaccctcctggctacgtggctccccgcgggtcctggccggggacctgcccgcggaaccgtgcgtaagaccccgattccaccgcctagatgctgggtgccggggcccccttggtttctgtcacagacaggttgaacacggaaaaagcagctgtatggcttgtggtagacctgagccgggcattatccagctatgactaaagccgaccgagcagtttggactagcacctcgatttccgcgttcgaatgctcctgctccctccttggggagactaggggaggatgtggagagggaagagtcctcgccaggaattgagaagtatgtttaggaaaacttgagaggcagagagagatcctgctcctccatctgcactcctgtatggagccagctgagccctcacctcttccctgttctggcctgtcaccagctgctggaatgtggaagattctgttcccttcctctagggtggatctggagaaagatttgggaatagataggaaagaagtcttgttttggaccataagcattcaggagcactttacccacaggaagggggaaagctagattataaaatgcctaaagaggtggaaaaagagatccaggttactaacccaggactgtaaggtgtctcggaacctcctaggtatccccattatcggagaactgtgtgccagatgccattggtgtgaccaccaggctcagagaaccaggcctaggcaccaggaaaaagaaacagggactgtgaagctcagtatgcctggcagaaatggggcggaaatccttatttaagtaaagaaagtggagttgtgagtgatgcttcagataaaattttacaaaattccttacaaaatgggtggtgctcagcacgccaaaatcttagcccagagcttgggtgcaagggttgagttgagtgtagacccctgggcttgtcttcatgtcagtcagtcctgagccattttccactgtggaaaggtgggaaaaccacaagacactaaccaattgaaaaggagggctagccacggaggtgcacacctgtaatcccagctacttgggagggtgaggcagaaggatcacttgaacctgggaggcagaggttgcagtgagccaagatcgtgccactgcactccagcctgagtgacagagtgagactctgtctcaaaaatagaaaaggaagccaagtacggtggctcacacctctaatgccaatgctttgggaggccaaggcaggtggatcatttgcaatcaggaattcgaggtcagcctggccaacatggtgaaaccctatctctactaaacatacaaaaattagccgggcatggtggtgtgtgactgtagtcccagctacttgggagactgaatcacttcaaccgggaggcaaaggttgcagtgagccaagatcgtgccactgcactccaacctgggtgacagggtgaggctctgtctcaaaaaaaagaaagaaggctgggcttggtgactcatgcctgtaatctcagcattttgggaggccaaggcaggcagatcacttgaggccaagagttcgagacctgccaggccaacatagcaaaaccccgtctgtactgaaaatacaaaaaaattatctggccatggtggtgtgtgcctgtaatcccagctactggggaggctgaggcaggagtatcacttgaacccagaagacagaggttgcagtgagtcgagactgggccactgcattccagcctggatgagagagcaagactctgtctcaaaaaaaaaaaaaaaaaaaaagaaagaataggaggctgagaagtcccaagttatatgttaaaaaaaaagaaaaaaacatcagttttaggccaggtgcagtggctcacacctttaatcccagcactttggaaagccgaggtgggtggatcatgaggtcaggagttcaagaccagcctggccaaaatggtgaaaccccgtctcgactaaaaatacaaaaaattagccagttgtggtggcaggcacctgtaatcccagctacttgggaggctgaagcagagaattgcttgaacccaggaggcagagattgcaatgagccaagatcgcaccactgcactccagcctggaaaacagagcgagactctgtctcaaaaaaaaaaccatcagtttttatggacagtggtagagtggagggtgggtccctatggtgcagaagggaaattccatggtcctgctgtgcatccgactgggatggctgttgaaatcctcttccagcaggcagctttggaaacagaaaaagaaactcttcctcctttagaatcctggaagggctgtgcagtgcctctaatccaagtctgttttctgagtgaagatagggaggttcatcaccagaagggaaggggctggaaatgaggtcactgcatcccagcccagggctcctgggtcatccaggaagggaagaaggagcaagctttctcattgttaggtaggagctcagagccatcacaagaacaagttagcaccatccctgtgccctccctgttctgcaaacaaaatgatcttccttcttgccctggcactagagtctgtctggcatttctcctgcccctagtactcctcccatctgggtacttcttcccgttggtgtactgaacaaacacatccactgctttattcacagcctccagccctcattttccagggcccacaccatttgtttttactaacccgacaaggttgcccactgtccccagtaaggtttgtactggggtttttactccagtgctcttctccatccaggagacctttggatacttggggaagaaaatgagcttaaattcccacccctccccctttacctttttcctgtaaggccctggccttagttcttagccccacatccttgctggctgcagaatagcagcgggttctgggtaaggagcattctgctaaaacgctccaccctgctccctcatctgtcctctccatttgtccccatcagatggtttaagtgcttaaggggactccagggcggagtcagggagaaccctggctctcctgggctaggcacaagatcattctacaggaaaccttgtgggaattcttctgggacaaagtattggtcagcgctgagcttagctgtgtctgtgacactcgcattctaactagggcctatctgacgtcaacaggaagtaaggctgatgcagtggggccaagggagtctgggagaagaaagtcggttcagagccctggctgccctgtcccacactccacccttccggcaagaatccagtccctagatgaggtggggagtgagtggtcgagttaaaaatctctgggtcgggtacgatggttcacgcctgtaatcccagcactttgggaggtgaaggcaggcggatcacttgaggtcaggagttcaagaccaacctggccaatgtggtgaaatcccatctctactaaaaatacaaaaattagccgggtgttgttgtggcacgcgcctgtagtcccagctactcgggagtctgaggcaggagaatcgcttgaacccaggaggcagaacttgcagtgagccaagatccagccactgcactacagcctgggcgacagagtgaggcttcgtctcaaaaaaaaaaaaaatctttgggccaaatctccagacagcacaggcaggtgcagaaacccaccaggaagctgcctgtgtacctctggcagattggagcctggcctaaagctgccttttatgcagcttgggtcaaggttaaacatcatgtcacagtgatttttctcactatgtgtgagacatggagaactggctccaagtactactctgtccactggtggctggactactgatgtgcaccactctccactcctctcaccctgcagtgggtcatggccccgtgccggggcagaggagaaaaatgggctgccttctccaggacaaaccctcactccaactcaactagggtgctgtgatcagaatgtgcaattgaggtgtgattttactgattttttttttttttgagaccgagtttcgctcttgttgcccaggctggagtgcgatggcacgatctcagttcactgcaacctccacctcccgagtttgagcaattctcctgcctcagcctcctaagtagctgggattacaggcatgtgccaccacgcctggctaattttgtatttttagtagagacggggtttctccatgttggtcaggctggtctcaaactcctgacctcaggtgatccacccgcctcggcctcccaaagtgctagaattacaggcgtgagccaacgtgcccagcctgtttttgttttttgtgttttgaagcagggtctcactcagttccccaggctggagtgcagtgacacgataatagcttactgtagctgcaatctcccgggctcaaacgatcctcccacctcagcctcctgaacagttgggactacaggcacaccaccacacctggctaatttttttttttctttttttagtagagatgaggtcttgctatgttgcccaagctggtctcaaactcctgaggatcaagtgatcctcctaccttagcctcccaaaatgctgggattgcagatgtgagccaccacacccagcctgattttactttaaatgagagtccctcttcagagtccctcagctgttcctggcccctggccatgtgccttcagttgcccctgcttctgtggtatccttaaggctacattcagtgctgaggccctaggcaggcagcagagagaagccaaatgattctgtctttcccttatccacccagagcatgcaaaaccaggagcagtggtgggttcagggtgggcaccagctatgtatatgtacatcagggacagggggccaaaggcagtcagtttccaaagactgccccagaggccatttttcagagaagccctgggttcctcaagggccctgtgtccatgctggcccatcttgcaggacgagcctgtggagtgggagacacctgacctttctcaagctgagattgagcagaagatcaaggagtacaatgcccagatcaacagcaacctcttcatgagcttggtgagttgactgctcaggaagggggcgtggggaggagcaggtacccagctatgtgcctgatactcagagggtcacaactgaggttatcttgggtgggcgcaagcagtaatttgtgcatacccagcctagccccaagtagactgacatctcacctggaacctattatcaaggtttggtttctctatttctttagaacaaggacggttcttacacaggcttcatcaaggttcagctgaagctggtgcgccctgtctctgtgccctccagcaagaagccaccctccttgcaggatgcccggcggggcccaggacggggcacaagtgtcaggcgccgcacttccttttacctgcccaaggatgctgtcaagcacctgcatgtgctgtcacgcacaagggcacgtgaagtcattgaggccctgctgcgaaagttcttggtggtggatgacccccgcaagtttgcactctttgagcgcgctgagcgtcacggccaaggtgggcttcccaccccaccctgccctatgtgagggtatatacgcatgcacctgagcatgcaggggctgagcagctggccctgtctctgatcattacttccccttcacagtgtacttgcggaagctgttggatgatgagcagcccctgcggctgcggctcctggcagggcccagtgacaaggccctgagctttgtcctgaaggaaaatgactctggggaggtgaacgtgagtacatagttcttagtttcttggttgtcactagacaggactgatgggctgtagctacagtaaggcttggaggaggaattgtgctggaagacaagccctgcaaaacagttccaggagtgtataggcattgtaactaaagcaaaggcttccagaccactcatgccaaagcctagggttgtcccaagaagccaggaagaattgccttggtgctttgatctttcctggtgtggaaaatcttctggagatgcaggagtccatctaatgacatgaggaggcccccttcagactttttacctggaagctttctggctccaaggtattaggcctgtggagtgaaattagactcagaatatgcctgacctgtccacaggtaattggggaacatctgacttggttgtctcagtaaggtgaccgttttgtagggcccatcttccatacaaactgctgtcagggatcctaccagagatcattcagccaagagcctgacatcagaaagcccagtcctagcttgtgtgaacatgaggtgctagtcttctctggggagggtctgctggcttggccatcccttctgcagcctgtacactccccttttgccccttgcagtgggacgccttcagcatgcctgaactacataacttcctacgta

SEQ ID NO: 12417 - DNA, 13361 bp, Homo sapiens
gctttttcctgggatagcgatggagacgccgggcgcatcagcgtcgtccttgttgcttcccgccgcgtccaggcccccgaggaagcgcgaggcgggagaggctggggctgcgacgagcaagcagcgggtcctggacgaggaagagtatatcgaggtacgacctcggtgcggacgccggcgacttctgggcccatcctctgcttcaagctcctctcaggttccctctctcgggtgttgacactccgtctcctcgtggaagtggaggagccgggtgtggacggtcccacgagtcaagtaaacagggcagaggaagacgtctgtggtggaagaggctgtagtagtgttgtcagggaaaagagagagcggctctctttgtatgggacgggggtcagggaaagaagattttctgttaaagtgtgagtaggagtttgacaaactggaaggatggtggcaaagagggctttctaaagagcggtggcagcaagtgtgaatgctggggttcctggaaagagaccgcagttgtgacagcatctcgagtgagtggacctgcgtcgccccaccacacgcacacagaaggaggagctgaaacggggattggcggaagtcagtttggttttagacctgtttaattcgggacaccttttgggatatgtagatggatggctttaacggacggttgggtgcccagatatgcagctcgggagcaaggtctggctggaggtgcagacttgggaatctcaacttgtggtagtgactggctgaagttactcaggaaaaaggtttatttttattttattttttgagacggagtctcgctcgtcgtccaggctggagtgcagtggcgcgatctcggcttactgtaaccaacctctgcctcctgggttcaagccattctcctgcctcagcctgccgagtagctgtgactacaggtgcccgccaccacgcccggctaatttttgtatttttagtagtggtggggtttcaccatgttggccaggctggtctcgaactcctgacctcaggtgatccgcccgccttggcctctcaaagtgctgggattacaggcgtgagctaccatgccccgccaggagaaaggtttagattggaaatagaaagtcatgtgtggaatgaaagtgacaacacccacattggtctggcttgtggggagccagcaatggagaatgagaatgaccagttagcaagggcgagagagaagggtttcacggacttcagaagagtgtttagtaatgttagaggttgcagcatggctaccatatgggatgctcaaccccactagaaagtgccctcaagctccctcaatccagccccagtcattggggaagtagaatttgaaggaggttcagcaagttccttagcatgtacagcagtggacctgtgaggcaggagcacccagactgcagctccgactttcttttttcttttttttttttttttttgagacggtctcgctctgtcgcccaggctggagtgcaggggtgtgatcttggctcactgcaacctccgcctcccgagtttaagcgattcttctgcttcagcctcccacgtagctggaattacaggtgcctgccaccacgcccggctaatttttgtatttctagtagagactgggtttcaccatgttggccaggctggtcttgaacttctgacctcatgatccacctcccttggcctcccaaagtgttgggattacaggtgtgagccaccgcgcctggcctctgactttcattctgatctctccttgcagggcctccagacggtcatccaaagggatttctttcctgatgtggagaagctccaggcacagaaggagtacctggaagccgaggagaatggagacttggaacggatgcgccagattgccatcaagtttggctctgccttgggcaagatgtcccgggagcccccgccaccctgtatgaggaccctgtgggtggcggagaggggaaagcctgctgaactgtcgcttcaggctcactctaattcttatccccctctcttcccctagatgtgactccagccacatttgaaacccctgaggtgcatgcaggcactggagtggtgggcaacaagcccaggccccgcggccgaggcctggaggatggtgagtgagggtgccctctttaagtcacatggtcaggattgcctgggaatcttagcctgtgaggccctgagggggtggtccagagggctgcaggccacatcttgttcctgaggggtcttgcgtaaatagcagcctgtgaagtcaaaggacattggtctaggtggtagaacatctgggtccagctcccacacatggctcgcctctgtgaaatgggactctcaccagctcttgctggcttttctgctgtgttccagccctgccctgtgggcttcatggatgttggaaggccccttttgttactatcctgaagatgcctcagggcctctccatttgtttccttcatgttggtcacttcccagataactgcatggctcactgtgtttcttcctgtagatctctgcataggtgttacctgttcagagaaacttttcttgacctgccagtgtgaagtcacaacaccactggtgctctgtggcttccagcctggctttggtttttcatcacaagacattttattttatttaatttcattttatttttaattttttgacacagagtctcgctctgtcacccaggctggagtaaaatggtgtgatcccggctcactgcaacctccacctcccaggttcaagcaattctccctgccttagcctcccaaatagctgggattacaggcgcctgccaccactcctggctaatttttgtattttgtagtagagacgaggttttgccatgttgtcccggctagtcttgaactcctgacctcaggtgatctgtctgcctcggccccccaaagtgctggtattacaggtgtgagccaccgcgcctggccaagacataacgttttaaaggcatttctgtttatggtctctttccctaattggcatcccttgcacaagagcagaagctttgttttgctttcatctgtatgctccgtgttgggaacagcacatgtggtgttgtgggccttgcacagatacacatggaacagatgaaagagttgtcatcttcagcatgtttgctgggacacacagctctatatggtaacatcgtgacttgatgggggagtcggtttaggaaagggcactccgagtcctgttgaatgcaagtgttctgcacgccatgggacttctgcgttgtcaggccctcttttcatcagtagtagaatgtcagtgcatgtatagacaaacgagacactctttcttatcagtttgtagactccactgtgctggagtagcacagatgtgttgtgtgtttgcacaaacatgcaaacatgatactttttgctttacaatccagctttttcggccattaacacagtccttgttgtccttgaagcttgattatctgttgaaatgtagcttgtgcatcacagggcaatttgtagatttttttcttctccttttttttttttttcctatagagatgaggtttcattatgttgcccaggctggttttaaacttctgagctcaagtgatcctcccaccttggcctcccgaagtgctaggattacaagtgtgagccatcatgcctagccagtttgcagattttcaatacctgtacacctacatgccagtaaatataggaatccttttcagaacctaagtggtaggaaccatcatcatgtttacaggtgaggaaactgaggctcagaaaggcagtcacttctgcaggtctcagagatggtcagggtttcacttcttatctctctgagatgaatagagtttctgacccctgtcctcatcccgtgggtcttgagcttgtagccactgtgccttgtgcatagcctcacgtgtagcaggtggtcaggactgtcactagacttgaaggcagagctctccaggtggccccaccgaagtttgcaccaccacacgcagcaccagggcaccacctcagtgggagtaccactttccatggtggcagggttggtcggaggggggggtgtttggggttgtggcttagcacctgtgaggccccatccagaggactaagtcatatgagatccctggaattggggctcgctctcaggtcaggatgattaggcgatgaccacccacctgtagtacaggtaccaggaagagaagagtgggtaaggtaaggaaatcctagggagtgagggagagccccagggatttggaggcctggcacccacaggcctggcaccactttggtgggggaggagcctgcctgtgatcacgagctcttgctctaacacctgtattgctttctccagtctgaatcagaccacgtaattcccttggcatccagcacatgagcagagctggccctgaatctgtagggtaccacctgagggctctctgggcagtcagggtgggtggattctgcccccgtggggagtccttggcagtgtgggctttcatgggcagaagccaggaccaggggagaggattccagccctgcatgttgggggctatgattcctgggcctgggtgtcctcctctttcctgactgcaaagggtgctgtgttcctcctcccgcaacccctaagcaggagaggctggagaggaggaggagaaggagccgctgcccagcctagatgtcttcctgagccgctacacgagtgaggacaatgcctccttccaggagatcatggaggtggccaaggagagaagccgggcacgccacgcttggctctaccaggctgaggaagagtttgagaaggtgtctctggggtctggggtgtcacataggcgtaggcaccctctgtggtggttggggagccccagggccatgggtacaatgcccaggggcatctctgaccatcacttttccccatgtgattgcagaggcagaaagataatctcgaactcccgtcagcagagcaccaggccatcgagagcagccaggccagtgtggagacctggaagtacaaggccaagaattccctcatgtactatccagagggtaagtggcgggcctcgcagccaaatggggaggtgttgggtagagctgtgtgtgtctggctgtgtttggagcagccttccaggtgtgtatggccgtgcccccttgcagtttgggcttctgatgggtactggtctgtctaagggtggacaggtctgtgtgaggtcagcagtgagtgagaccctctccagcggcactggggcctgcgttctgctcaatgcttttgttcatctgggagtgacttggccgagaagcgagctcctcatgctccttaggctgctgcccttctgacacctgctgctacctttgcttcgtctgccaggtgtccctgacgaggagcagctgtttaagaagccccggcaggtggtacataagaacacgcgcttccttagggaccccttcagccaagccctgagcaggtgccagctccagcaggcagccgccctcaatgcccaggtgagcaggcgggtcagcagggccgcatgggccaggttggacagggctgcctgggggcaggcatgatctctcccatctctttgagcttggcagagctcagtgagtggaaccatctggggccctgtgcggcaggatcctgagtctttccttggccccagtgggcttccattgaacactgccttggtcacacacgttctgtaggtccagatctgtgccagctcccttgatggcaggggcaggagagaaaagggactgctgggagtgagcccaggctggcagctgcacgcccacacaccgggcagggaagccagagagccgcagagggagcccagccccagggggtggctggggtgggacaggccctgggttggcagagagcagaggctttctgagtctgggagcaagacgagtagatactctctgatggtgactgtggcagtcacagggttgaagtggggaaggcaggaagagactagagcataagcattgcctgtcatcagcattgcctgtcatcagcattgccccctgcaggggcctggcgtcagcatcctctggagttgctgggataggcgcagctcgagtggaggccctggcacctccctggatgggaggagggggctttccttgcttgggtacccactttgacaggccctcaaggtcttttggggggttggggcaggggccctccctctctttctccaagaaggctgccaaccccagagccccagccttgccctgaggagaggaagtgtttccagcatgttcccacgtgtttgcccaccggccagctgtcgagcgtgggctgcggtccccctgatgccagcctctctgcttgttccagcacaaacagggcaaggtgggccccgatggcaaggagctgatcccccaggagtcccctcgagtgggtggatttggatttgttgccactccttcccctgcccctggtgagaaaagtgcccactggcaagtgggtctactgctgggactccctgggggaggtgggcttctcagtcggccctggccactcctggcctctacctggcctgccccacaccttgtgtaactcagggacctggtctcctgtctgtacaaggccctagaggccaggtgtccaggctgcttggggccgtgggtgggctggactctcaggcagacctggcctgagacatcctgggatgacgtgtcctgtcctggtccttactgtgatgtcagtgggtgggggtgtgtgcacagtgcttatgagtctaagtctacctagcactgcagggagggaggcccagcacctcagtggaggtgaaactcaggtggtcttgtggcatgcgtgggtgtccctctgcactctggcctctgtgctcttgggtgctggtgctgtgtcacacgccagggcatgtgaaggcaccacaggtttgcctggggttctaggaggtttgggagccctggaaggcctgagtgtctcctcctgcgtggctgggggagacctcccagaggcttgtaggctaagcacatggctgtagggccttgagcctgcctcgggcctgctgggagcttggcatttccctttcggaggatggaggtgccagggttccagagtcctggggaaggagagagggctagctgcctgccttcgtattagctgggatgcacattgggtgaacaagctgtgactggaggggagggtggtggggagtcctctggcctgaggtggttttgggctctttgtctgcaggtgtgaacgagtccccgatgatgacctggggggaggttgagaacacacccttgagagttgaagggtcggaaacgccctacgtggacaggacacccggcccagcttttaaggtgggttgtggtgatgggggaactgtgtgcgaccggggtggacacctctggagccctgagtgcctgtggctcaggactgagcactgggatcggcccccagctgctgacgggcagagtgctggcttttctgaatgccagggtgctgaaggcaggtgtgggtgggtggacctgtcacagagggatttgggggtgtaagggctgagacaccaaggcagggagtggcttgggccctctggatcctggaggccgggtgctgttcatgaatgaggcaggatggtcacagacacgtgaggagctctgcaggcctgagggccataggacgaggctgtgtgcttgtagagaaggcccctggttacagaacacgattgggacacgctggattacacggctcaagcctggtgttgtaggagtggtcagggtggagtgtgtgaggcccggcacagaccaggggaggctcttcgtgggctgggtcagatacaacaggcctccccataccactgcgggcctttccccagaatacttagtacaggtaacccatgtccagacaaaacatggggagaggttctggttaccttggttctaaattgtctgggacacaaggataaccaaggcaaacgtgcgagagggataatgaagaggatgccgtgctgtccaatgtgagagcgcaaggcaagggctgaggtgcttctgaggtatgcctgccactgcttcccgagtctccaggccaacagtaaacagataaattctgaaacaaaccatgatccaagtcagaatttggggcccgataaagatggcaactcagattgcactgaatagcagagtatttagaaatgaagggagctgggtcctcaggatgtgtagcagcatacattgtggaaaggtgaaaaggttacatgtaaaaacaataaccataaaacaaccagaagaaaatagtggcgaatatttagtttgatttttgggttcaagtgattctcctgcctcaacctcccaagtaactgggactagaaaatagtggcgaatatttagtttgatttttgggttcaagtgattctcctgcctcaacctcccaagtaactgggactacaggcgcgtgccaccacgcccggcttatttttgtatttttagtagagatggggtttcaccatgttggccagactggtctcgaactccttggccagactggtttcgaactcctgacctcgtgatccacccacctcagcctcccaaagtgctgggattacaggcgtgagccactgtgcctcgcctcttttttttttttttttttttttttaacagatagggtttcactctgttgcccaggctggagaacagtggtgcaatcatagctgattgtaacattgagctcctgggctcaaatgaccttccagcctcagcctcctgtgtagctgggactaacagcatacaccaccatgcccagctaattttgtgtgtgtgtgtgtagaaatgaggtcttgtcattttgctcaggctggtctccaatgcctgagctcaagtgatcctcccaccttggcctcccaaagtgctgaggttccaggtgtgagccaccactcccagcctgtagtctaatcttaagttaggagggactttctaaacataaaagcaaaggaagaaatcacaaatgaaaataacaaatacagcagaaaatgttataaatgaaacaaatgtaaatgagtgaaaaaacatgtgcacagcgtagcacagttgacttgacacaaggtcttggcaagggtcttctgagtaacagcagcagaaaaggaaaatgagccccttgagagcaaaataggccacaggcacacggggaagcgcccgaaatacagagcgccgataaagacagagatgttcactctgataatcagggaaacactaaaacagactgctttttcctgagagattgtcagaggtcatggttttgggaggaacacgaagacaggtgaggagtgctgcgccttgggcaggtcaggtggggtttggggctttccaggggcttttagtgggaggtgatgggttgtgggggttttgtaggcaacaaagagaggctggcacccaccacagtggctttctgtgtgaggggctgcctggcgtgtggcaggcctggcgcagctacccacacacctgctaccttgtagatcctggagccaggccgcagggagcggctgggtctgaagatggccaacgaggccgctgccaagaaccgggccaagaagcaggaagccttgcggagagtgacggagaatctggccaggtgaggggccgcctggctggtggggaagtgcgagggtggctctggcctgctcctgttcggcccctgccctgaccgtgtggaggcatggcccacgcggcagagtccagggcaggtccgcggggttctgcagtgggtactgtggcagctcctctatccagagcatggccgcacatggacaggatgagaggccccctccatcttctctttcctccacgtcctctttgacccgtccctaagaggcatctttaggcgtgtggtcctgctgggagctttcatcagccctgtggagagagtcatcgttccccttggagaggggtggggactccaactctcagaggcctgggggtgcaccccagcccccacagccaagggcggtgctgctgtttgacctcaggtttgacctgagcgctgctgtttgacctcagggatcccccgcatttgctgccatgctggcagtaccatcctcctcagctcagagtgactgtgtctctgcccaggctcttcctgggagccaagggaggccctgctgccggcagctctcagcccacctaaccctgcctctctcacccattcctccaccccagcctcacccccaaaggcctgagcccagccatgtcgccagccctacagcgccttgtgagcaggacggccagcaagtacacagaccgggccctgcgggccagctacacaccatccccagcacgctccacccacctcaagaccccggccagtgggctgcagacccccacaagcacaccggcgcctggctctgccacacgcacccctctcacacaggacccggcctccatcacggacaacctgctgcagctccctgcccggcgcaaagcttcggacttcttttagagccaggcctgggctgggctcatagacgcttcacagagcctgcagggcagctgtacacccagcagaggactccagccttctcggggcccaggcctgggccagaagctgttgaccataccaggagtcactggagaaaggggctgtgctggggccagactggcacaaggcactcgtgcccacaccacaccccagggccttgccaagctgtttgctgtttaattggccccttgaactgtcattaaagaacacctaggtacagtctggggggttgcctctccatcttgctccccacacgagccctagccttgccctggggcctgcatcacgtctcaggactgcggggcttgaagcgaggggccccccaggtgaggaagctgcaggtggggcggctgtgggagcaccgggtgactggcgttgctttctgcggcactcggaacctgtgttctgagttgagctcacatcctgcagtgctttctgcttctctggggggatatgaaggagaaacggagcccttggaagttgtacccttaggttcccctgcggttctgggcccaggtctgcagcctccactctgggcttgccggctgtgaggtgcgctggttataggactgtgtgggggctgcatatcaggtgatctcagctatcaccttctcccagcacctggcttccagctcatggggtgggactatcccactcacccctctgctataggcactgcccatcttatgctgctggccctggcctcacctggtcacttccaccaacaggagctcccagataacagtgggttgctggacagatcaggctgggactcttaaggggtgggggacgtggggccttcagtgctttatcccctaggaaagggtgcacgttatcccaagggagcccccaggaagtggggagggaggggggaggagcatgtctaggtgctgaccacctggagcacttggccagcaagtgggccgcatgctttgggagcaatgggtgacccagcaggaagcacaaaagaccggccagtgtgccatcatcaagggctgctgagcagcttgaagagccactgggtggggagggcacacggggaggtctcagctggggctgcccctggaggacagggcagggaacttgagggctgaggacagaaatctcacatgactccaggaaatagaggaagaggaggatgctgagcgagggattgtgagggagtgggggtaggtcagagggggctgaactgcaggaagccagggggagtcgtggaccactggagctggccagccccagggcattggggacaaggccaggtcagagggagacagtgtgggcctggtgggtggaccctggcagaggccctcttgtcccccacaaggccaggccacactgtgattctgcctgtacctgagcatctgtcctgtgctcctaggccggagaccactgtgtgtcaggtggggcggttggctgagtcccagagaaaaacactcctcactgggcactcttgatgcttgcacacaccctgtggtttatttggtggtcagtaaggaacgtctttgctgctaagtggaagaaagctaatggaacgtaatcaaaatagtggtttaattgacgaattttacttgcacctgtgccttcttcagatcctacctgcctacttagtttacgtgaaggccgactgcaccatgccccccaaccccgacccccaccacacacaacggggccattgtcatgctaggtgcttgctttccccacctcagctccggagatgtgatggtctttggccctggaggtctcggccagcctgtcctccatcctgttctcgttctcgggcaccaccagcagccggtgctgggttttggctccaagcttgtggtcgggccggtggtcgggcctcaagcctgtcttggtgtccagtttgcactcagcgcggtacttgccctccccctccctcttgaaggaggcagaagacgtggctttgggcttggggggctgcagccacgagtggctgaggatctcatcgatgtggagccgctggctgacgtcgggctgcagcatgcggtagatgaggtccttgcactcgcaggtcaggttcttggagcgcgggaagtccacacggtgctccttctggatacgcagcatcttcctgatgtcggagtcgtcatagggcatggagccgcagaccatgatgtacaggatcacgcccaggctccagatgtcatacaccttgggctggtaggggatgctctgcagcacctcgggggctgcatatgctgccgacccgcagaaggtcttgctgaggatgatgcgcccattgctgtcccgcaggcagcgcttggagaagccaaagtcagacagcttgatgttgaagtccttgtcgaggagaaggttctcgcacttgaggtcccggtggacgatgtccaggtcgtggcagtacttgacggcggaggagagctgtcggaacatcttgcgtgccacgtcctcatgcagggctccctggcacttgatgaactcgaggaggtcgccctggacgccaagctccatgatgatgtagatccgtccgtcagaggtctcaaagatctcgtaagtcttgatgatggagccgtggttgacagttgccaggatgtccatctcccgaggaaggaatctctccacaaagtcagtaggtgttttcttgcggtcgatgatcttgacagccacattgaacttgaggcgctcagagtaggcagatttgacttttgcgtaggaacccttgccaagattgatgcctacgatgtaacccttcttccttaggactgtggcatcgtccatggtgccaggagcgactggcgccgctgccgtctacatccccccgtcatgtgggccagcaggcattgtcctcatttacactaccggaggcgtctggctgggct

SEQ ID NO: 12418 - DNA, 919 bp, Homo sapiens
ggctgagggagaacagggtctctggaaccgtggaagccaggctggtctggcaggagcacccactccccgcccgctggaaggaagcctgtccccaggacaggactctggtggccctgctgctgctgcattggtttccctgtcacaagtcaagctggaggggaggcggcccacgtccagcctgtttgcatcacctggctgtggggactgaccctgcattggtctttgtcccactagggtgggtttcctgcagcttctttggctatgaagaaaagcacccccagggctgtgtccttggtgtggtaggacagttgtccctgacagtcacccagacaggcctgcatagcaccccagttacacagacagatttccacagcactgccttaccattgagcacatagttaaatctagggaaatcagtgcccagacatcaaagctagaaatgaaacatggtcagcaggagccttgcatgggcttctcttttgctggagcaagccaaaataataggaacggttttacattcctagtgccaggacccatctcgggtcgacaaaatctgaagacaagttaagggaacaggcagctgtttgaatagatcaattggatagtctaaggcagctctctggaccaagctgtaaaggagatacaatcgaaataatcactccggtaccacagtagacaggccttgaaggcactgggccccttttaatcggacttagcaagcattttttttgcctctgaccttctccttggaacaaaattagttaccagtagacttaggtgattgctgtactgcatgtaggcacataaccccaacctatataaacagtaagaaaattgtagcactttgagttggtctgctggaattatctccagccttctccctgtatccagttacagtgataaactcccttctttccta

SEQ ID NO: 12419 - DNA, 845 bp, Homo sapiens
gggacaacagtaggagcaggcagatcttgctgtttcaaccaaaacctcatgctgaccagagttgaggaacagaagaagatggtgaaggcctgcaggtataggtgttcagcatgtcatctgaaatattccccacagaggcaaaaagaaaggaaattatctctgaaaaggaatgggaggacaaggtattgatgacattttctgattacagaggagactctcaggactgaggaattgtcacccatgcttggccaatctcccaaactgtcatgcctctggcaaaagcaaagatcacctctcaccttctaaagactggccccagtacttctctaacaatcccttccctcaccgacacccacccaccaataaaaaacaaccacccaactctctccctgcttccccacaagtcctgtgaagagccaggctttctgtgctcatggcttgtcttctttgtgctgtagagcctccctctaatcttgtccatgcagtaaagagagatcacacaaaccctggacctacctctttgaggtggtactctcaaactctttgaaggtctgtatttgatggaatctctgggaaactgagttgggaaggtccctatatgaaaaacacgtgggttcttggagtgtacatctttaattttcttatttgtctctttagtcagcagaatatgtcaatgttttggttgaagaagctgcttgaatctgggcttttctgtgccatgtgttctcccagggccagcacaaagaagggcttttggtgcaggcccaagaccaccataatcatcattgattattcctctccacgccagtgtctctaaataaactttctcttctttctctgacaaa

SEQ ID NO: 12420 - DNA, 173 bp, Homo sapiens
caagattatcaactgtgtgtttgacagtgaatattaaatatgttaccagttgaaatttttggttataaatgtaatacgaattgtttcacaaacaaaacatgtaaagcagtattaaaatttggccaaacaagtgttctgtatctactttaataaatggttattctttaaaaaaa

SEQ ID NO: 12421 - DNA, 3794 bp, Homo sapiens
  SITE (1606): n equals a,t,g, or c
  SITE (1607): n equals a,t,g, or c
  SITE (1619): n equals a,t,g, or c
  SITE (1624): n equals a,t,g, or c
  SITE (1644): n equals a,t,g, or c
  SITE (1678): n equals a,t,g, or c
  SITE (1679): n equals a,t,g, or c
gcaaaggccttgcaaggatcttaaccgaaagggggagggggaaggtcgccaacaaacggctgagctcacaatccgggccggggcgtcccccaacctccatggagagagctaggctggagccgccgcctcagccgcaccctttgagtcccgctccgtccctgctgccggtcgagggcacctccttttgggcagcggccgtgaagacccctccgtcgccgcccatgctgtgcgcggccgccattgcgaccgtggcctcctcgtgtagggagggtttggtgccgtgtgcggcgcagcagctgctggaggtgaagctggagcaggtgttgctgctaccacagccccacgttcctggcaagggcgccgcttcctctcccagcggcagttcaggcccgacctgcggctcctgctgccgcccgcctcttccgagggcgccccctgtaggcccgagttacacccggtgcagccccgggcgctgcacgtcaaggccaagaagtaggagctaggggcttgcctggacgcatcggtgaggcctcggggggccgtggagaccggtcgtagagcctccagggcggtcaagttggaaggcctcgggccggccctcgactacttccgagggaacgagaagggcaagctggaggcggaagaggtcatgagggacgcgatgcagggcggggaaggcaaaagctcggcggccatccgagaaggtgtgatcaaaacggaggaacccgagagactcctcgaggactgcaggctcggcgcggagcccgcgtccaatggcctggttcatggcagcgcggaggtcatcttggccccaacgtccggtgcctttgggccgcaccagcaagaccttaggatccctttgacgctccacacggtcccccctggggcccggatccagtttcagggagctccgccttcagagctgataagattgaccaaggtccccctgacaccagtgcctactaaaatgcagtccctactggagccttctgtaaaaattgaaaccaaagatgtcccgctcaccgtgttgccctcagatgcaggtattagacagcaggggagtcgggttttcaaaactgcgtctgtgttgcccatagctgttttgtcagcagttcccaagtctaaactacaaaagtaaagtaatggaactgattgttttcagggcagagtctgcacaggtatcacttctgatcgacttgtacatatagcagtaaaatacacgaatgccttcaagattctcaagtattttttaaaaaatcgattttaaggcccagtatttagataggactaatttttgtacacaaaaatagaaatattcttgctagacagcgcatagccctcagtttatatgctacaaataatcaagattaaaaatattgtagtataacagctcagtacttttatatgtatcaagaaatagaagaaataatggtgttgaatgaaaaaagtgattataattaaacaggaaagtttataccgattatagaggctatctttaaaaatgaataataaatattctagcagaaaacaatacgtgattcaatgtaatattttagggtttattcctctgaaaggtaatgacttatagaaatattgaaaagaatanncaggtagggaantgganggcgcactaaaagtagttantttttagagatggaaatgagctaagttagcagcnnagtcaagcaagtaccacaataatgtattttattgtgctagttcagtattcgcagatatatagtcagcaaattcttattttaagatttagttcacacagaacgcttgccgagtgaacatcttggaaagtcatattaatctttggttcatatttttattaactttatgttttattgtttttttaattttctgtgttgattcttcctctccactccaccctgttgcttttatctttagtagtttttagattttatttttgttttctaaaggaaagaaagggaaagctttctttatactacttatttcatctttagtgtttttaagaaatttttaatatatgaagtaatcctaaaataatataataaatttatggacagttatttttgataaaatacatgagagatgtgaatttagataacttcctttgttgaaatttcaactggctctgtgactttctttttttaaattttattttatgaaaaagagatgctggtctcgaactcctgggatgaagcagtcctccgccttggcctcccaaagtactgaggttacaggtgtgagccattgtggctgccttctctgactttcaaaaaaattacttttattattttctgtcattttttttctgaaatattggcagagaggttctaggaatgaaggtcagaagcaagtgtgagccattttacctgccttctgtgactttcaaaaaattatttttttgagactgagtctcactctgttgcccagtctggacctggacaacaggaatgaaattctgtctcaaaaaagaaaagaaggtggcagcagctcaaccctgggcaccctgctctgcttgaaagaatgagtgtgtttctggagtccatcttgttcacttgtctcttcctagcgcccaacacagtacctgtcccaagcaggccctaaggacaggtttaatgaatccatcaatcagggtctatgggaacagtggggtgacagcactcaggatttcgagtaagcaggtgaaactctacctgtccatagcaaaaagtgggagaagagcctcagctctcatctggaaaatggggataatccccaaaggaaaaaattgacaagatggtgttgaggcccattcaaactctaggacccaagactttggttttctgtttttttgtttgtttgttttttgagatggagtcttgctctgttgccacacacctggctgccaccacacctggctaatttttgtatttttagtagagacaggatttcaccgtgttagccaggatggtctcgaatctcctgacctcaagtgatcctcctgcctcagcctctcaaagtgctgggattacaggcgtgagccaccgcgcctggcctaaaaaattatttttattgttttctttcatttttctcccaggacacaggactagtgttgatgattccacttggtaagagcttcaccttcgtagtgaaatacaactaatatagtattacaatattataaatagttttgcttgaaaggacacaagagcagcatgtagatgagttcctgtgaatgtttagagaacctctacctagctaagattatagtcacgagtaagtcatgcatggttcctgttccttaatggtagaatatttttagtagtaaataaataaatgttaattattgttagaggtactaataatacagatcaaagaagtaataagccaacaatttactctcttcaacatgattattgccacagttatcttcaacaatattatcctctttgaggaaaaggagtcattctaaactacagttcagaatgatgagttcaggggatgtaaggaattgtggaatactggcaggtttttttggttatattgaagtgtatatttcctccagatatttcaaaaataagtatagacggaggtgcactttaccttaaaattgtgtgtgtgtgtgtgtatggcacattaatttagccttttaatttttgtcatgtaggcataccagatactcccttcagtaaggacagaaatggtcatgtgaagcgacccatgaacgcatttatggctttgggcaaggatccaccgaccagacatctagccagagctaacccagcagccaacaatgcagaaatcagtgtccagcttgggtt

SEQ ID NO: 12422 - DNA, 397 bp, Homo sapiens
gccaggtataagaactcctgttgaccacatttgataccacaggattagacaatgaattggagttggtcttctttgagtgataacttgtcttgactgcaaaaatcatctatgtcaagataaactatagcttttggccagaatgtcatttagaaatgcagcaaatgttaatacaggatttctttttgtttttcttggtgatgtttaatggaaataaacacaatcctactaaaaggagaagcataaacatggaaaggatttggaacagtgtctagcgtaagagtaagcccttaacacaggtagtgattattactgttttattattaccctatcacagtcgctattcatttatttattcaacaagtatttattgagtactatatgccaggctcaatggtct

SEQ ID NO: 12423 - DNA, 2639 bp, Homo sapiens
cagcaggcagcgctctctgccctctgctacatccggagtcagctggagaacccaggtaatggagggagggccaggcagctgagccgcagctggggacaagaggactgaggctggcagtcccgtggggaggcggaagtggctgtgcgtgtgagcaggaggtgggttgctgtacaaaccatctgagcatcaggacgtcacctgcagggagctggggcggggtacatgtgccggtccctgctttcacgtcctctggggacaccgggggtagggaccgctagaagagcagctcgtgtaatgtcctgtgtctggaagatgaaaacttcctctccccgcctccttggcttcctgagggacggagggtgggccttggcacccacaccagcccgccctccttgcctctttcagagtccccccagacctccagccggcctccactggcccccctgagcgtaggtaggtgagcattcccggacccaggcttgtagtgtcgaggggagaggcgtgggcccccttctacctgcagtctctcgccctggcgcagagaacatcctgacccatgagcagcgctgcgcagcgttggtgagcgccggctttgacctcctgttggacgagcgctcgccatactgggcctgtaaggggactgtggctggagtcatcctggagaggggtagggatcgccccagccctggccctggccccggccccctgggaagggccccctcaagctccttgccttaggctgggccgtctctgccccctcctgcacagagatcccgcgtgccaggggccacgtgaaggagatctacaagctggtggctctgggcaccggcagcagctgctgtgctggctggctggagttctcgggccagcagctccacgactgccatggcctggtcatcgcccgcagggccctgctgaggtgaggggcagtggggtgggcgcctgatagcagccttcgccaggacaaggtcttcccaaccaccctgtgcctgtcgctcctaggttcttgttccggcagctcctgctggccacacaggggggccccaagggcaaggagcagtccgtgctggccccccagccagggcccggacccccattcaccctcaagccccgcgtcttcctgcacctctacatcagcaacacccccaagggcgcggcccgtgacatctagtatgcagggcccccggggcaggcgggggatggggctccctcggttgggctgctgggtgggggccagggtcagaagagcagccctgaagctgatgtctgtccccacccggcccgcagcctgccccccacctcggaaggtggcctcccgcacagcccacccatgcgcctgcaggcccatgtgctcgggcagctgaagcctgtgtgctacgtggcgccctcgctctgtgacacccacgtgggctgcctgtcagccagtgacaagctggcacgctgggccgtgctggggctgggtggtgccctgctggcccacctggtgtccccactctacagcaccagcctcatcctgggtgagcacgtggtgagggctgggggggtgagaagggagggcagggaggtcactcaccttgtcctgtcccttctgccctgcagctgactcatgccacgaccctccgactctgagcagggccatccacacccggccctgcctggacagtgtcctggggccatgcctgccacctccctacgtccggaccgccctgcacctgtttgcagggcccccggtggccccttccgaacccacccctgacacctgccgtggcctgagcctcaactggagcctgggggaccctggcatcgaggttgtggatgtggccaccgggcgtgtgaaggccaagtgagaagggccccctggggccgggctgtggagcagtgctggtgatggagggctcatgcatgagcttcctcacctcagtctaatcccagcgcaaccccttcgctcaaccccttcgctcaaccccttcctagctccgtagtggtggccacacctctgtctgccctgtgagtcctgtgacattgtcacagtgtgagaggaggtagtgtgaggtgtgtagcaggcctgctggtccagcttgtatctctctgatctcagtggtatcctctcttcatccagtgccgccctggggcctccctcccgtctctgcaaggcctcctttctccgggcctttcaccaggcggccagggctgtggggaagccctacctcctggccttgaagacctacgaggctgccaaggttggttccccaccctccccccgtcccggtccctctccagccctgcagtccctgccccctgcaggtacctcctctcaccccacctctcatctcccgccctaggctgggccctaccaggaggctcgcaggcagctgtctctcctcctggaccagcagggcctgggggcttggccctcgaagccactggtgggcaaattcagaaactgaagccagcctcggcgggaccgaggtcccggagccaagctgtacccctgctgggggagtgccctatctgaggagcgttgtggggagaacatgggttgtgcggggtgaaactggggctggagggaaggaggagcctgctgtggttgggaggcggctgctgcacgtttgggcttgaataaagaagtatttctggtt

SEQ ID NO: 12424 - DNA, 3288 bp, Homo sapiens
ggtacgtgcagcactacggcctgggcagtgcctgtgacaacgtagagcgcgtgctgaagagtgtggctgtgaagctggggaagacgcagaaggtgaaggtgctcacgggcacgggtgagtgaggtcgctgatgcgggcaccggagcctcaccccatcaccctgggggaccccggccatccctggaggaggcagggaggagaggaacgtgtcaaggagcatgcgccgggtcttctgggaatgggtttcagggcaggggagctacagaaagttctggagaggaagggcttgtagtccaggcttccgagggtgagaccagccctgccgcgtattgggcagtgctaggtggacacctgcaggcctcacatgcctggccttggaggctccgggcagcgtagctcaagctgttttctttctgagtgtgatcccgttccctgggcttccctgatgccatcatggagcctcttagggctggtccctcaggtgggtaagggctgggcctgtcctgctgtgaaggctccttcctcactgaaccctcccgtcccccaggtaacgtgaacattattcagcctaactatcctgcggcagcccgtgacttcctgcagactttccgccgtgggctgctgggttccgtgatgctggacctcgacgtcctgcggggccaccccccggctgagactttgccctgaacttgtccgggtagggagggccggaggcatgtggcctcccagacctcctgacctgggtggttgaggctcaagacagctcacccggtccagaagctccatgctggtcactagggtgctgtgctctctggcgccccacagcctggccagctccagggaccccagttgcagggcccaagcaggtgggagtggacaccaggcttcccagtggacgtccctgagcagctccgcatgcttggttctcccggagcttcctgctcaggcctcttgagaaatggatgctgtctcagaaggagttaaagctataacctgtaacctttaaaatctccagttaaagggcctgtttcttactggcctgtgaggtgcaccgtagtgccttgggcctgtgtgttaaagctgctctcaccagtgaaacctaagaaatgagcaggttggcagctagggtttgtgttggaggctttcggtccagtgtcttgcagtcctacaacaagtgagaggcttgctgccatcagagaggtttatttcacacttacaggcacacacagacacagaccagagactcccagcagcagagcccaagcactggcttcgcccctcagtgccctggggcatgttcagggcagggttgagggggacgccctgcacatggctttgctgtgcaatgactggaaggccgcccggcatgggcagtagagacccctggcctctgagcaccttctagctcacgggtagtgggattctgcattagtggggctgagagatgtgggggcccctccagccccattatagtgcacctgaaggggtccacagcctgtgtcctagaagagggaagaggaaggaaggtgggtggggctggtagtatggactaaggtgctgcaggacctggggccagggacatcctgtgcagaagctccggctgcctctttgcggtggtggcctgaccgtcccacagcagcctccaccagggccctggtgctcagtggcccctctttgctggctggctgcctctgctgccccataccccacacactcatcagcctgaagttagcccctgagtgccacctgcatcgtgccataaccctgaccgcctggggcaggaagtattcaggttggctgtgtcagatgctaatgtgctgaatcaacagtcattgcagatcacgaagtgtccatcataactggaacattccatcagcttgcagtgctgtggtgtgtgagggtctggtgcagctcagcccattttccaggtgggcatctgcaaagttgagggggctccggtgggtctctctgctgtgaggagactcagaccaccccctgcctcctgggggaaatgtcagaagggcttctctgcctatgaggatctggggcagggcttggccttggcctgctggtcttggaggcgttgagcttggtctggaaggggtggaggagcgtctgggctcactgggccaggggcattgctggcagtgtggacgggaggctgcagggcgctgcctcctgtggcttagtgccctggagctagagagcagtgcttggttgagtcctgccaacagcttccagatcctcacccaggccagaacccaggccagctggggaaggcagaggctggcagggcccgtggtgggtgctggtcttgactttggtgtccactgagtcccgaggctcaggcccaggagggatgcagtccggctgagggcgaggctgtccccaggacatggagagggtgagatcccaaggccacggcggggggcagggagaacccctcctaccctggatgagtgggtgactggagagctagagaacgtggcagacccaagacctctcagtgctgagcccatggaggatgccccaggctggcgggactgggaagcagagggctggtcttaacacaggtgtgtccagtgctggaggcaagtccttgtcgtgactgtccagcgccactccatgtctctcctgtccttggatgttggggggctcagcctcttgcatgggtgtcctgctgggcgctgggccccgccactggccccctgcttgctttggggtctgagttagctcctggctccactgagcaggccgtcagctgccagcccaccacgcggatacccaggccctgttccgaggcctggaacagctgcttccgaagaaggggctgccttcagggaaatgcgtgcaccgtgcagcctgtgctgtgcccagggaggcctcttcagcgggattggcagttgctgtgccctgagaacaggcagaactgtgtgatccctgaatgtgaacctgaagttcaaaggacttggaaagctctggaatgtgttggtttttcccccccaaaatgggtcctaaggagggtaaagtgacttgtttcaagttgttggagcaaagtgggtctctcacggatctcggcctgagggtgtgggggagaaggcctggacagcccctcagggcagggtgtgttttcccaccagccgcagagagccaggatggacgttcctcggacggacggttttcctgcttgggaatgttcctgggctgtgagatccactcttctgggcaggtggttagcacctaacgtttttccctcacttccccccaaattcttaagtcctttggtcc

SEQ ID NO: 12425 - DNA, 868 bp, Homo sapiens
tattttgagtttcaccttgttaggtgatggatatctacattcctgtaaaaattcttgagctttgttgtgggacagttagattattggaaacagtccggtcctttcaggagttcttcccattggcaggtctcgggggtggtccggggcgcctcctccaggcttgctcctctctcctgggacagcttttttggagcaccagggcacccttgaggctgctgattcagagctcatgcttggtgcctccgagaagttagatttagaacctgtgttactcagggttctgatgctcctatgggctctgagctcatgtcttgctttgctgggccttggggtgagtcctctgttaccggctcatgctgtgaccaggtccgagggcaccagcctcctcaaggttgagcctgccctcgtgggagccacgagacaggttcccctcacccctggctgtcaggaaggttgggagagtgttgggtctgggttagtcgggctcccaaggcttagggtggtgtttgtccctgtgagtggctgctctgtgctggcctttccctccaggcctctctgcccagagcctgcactgtgaggagtcagagtgcccgttacaatcactgggtgacgcttagcagcggtgggtgcctagtcagcccatgctggtccctgtgctaggaaaacaccgctcaaacacccagccgggtggagaggatgcaggtgtactggctgcctggaagttaccgagtgccatccttagcagcaaacagagtatgtttgcagatggtctgctgtgctcctcttttagtttccaggacctgggcctgcacagaggcctgcctgtcctaccccggatagagtggatgaagcctgtgtgtgtgaacag

SEQ ID NO: 12426 - DNA, 19842 bp, Homo sapiens
  SITE (2039): n equals a,t,g, or c
  SITE (2064): n equals a,t,g, or c
  SITE (2065): n equals a,t,g, or c
  SITE (2067): n equals a,t,g, or c
  SITE (2068): n equals a,t,g, or c
  SITE (2070): n equals a,t,g, or c
  SITE (2085): n equals a,t,g, or c
agcctgtgtgtggccctgcccccagggctggctgtttctgtgcttaaagccatcttccaggaagtgcatgtacaggtgagggataacagtcatgttggtattctcctctgtctctaccccttgacataactgggattcaatagcaaaaattattgccttctaagttctgaattcttttggatcttgtgaatgtttttatgctcttcttcagtatgtttatatgctcatctttgttattggacaaggaaaggggtgcatgccattagatctgacctgtgtcctcttatacctacagaaagtaaggcatccctctgtcaggcaggtttgaattattggcaccactgctgtgctgctgagtcaatatccataccctttctctgtagtttctcttagattgatcttatgctggtataaagagcactgttcacttagagattatgaagcaggaactagctgtgtcagctgaggtattctttgagcattttcttcacttctttctcccccacccccaagtccctgccacaggtggaccgacacacagtctacaatatcatcaccaattttatgcgaacccgggaagaaggtaagagacagagctttctgggaaatgtcaaaagcaagcacatcctactttttcccctattagtaggactcattttacctggggttatatagaagagctggtatcctgagagagaatgataaagggaaagagggggtctgctccctcccagtgaagtaaagaaagggtagagtttgtttgagccagtgttttaaattcttgcctccacagcaatgtgtatattgttgcacatctcttcactgagtactttcttggaatggaaaaagggtcagccctgaagagaaaggggaggcaatgatagcagagggagaacacaggctaggagaaagcccacactttctgtgctgtgggacagtatagtaaccttattctctccttcccagagctaaagagcctaggagctgacttcacctttggcttcatccaggtgatggatggggaaaaggatccccgtaatcttctggtggccttccgcatcgtccatgacctcatctccagggactatagcctgggtatatcgtggtagccatgattagctcattggagctttatcagatgagtgaagctgataaaccaacctcattttttctctgttgccacaggaccctttgtggaggagttgtttgaagtgacatcctgttatttccctatcgattttacccctgtaagtagcaccttcattgtttgatcatatatttattgagtgtctgctatgtgccaagccctgttctgggcactgagggtacaggtcaccaaaatagacatccccgccctcattattttatattttaataaactaggaaatggaaaagcatttgacatatgaggaatgattcaaagcagcatgtattggggggaattcttaagctccttaacactgtatttagtgctgaaggctacaggattgcaaaacactgtccctgcccttgaaggctgaaacatttaagtaacaataggagattaggtaggaaaatgagtagtactatagctgttcagagaagacaaaagttcagtgtgagctagagtaggcaggaactgacttcacagttaagataggatttcagctggtttgtgagggatgcagaagatatgattctggagttggacagggcatctcaggctatagaaacaaagtgacaaaacaaagaaggcacaattgtgcacagtgtacagaaggtatttgctctgaccctcttgggccttcctcccattctgcagttgagttcccttctactgccaaatactcaagagtttcatcaccgtgtgggtgtgtgtgctgcaagcattagtggtttgaaagaaataaaaggcattctattgcagcatgccaaacagcatattgactctcactgcctttataatgacaccaccatctttgctgtagggaatttcttaccagcttatttcagttgacattatgttactggggaccacctgtctcctgaaatgaatctanaaaaaaaaaaaattttctcttttcnnanncnaaccttattcttgtnaggtcttgaaagatcctggtttagctcccacattcttctgtttttactttggtttttttggtgtgtgtgtttcttttttgtttgttttggtttggtttttgcttttttgagatggagtctcgctctgtctcccaggctggagtgcagtggtgtgatctcgactcactgcaacctccgcctcctgggttcaagcaattctcctgcctcagcctcccaagtagctgggattacaggtgcccaccaccatgcccggctaatttttgtatttttagtagaaatggggtttcaccatcttgaccaggctgatattgaacccctgacttcgtgatccaactgcctcggcctcccaaagtgctgggattacaggcgtgggccaccatgcccagcctttactttgttttattttgtgttttgtgttggttttgaaaagataattcattcacatgattcaaagtccaaaagggtgagaaatctccctaccatctttttttctccataatcaaccaagttatcagttatgtttgtatctttacagagctttttcatctatatgtaagcaaatgcttttaccaccacccccctaaaatcaatgtgtgcacatgcgggcatgtacacacacacacacacacacttctcctgtactttgcttttttcactgaacactatgtcttggagagtgttccacgtcagtatataagttagctctttcattctttatggctgcataatattcctttggccggaaataatgaataatttcactagtcctctgtggattgttgctaatcttttgctgttatgagcagtgctacaactttcatacatatgaatataatgatagaataaattcctaaaagaaatcgctaggtcaaagaatatgtgcatttataatttgggggagaggaacagtatttcatccatttttttgaaaggttatacaatgagcatgattcagcatttaaagggtagataattaaacttctttcatacccctttactgctactgtccattttcccattagaaacaatcactgttcacagctgtttattttcacagagataatctaggcaaaataaacttacagataatattaggaagatttctctcattcaagcagatttttgtatgttgttctgcactgcagtctatcagaagcagaaagctcttatcaagatattaattaaaacagagacacttggctttagtgtaactatttgagttacaaatactctttattgtcttacaaatcagggtttttattgttgttggttctgttctgttttgttttgtttttcagacagggtctcactctgttgcccaggctggagtgcagtaacacaatccttgctcactgcaacccctgcctccggggttcgagtgattgttgtgcctcagccacctgaatagctgggattacagtacgtgccaccatgcctgactaattttttttttatattttttagtagagatggggttttgccatgttgtccaggttggtctcgaactcctcacctcaactgatctacctgcctcggcctcccaaagtgctgggattacacgtgtgagccacatatccagccacaaatcagtattgtgtgccatcatagtggatctgatgagcttaaggttcagtttcttcactatgcttatatgctcactctaagaagaggttggcaaactttttctttcccttttttttttttttttttgaggcaggctggagtgtagtggcaccatcacagctcactgcagcctccacctctctggactctggtactctggtgatcctcccacccctgcctcccgagtagctggaaccataggcacatgacactactcccgactaattgttgtatttttctatagagacaggattttgccatgttgcccaggctggtcttgaattcctgggctcaagccatccacctgcctcgacttcccaaagtgttgggattacaggcataagccaccatgcctggccaactttttctataaaaggccagacagtagctttgtgggtcatatggtctcctcaactctgctgttactgcacaaaaacagccttagacacaggaacagctacagtagctatatcccaatagaacttttgttatcaacactaaactttgaatttcatataattttcacttgtcacaagatattcttttggtttgtttcaaacattaaaaatgttaaaaccattcttagccaaacaatgtcaacaggttgatttttactcctaatgcagagtagatattggttcttccttcaccgtcatcctagattcccttatcctttttcttggatcagatctcctgtttcctgagttcacatattcctcattttgtggtttaccccctcagtttgatggtgtacttcctttagtattttcctgagagaatgtatgaagaagtgagaattttttagatttgtaacccttaaatgccttcaatcttgtctctcatttttgacattatgggcatgtaattcaagaatagaaattctaggccgggcgcagtggctcacacctgtaatctaagcactttaagaggccgaggcgggtggatcacttgaggtcaggagttcgagactagcctgaccaacatggtggaatcccgtctctactagaaatacaaaaattagctaggcgtggtagcaggcgcctgtaatctcagctacttgggaggctgaggcaggagaattgcttgaacctgggaggcggaggttacagtgagccgagatcacgccattgcactccagcttaggcaacaagagtaaaactccatctcaaaaaaaaaaataaataaaaagagaattctagctggatgcagttgcacatgtctgcagtcccagctacttgtgaggctgaggcagaacaatcacttgaggccaggagtttgaggctgtagtgcactatgattgcacctgagaaagaggccaggtgcagtaactgacgcttgtaatcccgctactttgggaggctgaggcaggtggattgcttgagctcaggagttcaagaccagcccgggcaccatggcaaaaccttgtctataagaaatacaaaaattaactgggcgtggtggtcgagtctgtagcccctgctactcgggaggtggaggtgggaggatggcttgggctggggaggcagaggttgcattgagccaagatcatgcctctgcactccagcctggaagacagagccagactcagtcaccaaaaaaccaaaaacaaaaacaaaaaaaaaatggaaattattttctcctaagattttgaaggcattgctacatttaaatctagttattggctgggcgtggtggctcatgcctgtaatctcaacacttcgaaaggccaaggcaggcggatcacctgaggtcaggagttcaagaccagcctggctaacatggtgaaaccccatttctactaaaaatacaaaaaaattagccgggcatggtggcgtgagcctgtaatcccagccactcgggagacaggcaggagaatcgcttgaatcctggaggcagaggctgcagtgagccaagatcgtgccattgcactccagcttgtgtaacaagagcaaaactccatctcaaataaataaataagcctagttatctagttttcatttgctgtggagaagtctgaatttcttctgtttcataaacttttgtatttaccatttttttcttcctctctataaactgatgtttggttcaccccgatacattgaaacttcacagtgatgtgccttagtattggtctatttcatgtactgtgttgggtacttagtaggccctgtcaatctggtaacccgtgtccattagtcctgtaaatttttcttgaattctttaattgatgatttcttcctctctcttttctctgttccttcattttggaactctcattaatcttctgttggacctctgattttctgaccttttgttttctattttgtacctctgtctttttgttactttataagagaattccacagttttatcttttctatcaaagtccagtcatgaaaacagaaaccaggccaggttcggtggcttacgcctgtaatcccagcacttcgggaggctgaggtgggtggatcattcgaggtcaggagttccagaccagcctggccaacatgatgaaaccccatgtctacaaaaaatatataaaaattagccaggtgtgttggtgcgcctgtaaccccagctacttgggaggttgagacatgagaatcacttgaacctaggaggtggaggttgcactgagctaggatcaagccactgcaatccagcatgggtgacagagtgagactctgtctcaaaaaaaaataataataataatagtaaatcccttcttttactatgtttttggtggagtttgcaaagaggaaaaggaaaacctgatatatgttttcagtctgtcgtcttggtacagaaaccatcaaggctttctgttttcagaattacagctttttataagggtgaaaaaaatggaaatgtccatcaacaaggaattatctagataaactggtacaaccacaaaatgaaatcatagccactaaaactaatgctatgaaagaataataccataaaaatgttcttaatatgttaagtgaaaaaaattaaaaaccacatgtacaaaatgatttttaagtatatatatattttatatggaaacagtatatactagcacatagtaacaatatatatcagcgaagaaaggaatacaccagaaagttaagcatgcttatttctgagtggtgaaatgatagaaaatgtgtaatcagattttttaaaatgcctaaagacaaaagttcccaaggagtacctaagatcaagcaagtcttcttgctggggcctcattatcttactatcttccctgattgggtatgagtatcaccctgttctgcagggttaccaggttcgagcctgtgttcaaggtggtctgaaatgttacacaaacccacagcccttctcccttttccagccacctaatgatccccatggtatccagagagaagacctcatcctgagtcttcgcgctgtgctggcttctacaccacgatttgctgaggtgggtctagccaaggttagggtatatagcctctgcccatagatggctctgaagaaagagcagtaaaagcatggagaaaaaaatatctggtatacattttagggcatgacaccctgcaagtgtcttgtgtggcaggtatcttcagaccttcgatgtagaaaactttaccatctcttcataatccagagctggattcagtggcacacacctatagttccagctactcaggaggagtctgagtggaaaggatcacttaaacccaggagttcaaatccagcctgggcaacatagggagacctcgtctccgctacacaaaaaaataaataaacccaatccctatatggtgctgtcttttaaaatcctgtaactttgtcaacttgcctgtttttgaggtagtggggctctggtcactgcttggcaggaaggttagcttacattcatagctcctgacttgagtacagctccttgatgtagtacctgcttttagggactgatggcaaggacagggttgaccttgatgtgactgacacaccacccatctcaggcttaagatcttccttctgtcccacagtttctgctgcccctgttgattgagaaagtggattctgaggttctgagtgccaagttggattctctacagactctggtgagtgatttttctccttgcaggacccagctaccttttgacaagttaggggtcctaaaggatatagattctaggatagccaaggaacagttcatgggcctcagaagaggatacccaggatttgggcctttgtgtcgacctgaagcccccagctgcatatcgtcgtgtcccatcccccatcccatagtaactgaggaaaggctgaccaggactccctctttaggcttctattttatcaaccagggttatctcctacttctctgttcccttagtaggactgttaaaaatcttaactggtttttctgctgagaccagggctccttcaggtgccattatgctgaggtacctgcacatcctagggtgtctgagtgtgtacataactgatagcagcggtttccttggcagaatgcttgctgtgctgtgtatggacagaaggaactgaaggacttcctccccagcctttgggcttctatccgcagagaggtgagtgtcactcagataaactcactactgttaactttcaattgtcaggcatgaggggaaataatacatcctgtccttttccctctgtcatccccagggccaagatataatgcctggttattcaggaggcaagtagggggacataattctagttgaatgacaagagagagagtccctatgtgacggtcagctgcttggtaagagcagctgatcacctttgcacattacccacttcttgtccttctgtggcaaggagtgcaggtcatggtgcctttggcaccatggtgaatagaaaggtgagcagagccactgctcagagttggctttttgtttctcagaaagtatgtgtctctgtcctgagtgtgactaaggacttggtaagaacacaccaattgagaagacactcagttggggtgttaatttccatttctgtgtcctagaggttctcactcccctctccaacaaggaaataggcagtggattggtggggtctcatctggtgcaggctcacctcagtagccatgggatccctccctgacaggtgttccagacggcaagtgagcgggtggaggcagagggcctggcggccctccactccctgactgcgtgtttgtctcgctctgtgctgagggctgatgctgaggacctccttgactccttccttagcaacattctacagggtaatggggccgtggcagccaggaaggggagtgagcacaatagaaacgacattccttgcctgggtgcggtggctcacgcctgtaatccctgcactttaggaggccgaggcgggtggatcacctgaggtcaggagttaaagaccagcctggccaacatggtgaaacctcgtctctactaaaaatacaaaaattagccgggcgtggtggtggacgcctgtaatcccagctactcgggaggctgaggcaggagaatcgcttgaaaaggcagaggttgcggtgagctgagattgcgccactgcactccagcttgggcaacgagagcaaaactccatctctaaaaaaaaaacaaatgacattccttaagggccagtgacctttattgtttagtcccaacatatttggtgatttgggggcgatagccctactttgaattgaaaacaatttgagtgttaactgcttgcaaactgtcatgggtctcagtctccaacctctgtggactgtaggggagtcaggcaccatttggcctcctccccagctctgtgatgtgctgcttctctagactgcaggcaccacctgtgtgaaccggacatgaaactggtgtggcctagtgccaagctgttgcaggcagctgcaggtgcatctgcccgggcctgtgactctgtcaccagcaatgtactgcctttactgctggaacagttccacaagcacagtcaggtaagggagcagaatctttgggggaaatgatgggacctgtgtgctaggttccctttctcagagagtgagctaagttttagcttgggccaacatagtagaccttgggttttgctcccattaactgctgctgctgcttcccttactcactttttccctgtctcatacataaaaggatcattctcccaagacaggaggatagcttgaagccaggagttcaagatcagcctgggcaacaaagtgagatcccatctctaaaaaaaaaaaaattttttttaaattagccaagcaggacatgctggttcatgcctgtaatcccagcactttaggagaccaaggcaggacaatcacttgaggctaggatttaaagaccagcttgggcaacaagacaagaccacatctctacaaaaaaaaaaaaaaaaaattagctggataaggtggcacgcatctgtagtcccagctactcaagaggctgaggcgagagaatcacttgaacctaggaggtcggggctgcagggagctataatcatgctactgtattccagcctggctgtggcatagcaaaacccccatctcttggaagaaagaaagaattttccctatatccagagtagcaggattgaaatcctttaaaatattctttgactctagtaccccttgaaacgttacagagcagccagcggcggacaatccttgaaatgctcctgggtttcttgaagctgcagcagaaatggagctatgaagacaaaggtgaggttgccttccattgcagtgctctggggactgttgaacacttcagcctataaaggatagcagggcaaagagtgctgtggaaaagtagtctagaacagtggtcctattctgaggttgtagcacaagagaacacttaacagatgagatggatgagatctgtttatttttctcagtgtgctttctggatacccaatggattaagctctttaaatctgccccaggaggcggggcatggtggctcacacctataatcccagcactttggtaggctaaggcaggcggaaaacttgaggttaggagttcgagaccagcctggccaatatggtgaaaccctgtctctactaaaaatacaaaaattagccaggcctgttggcacatgcctgtaattccagctactcgggaggctgaggcaggagaatggcttgaacctgggaggcagaggctgcagtgatccgagattacgccactgcactccagcctgggcaacagaggccttgtctcaaaaaaaaaatctaccccaggttggctgtgtatcacagcttagtcagggatatggaatgcagtggcttccttctaacctggcctctgtctcttccctagatcaaaggcctctgaatggcttcaaggaccagctgtgctcactggtattcatggctctaacagaccccagcacccagcttcagcttgttggcatccgtacactgacagtcttgggtgcccagccaggtacatcttaagggaaagagaagaggaaaatattggtccttttcttgtaagactgccttggtgaaaagcagccttactatcctcttcttactgcaactctggatgatttgggatttctaataagagcttagaagggttgtgatggctgcaggggaagaaagatgagattcatgttcccttctaactacagatctcctatcttatgaggacttggagctggcagtgggtcacctgtacagactgagcttcctgaaggaggattcccagagttggtgagaatttaaagcaatgagatagagcaagctgttccctgcctctgtattggcagcaaaagatcaagctaggaccagggctctgtgcttctgacccttggctctccttaggggaggtgagctctgtgttagactctggctgctaaccagttggagagatgtaggactgctctcttcttaggctttaagaagccctgtccaactcagtggtgtaggtacttgagttctgctctttagcaaggaggcgttgggagctcacactcctgaatctgcctaatatcagacgtaggcaagagagctgtgagcccaggctcagccaatgcttatctgctctgcgcctccagcagggtggcagcactggaagcatcaggaaccctggctgctctctaccctgtggccttcagcagccacctcgtacccaagctcgctgaggagctgcgtgtaggtatgtgtctctaatcctctgtggcccatccctttccagcaaggctttggggccttcgtgcttcctatcacacagtaaacctttgtctcatgggttgctttcaggggagtcaaatttgactaacggagatgagcccacccaatgctcccggcatctgtgctgtctgcaagccttgtcagctgtatcaacacatcccagcatcgtcaaggagacactgcctctgctgctgcagcatctctggcaagtgaacagaggtaactactaggaataaccaccaacggactgggctgaatagggagctgtagtctctaaggcagtggttctagctgtagctatacataagagtaacagaatcaactcttttaaaagaaaaaaaaaatactgatgcctgcgtccaactgaatcagtctctgaggagggatgggacttaggcaacagtactattaagagtacccggccagggccgctgctcttgcctgtaatctcagcactttgggaggccgaggccagcagatcacttgaggtcaggaatttgagaccaacttagccaacatggagaaacccagtctctactaaaaatacaaaaaattagctgggcatggtggcatgcgcctgtaatcccagctactggggaggctgaggcaggagaatctcttgaacccacaaggcggaggttgcagcgagctgagattgcgccactgtactccagcctggccagcctgggcaatagagtgaaactctatctcaaaagaaaaaaagggttgggcgcagtggcacatgcctataatcccagcactttgggaggctgaggcgggtggatcacaaggtcaggagtttgagaccagcctgaccaacatggtgcaatcccgtctctactaaaaattatctggtcatggtggcaggcgcctgtaatcccagctactcaggaggctgaggcaggataatcgtttgaacctgggaggcggaggttgcagtgagccaagatcatgccattgcactcacacctgggcaaacagggtgaaactccatctcaaaaaagaaaaaaaaaagtgccgggctgggtgtggtggctcatgcctgtaatcccagcactttgggaggccaaggctgatggatcacttgagctcaagagtttgagacctaaccagccgatgcaacatggcgaaaccgcatctctacaaaaaatacaaaaattagccaggagcagtggcatgcacctgtagtcccagctacttgggaggctaaggcaggagaatcactttgagcccgggaggcagaggttggagcaagccgagatcgctccattgcactccagcctgacctgggcaacaggagtgaagccctgtctccaaaaaaaaaaaaaaaaattacctaggtaattttcatgtgggatctgaattgagaggcatcaccctaaggccgtggtgctcaaaagatggtctgttaaccagcagcatgggtgacatctgggagcttgttagaagtgcagaatctcaggccctcactgatcagaatctgcattttgacagtgtaccctggtaactcgtagactgttgagtttgagaagcactgctccaatgcaaaagtgacagcagcctgccctgtgggtagattcaggcccactgtggttgatccagcagctgttacatagtagaatgaatactagacttggattataacttgggcttgattcctgactttgcacttcctgtgaccctggaaaagccactgatcatgtatttcattgtgcctccatgtccttctctatagagtgagggaaatgatacttctaaggttgttatgaaaaataaggagagaatatatacaagtgcttctgctgcagagcctgggacagagcaagtctcaactatgaagtctgaatagatcagaaagaacagccaggagaataaagtgactcagctttttaataaggcactcttggtcccttcagtcactcttctttgttcctctcatctgctgtgtaattggaaacacctgaaagtgcttttaagcaaaccttacagagaacactttctcatcaacagggaatatggttgcacaatccagtgacgttattgctgtctgtcagagcctcagacagatggcagaaaaatgtcagcaggaccctgagagttgctggtatttccaccagacagctataccttgcctgcttgccttggctgtgcaggcctctatgccaggtaactttccacctctccttcctggcctttgggaactttgccctctgctggtgttgaacagcaccaccctctgggtattggtggtactgtattttgtaccatcagaggtttattttcaatcctttgtcctcagagtgagatttcacttcatagcaaagggtgccaccctgaccagtggcaggaaccaaaatccactagtgttagcaacattcaaaagaatgcacaccttttccccatgaagtgctatgtgattagtttacttagaattggactctggagtcaagcccacctggttgggttttatcctcaactctaccacttgctaacttaggtgaagatattcagcctttccacgcttcaatttcctcacttgtaagatggagataaagagtaccgtctaggctggcgccatggttcacacctgtaatcccagcacttcaggaggccaagatgggaggatcacttgagtccaggagtttgagaccagcctgggcaacacaggggaccctgtttctacaaatagtcagacatagtggtgcacacctatagtcccagctgctcaagaggctgaggtgggaggatcacctgagcccaggagttcaaggctgcagtgaggcatgattgtgcctctgcactcgagcctgggtgacagagcgagatcctgttcctgtctcaaaaaaaaaaaaaaaaaaaactgtttcacagggtagttggtaaggattaaataagttagtgtatagtacctgccacataggaagtactcagtgtatgatagttgctataaataataaggacccatgaagataaatctatgtttttaattttttcagagaccaacattactatttttttttccttgcatctccagggacaccagggacaacatttctatttcttatgttaagaatgttcatcttagctatccctctttcccactgttggcctagtctaaagactgtgcagagttctcaggagcgctctgtggccccaggtcagaccactcctgtttctggtgccctgattctcaggactatagcactaccagagaccagattaagaactgctgtcgtggctagagtcaagccccagagtcagtgatgctgacagaacccaatcattcatttcttgaacccgtcatggtcttgtgattgtgtgcatgtgtgtgtgttttgcagagaaggagccctcagttctgagaaaagtactattggaggatgaggtgttggctgccatggtgtctgtcattggcactgctacaacccacctgagccctgagtaagtataatcatggatgtggcttgaacccagggagaaggatagcattcttaggaagaagcaacaggtagctgccttgtcagctgtccttttacctatatgtaaatgtggtgcagttaatcgtcttgtaagttttgttgacaaaacaaaaggaaggggctcttagcaccatggactatgagggtgggaagccagggccagtggttcttagccgcagatgtgcttaagaattacctgtagagcattttaaaatataccttgacttcccagatgggaacctgaatggaaatgattactggcacatatgtgccaaattaatatttgttcaatgcatgaatgatcagggcatgtcccattgacgtggtgatcctaattcaaaccctaggttgaaaagcacgtctgtggaggagagggctgctttagaatcctagctccttggtcatacctagtactctgcccccaggttagctgcccagagtgtgacacacattgtgcccctcttcttggatggcaacgtgtcctttctgcctgaaaacagcttcccgagcagattccagccattccaggtaacagtcttagaacttacatccttcaagctggtttttttttagggctaatctggaatgggtagaggggcagacaagcttattgctggcaggcttgatcgggctctccttcctttataggatggctcctcagggcagaggcggctgattgcactgcttatggcctttgtctgctccctgcctcgaaatgtaagtgagcacatttgggaagtactgttatttaaccttgacaaggtgactccgggctgaaatttgccacaggctaagctgatcttttacttcccccaccagagaagttagttctcatccgtcccggtccctgctgccactatgtactggttctcttggagttcaagtgttctctgggtccattacatggccaggttttctgtaggtggaaatccctcagctgaaccaactcatgcgggagcttttggaactgagctgctgccacagctgccccttttcttccaccgctgctgccaagtgctttgcaggactcctcaacaagcaccctgcaggtactgagatcagactatgtaaggagcctcccagaatcaactacccatgaaatcttatagctcagtactcattctctttttaaaaggagcttgctaataacattaacagggcttcaactgctcaagcactgtcctgggactgcccgtgggaaaagcgtcaagaccacagttgggcagagctttatagtacctaagaagagaagggagcacaaagagtctagttctgccgtcctactccctacagtggggctagtgtggataattctttattggaagtagatgaccctctcttttcaaatggcagcacctctgtattatgagaataccaggctcttatgcaggtgtccaatcattttgtccacaggcaaaaatgatattttccctttctaacagcttctcagggagctctgcacttaaagtgatttgcatttcattgctaaagggaaaatgtgtagcctttatgtcagcatttcctctctcctttttagggcagcagctggatgaattcctacagctagctgtggacaaagtggaggctggcctgggctctgggccctgtcgtagtcaggccttcactcttcttctctgggtaaggagttggagtggagtctggttagccagagaggcaattatgtctggttaaataaaatgtccctgtttgaccctaaaccataaacatctatgtctcagggttctcgggtttgagtgtcattccccaattgctctctctgtctccaattacaggtaacaaaggccctagtgctcagataccatcctctcagctcctgccttacagcccgggtacgtcctttctggagacagaagaacccaggacctaaacaaactttctggttgctcctattcctcccaaggacttccatcctcccctgtgtgttttttgttttcttttcttttttctttttggagacagggtcttactctgtcacccaggctggagtacagtagtgcaatcacagctcactccagcctcaacctccgtaggctcaagtgatcctcccacttcagcctcgcaagtagctgggactacaggggcaccccaccacacccaactaatgtttgtattttttgtaagaactgggtttggccatgttgcccagactcctagactcaagcagtccacctgccttggcctcccaaagtgctaggattacaggcatgagccaccacacccggccccatccttatctttggcacttaagattcttcttccctgatgtacctcaaaggctcttttttctccagctcatgggcctcctgagtgacccagaattaggtccagcagcagctgatggcttctctctgctcatgtctgactgcactgatgtgctgactcgtgctggccatgccgaagtgcggatcatgttccgccagcggttcttcacagataatgtgcctgctttggtccagggcttccatgctgctccccaaggtgaggagtctgaaagaaggtccccacatatacacatctctcctttgcttggccacattccctaagataatttagggcccgcttgcttctttagagctatattgtggtctgtgcctagaagactaaacttctagattcttgtcccacttcttcctttcatgggcgtatcttgcttattctgagcgtgaagggctctttcacccgtttgtaggctgatgtctcagcctcaccacagattggaattgatttctcaagctatatatctaagtccaatttctcccctaagcctttccattttttacagatgtgaagccaaactacttgaagggtctttctcatgtacttaacaggctgcccaagcctgtactcttgccagagctgcccacggtaagtcccacaggcagagcttctaagcaaaggacaaagctattcttccccagatggggctagaaaggggagggaacaagaaccaggatcttcatgatgtggccatcccctaccttgcccattgccccttagcttctttccttgctgctggaggccctgtcctgccctgactgtgtggtgcagctctccaccctcagctgccttcagcctcttctactggaagcaccccaagtcatgagtcttcacgtggacaccctcgtcaccaagtttctgaacctcagctctagcccttccatggtgcgttgagccccagcaactcttaggcaccagcatctctccctgggcatgctctcacctccttgtggttgtgttccaggctgtccggatcgccgcactgcagtgcatgcatgctctcactcgcctgcccacccctgtggtaagtacctcaggtgtccttccctggcctgggaacatctcaagagacacataagtacctttttgccttagtcaggtgggcttggccaccctggtgtgtaattgagatctgaattacaaggtacagatcttgtaattctgggcccaaggattcttttccttgggcccagaaggtaacagaaaggccatcctgccacttaacatcccttggaatcactaaagatgttttgctttcctcagaatattagttgtacagaatcaaaaaagcggtactttcagttgccttggatgagcaaggttgattatatcctctgactccacagctgctgccgtacaaaccacaggtgattcgggccttagccaaacccctggatgacaagaagagactggtgcgcaaggaagcagtgtcagccagaggggagtggtgagtttctaggtcgtggggagagatgggaccaagatgagcctcatcactaatgctgccaactttctttttgcccacaggtttctgttggggagccctggcagctgagccctcagtcctggcctagactgttctgacaatctaacctgggattactaactgttgagccatcttccccaaagcagggaaaccactggtctctgactgcctttcccacagacacagcacaaatgctaggcctctgttgcatggctgtacaaagaacataagagtccatatttctagtggatttgtaaaataagtgtgtgtgagacacttgcgtttgaagaaagatctagggtcctgggtctcttgcatttatatgtcagaaaaggggcgatatgctgctgaggggtgagtgcatatgagtgtggccctgaggaccagggctggcagatgttgtctacctgctgaagaataaagatttcttttggtaatggggctgtcagatatttcccccaccccacatatgcctcatataaccagaggcatcactggaataacaatgacagggattggccaaaaatttttcagggtaaccaggacagtagcacatgcctgtaaccccaacacttcaggaggctgaggcaggcggatcacttgaggctaggagtttgagactagccctggcagtatagcaagaacccatctctacaaataattaaaaaaaaaaaa

SEQ ID NO: 12427 - DNA, 346 bp, Homo sapiens
gctacttgggaggctgagacacaagaatcacttgagccgggcgcggtggctcacgcctgtaaagcttgtaatcccagcactttgggaggccgaggcggatggatcacaaggtcatgacatcgagacctcctggctaacacagtgaaaccccgtctctactaaaaatacaaaaattagccgggtgtggtggcgggcgcctgtagtcccagctactcgggaggctgaggcaggagaatggcgtgaacccgggaggcggagcttgcagtgagccgagatcacaccactgcactccagcctgggtgatatagagcgagactccgtctcaaaaaaaaaaaaaaaaaaaaat

SEQ ID NO: 12428 - DNA, 330 bp, Homo sapiens
cctaaaataatttctttcttttttttttttcttaactgttcaaggtttattgggggttttagttggtataacacttggatagttggttgcattgtttatatgtagatgtttttacattatatggtaatgtacactactgatatagttcacaaaataagatcctttggaagaattatgcacaagacatatgatattagatttatacactggatcccaggatgtgactgattgggaaaaaatgttggactaggcatgttcagtgaaggagccaggaagttatataacacacagtaaacatccacctggctcaaggggcaaatgcagcacgta

SEQ ID NO: 12429 - DNA, 3536 bp, Homo sapiens
gtggaaatccctcagctgaaccaactcatgcgggagcttttggaactgagctgctgccacagctgccccttttcttccaccgctgctgccaagtgctttgcaggactcctcaacaagcaccctgcaggtactgagatcagactatgtaaggagcctcccagaatcaactacccatgaaatcttatagctcagtactcattctctttttaaaaggagcttgctaataacattaacagggcttcaactgctcaagcactgtcctgggactgcccgtgggaaaagcgtcaagaccacagttgggcagagctttatagtacctaagaagagaagggagcacaaagagtctagttctgccgtcctactccctacagtggggctagtgtggataattctttattggaagtagatgaccctctcttttcaaatggcagcacctctgtattatgagaataccaggctcttatgcaggtgtccaatcattttgtccacaggcaaaaatgatattttccctttctaacagcttctcagggagctctgcacttaaagtgatttgcatttcattgctaaagggaaaatgtgtagcctttatgtcagcatttcctctctcctttttagggcagcagctggatgaattcctacagctagctgtggacaaagtggaggctggcctgggctctgggccctgtcgtagtcaggccttcactcttcttctctgggtaaggagttggagtggagtctggttagccagagaggcaattatgtctggttaaataaaatgtccctgtttgaccctaaaccataaacatctatgtctcagggttctcgggtttgagtgtcattccccaattgctctctctgtctccaattacaggtaacaaaggccctagtgctcagataccatcctctcagctcctgccttacagcccgggtacgtcctttctggagacagaagaacccaggacctaaacaaactttctggttgctcctattcctcccaaggacttccatcctcccctgtgtgttttttgttttcttttcttttttctttttggagacagggtcttactctgtcacccaggctggagtacagtagtgcaatcacagctcactccagcctcaacctccgtaggctcaagtgatcctcccacttcagcctcgcaagtagctgggactacaggggcaccccaccacacccaactaatgtttgtattttttgtaagaactgggtttggccatgttgcccagactcctagactcaagcagtccacctgccttggcctcccaaagtgctaggattacaggcatgagccaccacacccggccccatccttatctttggcacttaagattcttcttccctgatgtacctcaaaggctcttttttctccagctcatgggcctcctgagtgacccagaattaggtccagcagcagctgatggcttctctctgctcatgtctgactgcactgatgtgctgactcgtgctggccatgccgaagtgcggatcatgttccgccagcggttcttcacagataatgtgcctgctttggtccagggcttccatgctgctccccaaggtgaggagtctgaaagaaggtccccacatatacacatctctcctttgcttggccacattccctaagataatttagggcccgcttgcttctttagagctatattgtggtctgtgcctagaagactaaacttctagattcttgtcccacttcttcctttcatgggcgtatcttgcttattctgagcgtgaagggctctttcacccgtttgtaggctgatgtctcagcctcaccacagattggaattgatttctcaagctatatatctaagtccaatttctcccctaagcctttccattttttacagatgtgaagccaaactacttgaagggtctttctcatgtacttaacaggctgcccaagcctgtactcttgccagagctgcccacggtaagtcccacaggcagagcttctaagcaaaggacaaagctttcttccccagatggggctagaaaggggagggaacaagaaccaggatcttcatgatgtggccatcccctaccttgcccattgccccttagcttctttccttgctgctggaggccctgtcctgccctgactgtgtggtgcagctctccaccctcagctgccttcagcctcttctactggaagcaccccaagtcatgagtcttcacgtggacaccctcgtcaccaagtttctgaacctcagctctagcccttccatggtgcgttgagccccagcaactcttaggcaccagcatctctccctgggcatgctctcacctccttgtggttgtgttccaggctgtccggatcgccgcactgcagtgcatgcatgctctcactcgcctgcccacccctgtggtaagtacctcaggtgtccttccctggcctgggaacatctcaagagacacataagtacctttttgccttagtcaggtgggcttggccaccctggtgtgtaattgagatctgaattacaaggtacagatcttggaattctgggcccaaggattctttttcttgggcccagaaggtaacagaaaggccatcctgccacttaacatcccttggaatcactaaagatgttttgctttcctcagaatattagttgtacagaatcaaaaaagcggtactttcagttgccttggatgagcaaggttgattatatcctctgactccacagctgctgccgtacaaaccacaggtgattcgggccttagccaaacccctggatgacaagaagagactggtgcgcaaggaagcagtgtcagccagaggggagtggtgagtttctaggtcgtggggagagatgggaccaagatgagcctcatcactaatgctgccaactttctttttgcctacaggtttctgttggggagccctggcagctgagccctcagtcctggcctagactgttctgacaatctaacctgggattactaactgttgagccatcttccccaaagcagggaaaccactggtctctgactgcctttcccacagacacagcacaaatgctaggcctctgttgcatggctgtacaaagaacataagagtccatatttctagtggatttgtaaaataagtgtgtgtgagacacttgcgtttgaagaaagatctagggtcctgggtctcttgcatttatatgtcagaaaaggggcgatatgctgctgaggggtgagtgcatatgagtgtggccctgaggaccagggctggcagatgttgtctacctgctgaagaataaagatttcttttggtaatggggctgtcagatatttcccccaccccacatatgcctcatataaccagaggcatcactggaataacaatgacagggattggccaaaaatttttcagggtaaccaggacagtagcacatgcctgtaaccccaacacttcaggaggctgaggcaggcggatcacttgaggctaggagtttgagactagccctggcagtatagcaagaacccatctctacaaataattaaaaaaaaaaaa

SEQ ID NO: 12430 - DNA, 19842 bp, Homo sapiens; identical to SEQ ID NO: 12426
  SITE (2039): n equals a,t,g, or c
  SITE (2064): n equals a,t,g, or c
  SITE (2065): n equals a,t,g, or c
  SITE (2067): n equals a,t,g, or c
  SITE (2068): n equals a,t,g, or c
  SITE (2070): n equals a,t,g, or c
  SITE (2085): n equals a,t,g, or c

SEQ ID NO: 12431 - DNA, 345 bp, Homo sapiens
gctacttgggaggctgagacacaagaatcacttgagccgggcgcggtggctcacgcctgtaaagcttgtaatcccagcactttgggaggccgaggcggatggatcacaaggtcatgacatcgagacctcctggctaacacagtgaaaccccgtctctactaaaaatacaaaaaattagccgggcatggtggcgggcgcctgtagttccagctacttgggaggctgaggcaggagaatggcgtgaacccgggaggcggagcttgcagtgagccgagatcgcgccaccgcactctggcctgggcgaaagagcgagattctgtctcaaaaaaaaaaaaaaaaaagaaa

SEQ ID NO: 12432 - DNA, 346 bp, Homo sapiens; identical to SEQ ID NO: 12427

SEQ ID NO: 12433 - DNA, 330 bp, Homo sapiens; identical to SEQ ID NO: 12428

SEQ ID NO: 12434 - DNA, 989 bp, Homo sapiens
aaaaattataatcttagccgggtgctgtggcttacatctgtaatcccaccactttgggagaacaaggcaggaggatcccttgagcccaggagtttgagaccaccctggtcaacacagaaaggcctcgtctctatttattattattttttaaataaaaaaataaagaattataatcttgatgtggttaattgcacctttgtgtctattacctgtttctgttgcaggtgaacttaatagagcattaggtctgtcatcactctgtggagaaacagacatatatcaataattgttattcaagaagaaatactttctacttttatggtaattttgaaattataaaagacaaaaaacaggtaactctccttcacgattaagtctagaggtgagaatttgggtcaggtgcagtggctcatgcctgtaatcccagtactttgggaggctgaggtgcgaggattacttgagagcaggagttgagaccagcctaggcaacatagtgagaccctgtctctacaaaacgtctaaaaaattggtcaggcattgtggtgtgctcctgtagaggctgaggagggagggttgcttgagcctaggaattaaagactgcagtgagtaatgattgtgccactgcactccagcctgggtgacagagggagactctctctctccctctctctctctttttttgagacaaggtctcactcttgttgcccaggctagattgcaatgccatgatctcccaggctcaggtgatccttctacctcagcctcccaagtagttgagactacagggacacatcaccatgcccagttaatttttgcattttttgtagagacagtgtcttgccatgttagccaggttagtctcaacctcctgagctcaagcgatgcacccgcctcagcctcccaaagtgctggattataggcatgagttaccgtgcctggcctgaccccctttggaaaaaaaaaaaaaaaaagaagaagaagaaaaagaa

SEQ ID NO: 12435 - DNA, 165 bp, Homo sapiens
ttttgtttttttgttttttgtttttttttttttgagatggagtttagctcttattgcccaggctggagtgcaatggcacgatctcagctcaccacaacctccgcctcccgggttcaagcaattctcctgcctcagcctcccaagtagctgggattacaggcatgc

SEQ ID NO: 12436 - DNA, 7540 bp, Homo sapiens
ggcggggcgtggaccagccgcgccgagcggggcctctccgggccgcgtctgtggggtcgagactgcgcggccgttgggcgtgcagcggcgccagtcggcggacgaggggcccccgggaggtaggtgcgggcagagagaggacctggggcggcggggcggggcggcgctgagcggccgggggtctgttggactctacccgcacgttagccgaggcccgtctccggtgcccggtagcgcgaggcacacagaaggcgctcaataagtgctgattgaatgaatgagcccgtgccctcctcatcccggcccgagcagcctccggtttgagagcgtgcaggccaccctcaccttcactgtacagactgaggtatccagatgccggacaggtctttattgggcgcctactgtgtgcctgggtggctctgcgctgggtgcagctggccctgagcaagacagacagcctggtcccgcccagctcaccgccgggggggagggacgactttaaatgacttaaaataatgtaattcctagctccctctgtagcacaaaataaaagaaaataacaccagggaagggggcggggagagctctgagtggagacatctgagcagtgacccgaagacctgaatgcagtgaggtagcggggccatgaggcgcttggggctgatggtgggggagaaaacccagttggggaaaactcaaggacaggggaggagctgagattcctcctaagaacggtgacattttggggtccagggtgaaaccgacttcactttggcccattgcatcaggtaaaatgcggcccttatcagtggccacacgcttcccctcgtccatgtgttcagccagcggtttttgagtatctgttctgcagcaggccttccggcgggtacagggatatggtttagggcaggagtcagccaggggcagagagggaggccctttttttttttttttttttttttttgagacggagtcttgctctgcagcccaggctggagtacaatggcgcgatctcggctcactgcaagctccacctcctgggttgaagcaattctcctgcctcagcctcccgagtaactgggattacaggcacgtaccaccatgcccagctaattttttttttttttgagacagagtcttactctgtcacccaggctggagtgcaatggcttgatcttggctcactgcaacctccacctcctgggttcaagtgattctcctgcctcagcctcccaagtagctgggattacaggtgcccactaccacacccagctaatttttgtatttttagtagagacagtgtttcactgtgttggccaggctggtcttgaactctcgacctcaggtgctggtctcgaactctcgacctcaggtgatctgcccacctcagcctcccaaagtgctgagattacaggtgtgagccaccactcccaaccgagggaggcccttttgaggggtcctggatgcagagaagcaagaaagaagaaggaggcctcgctggaaggtcaggggaaagagagcagtgttccaggtggagagaggagaacccatgcagaggtcctgaggcacgagcaagcttggcacagaaaggaccagtgagggccgaggcgaggcaggagcttgtcatgcagagcttcagcctcagggtacagagtttagactttatttcggggcatggggaagccatggaccaccaccatccaatagcatgttctgcagtgatgagagtgttccctttgctgtcaaatacggtaaccacagaagtcaagtaggcttgtgtgactactgagcgcttgaaatatggccagggagactgaggagcggaattttgtattttatttagtttttttttttttttttttttgagatggagttttgctcttgttgcccagcctggagtgcggtggtgccatcttggctcactgcaacctctgcctcctgggttcaagcgattctcttgcctcagcctccagagtagctgggattacaggtgcctgccaccacggccggctaatttttgtatttttggtagagacggcgtttcaccatgttgtccaggctggtctcgaattcctgacctcaggtgatccacccacctcggcctcccaaagttctgggattgcaggtgtgagccactacacccagcctggattttttttaattttgatgaacttttttctttttttgagacagtgtattagtcagggttctctagagggacagaactaatggaatagttatatatataaagggaagtttattaagtattaattgcacacgattacagggtctcacaatacattgtctgcagattgaggagcaaagagagccagtccgagttccaaaactgaagaactggccaggtgcagtggctcacgcctataatcctagcactttgggaggccgaggcaggcggatcacgaggtcaggagttcgagaccagcctggccaacatgatgaaacctcgtctctactacaaatacaaaaaaaattagctgggagtggtggcgcgtgtctgtaatcccagctactaggcaggagaattgcttgaatccaggaagcggaggttgcagtgagcggagattgcaccattgcactccagcctggcaacagagcgagactctgtctaaaaaaaaaaaaagaaaaaagaaagaaagctaatgcagtgcccctgatgttcacagttgctggactgagacatgagcctccaactgtgtggttgggctcggtagcacatcgtgggacttgggtgtgcgcccacagatggtttggccctgcagtgaccagagcagcccaagccgccaccatggtgaaattgctagtggccaaaatcctgtgcatggtgggcgtgttcttcttcatgctgctcggctccctgctccccgtgaagatcatcgagacagattttgagaaggcccatcgctcgaaaaagatcctctctctctgcaacacctttggaggaggggtgtttctggccacgtgcttcaacgctctgctgcccgctgtgagggaaaaggtaagggctccctgggcactagcagcagcccttggcaccttatggccaagggactctgatgcattttcaacactgatgccaagttcagtgaaggccttgatgctgtaagggtgacggaaagtaggaagtgaatttgctgtgtgattgtgaactggttactttctgtctctgtgctctaccggccaaacaaggggtttggaccagacctgggattcccaacaggtggacttgtcggttgtcacctgataatcagaccagactacccacctaggtagggcacactctgtcctgaagctggaaagcatggcctctcttcggttcctatatcagtcagctactgttgcgtaacaaattatagcaaactgagcaccttaggactacagacgtttatcatctcacagtttctgtgagtcaggggtctgggcactgcttcaggagctcacaaggcagcagtcacagtgtctcctgggctgtggtctcatctcaacgttcaaccggggatgggtcggcctctaagctcatgtggttgtaagccaggttcagttcctcattggttgtcagaccgaaggtgtctgtttgtcagtgtctgttggctggggcagccctcagagcctggccacgtggacctccccagcatgatcagttccttcatcagcaaatggagaagatggccatgactctgtgtaagacagagggcacagtcccatgtcatgcagaggtgacagggtatcccttcccctctgccccagtgtcctgctggttagaagcaagttcaagtccttcccatactcaagtggccaggacctcacagggtatggctgtcaagaggcaggggcttctggggccatcttggagtctgtccaccccaactcctgacagcatcatcctctgctgacctgttccttgagctcccccatatcagcagcccagagtgtgggtcccctgtcaggccacagtgtgaccagccctggccatgcttgctgggtgaccctgggtgagtggcttcctctctctgggccagtgccagatgtgacattgaatttgtgttggttacatacttggtggagatatgaggaccccctgttcttcctcccaacgaaagcatggaagccctaagcttatcccccaacccctggccctgcttttcctcgtgcctagtgtccagaaaggaggagaagggctgttgtctgggattaaatcatctgagcctgttagtgtggcagagtagagttccagggtggctccctgagcttccagcccctgctccgcacgccccatgctcttccctcccctcgagtgtgggtagggctgggactgccgtgcgtgtcactcctgccattatgtcagaatcccagcagaggggatgttgcagctgtgatgaccgccccagatcggttagcgctgagttcatcaaaagggagggggtgggcctggcctaatcaggtgagccactcaccctcctgctggccttggagaagcaaaaagccagggtgtgccaggagaagggcatgaagcgaggacccgagggcagcctctcggtgccaagagccatccccgccaacagccagccaggacacggggcctcagtccacagccaccaggaggtggactcttccgacctccagtgagcttggaagaggaccctgggtgtcagtgagatctcagccctgatgacaccctgcgagacctggagcgtagggcccagctagcccgcacctggatttccaccgttcagagccgagacaccgcattcctgctgttccgcgtggctgagtctgcattcgttcgttacgcggtgtgtgaagactgacatctgcactgcgaggatggagatcttggtcatctctgacatctcctgcatcgcagaggccactgccagccccccttttcccccatggtcatggtgtcacccccgtcaccctctgactgcaggcctgggcgactgcggggagcttgctcttccctccccctcatcacagtggccttctcatggcacccaaacctttcccgccgttctcctgtcctcgggctggtcaggcggatgaggtccctactcccgagcccccagcctcacccactgcagggccaggctctcagtcacccctggaaaatggtgcctggttcacagctcccgtgcatctgcctcatctctcctgatcaacgtctgtctcttgggagtagctagagttcctcatgagcttgtcctcaagcgaggcatgcatgaggcctccagccggtggtcagtgagggagttaagtggcttctccgtggaaacacagccttctgctgcagcagaggctcacccagcgtgaactgcccccagggaacactgggcgatgcctggggacattgtggttgtcacgatggggggtgctcctggcctggagtgggtggaggccagagacactgctcagcagcaccctgcagtgcccaggacggccccgtcccagagaacaatccagccccgaatgtcagcaccttccccctacccgagttgtgaaaataaaaaatgtttccagacattgccaggtgtccacacgggcagaatcgccctggttgagaaccactgtgtgcgcgtgcttgtgtgtgcacctgcgtgtgcgcgtgtgtgtgcgtgcgtgtgtgcacatatgcgtgtgtgtgtgtgtgtgtgcacgtgcgcaggttgtaatgaagtctccgctgggaaggaagcagggaagcaggcattgttgagtgtcgattgtgttgtgattttcctccactttggtctcgaggtctctctggagggtggctgtgaactctggccctgccgtgacgaggctccagggagctgttgtgggcgtttacagcctgcctttcatgagacatttcatcctggcgcatagcctaatgcctgcgtgtccgccccgtgagcagctgtccctcccataggagtgtgtacctcttgcagacgccctgcggctcccgtctgacccacgtctagtttctccccaccaaagtctcccctcgctaggagagccctgaccaggaggagagtcgggcccaggcatgtcggtcagggaagcagagaggaggccccgcggcagaacacgcaaggccagtgcagctctttatgtgtttattttgagccggagtctccctctgtcgcccaggctggagtgcagtggcacgatctcgtctcactgcaacctctgcctcctgggttcaagccattctcctgcctcagcctcctgagtagctgggattacaggtgctcgccaccatgcccagctaatttttgtatttttagtagaaacatgtttccccatattggccaggctggtctcgaactcctgggctcaagcaatccgccagcctcagtctcccaaaatgctggggtcacaggcatgagccaccgcgcttggctggtggtggtggtgttaattcatcacaggcgagcccttcctctcccacttgttttaacctctgtgtgaatcggggatttctggactttgctttgaacggtgacatctggccagccctgtcgccgccacccctgagcgtgggtctctctctctctctcgggtgtccccggctgcagctccagaaggtcctgagcctcggccacatcagcaccgactacccgctggccgaaaccatcctcctgctgggcttcttcatgaccgtcttcctggagcagctgatcctgaccttccgcaaggagaagccgtccttcatcgacctggagaccttcaacgccggatcggacgtgggcagcgactcggagtatgagagccccttcatggggggcgcgcggggccacgcgctgtacgtggagccccacggccacggccccagcctgagcgtgcagggcctctcgcgcgccagccccgtgcgcctgctcagcctggccttcgcgctgtcggcccactcggtctttgagggcctggccctgggcctgcaggaggagggggagaaagtggtgagcctgttcgtgggggtggccgtccacgagacactggtggccgtggccctgggcatcagcatggcccggagtgccatgcccctgcgggacgcggccaagctggcggtcaccgtaagcgccatgatccccctgggcatcggcctgggcctgggcattgagagcgcccagggcgtgccgggcagcgtggcgtccgtgctgctgcagggcctggcgggcggcaccttcctcttcatcaccttcctggagatcctggccaaggagctggaggagaagagtgaccgtctgctcaaggtcctcttcctggtgctgggctacaccgtcctggccgggatggtcttcctcaagtggtgagcggcctcgccattgtccctgccgccggagcccgccgggagccccgggccggacacaggccgcgtcccccggccgcgcgtcccccaagagcgagcactgtggccctgggccaccacctgtgcacaaggggcctcccgggaccaggctgtgcccccgatcctacaccctgagcctcagagcactgctactttttaaaatacttctttctcttaaaagtctttaccaaa

SEQ ID NO: 12437 - DNA, 181 bp, Homo sapiens; identical to SEQ ID NO: 5399

SEQ ID NO: 12438 - DNA, 129 bp, Homo sapiens
caagctactcaggaggctgaggcaggagaatggcatgaacccgggaggtggagcttgcagtgagctgagatcgcgccactgcactccagcctgggtgacacagtgagactccgtctcaaaaaaaagaga

SEQ ID NO: 12439 - DNA, 170 bp, Homo sapiens; identical to SEQ ID NO: 5414

SEQ ID NO: 12440 - DNA, 109 bp, Homo sapiens; identical to SEQ ID NO: 5415

SEQ ID NO: 12441 - DNA, 184 bp, Homo sapiens; identical to SEQ ID NO: 5421

SEQ ID NO: 12442 - DNA, 147 bp, Homo sapiens; identical to SEQ ID NO: 5241

SEQ ID NO: 12443 - DNA, 169 bp, Homo sapiens; identical to SEQ ID NO: 5427

SEQ ID NO: 12444 - DNA, 131 bp, Homo sapiens; identical to SEQ ID NO: 5432

SEQ ID NO: 12445 - DNA, 143 bp, Homo sapiens; identical to SEQ ID NO: 5446

SEQ ID NO: 12446 - DNA, 170 bp, Homo sapiens; identical to SEQ ID NO: 5447

SEQ ID NO: 12447 - DNA, 171 bp, Homo sapiens; identical to SEQ ID NO: 5452

SEQ ID NO: 12448 - DNA, 141 bp, Homo sapiens; identical to SEQ ID NO: 5242

SEQ ID NO: 12449 - DNA, 125 bp, Homo sapiens; identical to SEQ ID NO: 5454

SEQ ID NO: 12450 - DNA, 175 bp, Homo sapiens; identical to SEQ ID NO: 5462

SEQ ID NO: 12451 - DNA, 154 bp, Homo sapiens; identical to SEQ ID NO: 5469

SEQ ID NO: 12452 - DNA, 176 bp, Homo sapiens; identical to SEQ ID NO: 5473

SEQ ID NO: 12453 - DNA, 150 bp, Homo sapiens; identical to SEQ ID NO: 5482
  SITE (21): n equals a,t,g, or c

SEQ ID NO: 12454 - DNA, 162 bp, Homo sapiens; identical to SEQ ID NO: 5244

SEQ ID NO: 12455 - DNA, 129 bp, Homo sapiens; identical to SEQ ID NO: 5494

SEQ ID NO: 12456 - DNA, 193 bp, Homo sapiens; identical to SEQ ID NO: 5245

SEQ ID NO: 12457 - DNA, 177 bp, Homo sapiens; identical to SEQ ID NO: 5500

SEQ ID NO: 12458 - DNA, 140 bp, Homo sapiens; identical to SEQ ID NO: 5978

SEQ ID NO: 12459 - DNA, 2922 bp, Homo sapiens
ggtggcgctaatcccagttactcgggaggctgaggcaggagaatcgcttgaacccgggaggcggaggttgcagtgagccaagatcgcaccactgcactccagcctgggcgacagagcaagattctgtctcaaaaaaaaaaaaaaaaaagatgaaaccaagtatacaagcccagaagcccagggctaatgggactggagtgtaaaaggaagaattactataaaatggtgctaggggccaggcacggtggctcacgcctgtaatcccagcactttgggaggccgaggcgggcggatcacgaggtcaggagatcaagaccatcctggctaacacggtgaaatcacgtctctactaaaaacacaaaaaattagctgggcgtggtggcaggtgactgtagtcccagctactcgggaggctgaggcaggagaatggtgtgaacccgggaagcagagcttgcagtgagccgagattgcaccactgcactccagcctgggcgacagagcgagactccgtctcaaaaaaaaaaaagaaaaaaaaaggtgctaggtactgtgactgtgaaatcgatatcattattggatttacagctggggaaaagctttaaagcttatacaacttggcaaatgaaggtcacacagctagaaatggtagagcccaggtctaactccaaagttctgtgctagttaccttacaaactttgtctataatcttccacaatcccaaaaagtgtattattacattttgcagttgagaaggttgaggctgggggtgttaagtaaaacacacaaggttacacagctatgaagtatccaagccaagattgtatcccaggtctgtgggactccgaagcaagtgctacattctgctgctgggcaatgcggggattactgtgtgccttgagctccctaagagttctcaacaccacttcttcctttttgacaggctctggctgggctttgaccttcgctccgaccctggcctgcctgtcctgttatttctctcgccgacgatccctggccaccgggctggcactgacaggcgtgggcctctcctccttcacatttgccccctttttccagtggctgctcagccactacgcctggagggggtccctgctgctggtgtctgccctctccctccacctagtggcctgtggtgctctcctccgcccaccctccctggctgaggaccctgctgtgggtggtcccagggcccaactcacctctctcctccatcatggccccttcctccgttacactgttgccctcaccctgatcaacactggctacttcattccctacctccacctggtggcccatctccaggacctggattgggacccactacctgctgccttcctactctcagttgttgctatttctgacctcgtggggcgtgtggtctccggatggctgggagatgcagtcccagggcctgtgacacgactcctgatgctctggaccaccttgactggggtgtcactagccctgttccctgtagctcaggctcccacagccctggtggctctggctgtggcctacggcttcacatcaggggctctggccccactggccttctccgtgctgcctgaactaatagggactagaaggatttactgtggcctgggactgttgcagatgatagagagcatcggggggctgctggggcctcctctctcaggtaagtggaatggggttcccagggggtgagggctgccatgttgcacaactaggggagggtactattctcattacagtgtatgtgaatattgccctctggtgtagtacagtacacagcctgcgtggccaaccatagcatccctgaaatgggtccatggggcaaagaacttggggctgggaaagtctgagtggaaagacaaaaagaagctaagtggaacccttggcagggtgcctacggcttgggtttgcagaggacctggcagaacctggccagacacagacgtagcattccagtgtgcaccctttcctttggcctactgggccccaaaccaggtatctgaggcacctggtcaaagttctgctggctcagggtgccagaactttcagacctttatctcctcttacccattaactgaagctttagaaaggccacagttggtgggcgcctgtagtcccagctactcaggaggctgaggcaggagaatggcatgaacccgggaggcggagcttgcagtgagctgagatcgcgccactgcacttcagcctgggcgacagagcgagactccgtctcaaaaaaaaaaaaaaaagaaaggccacagttgccagaaagaaaggcacaagtatgcctgactcaatctggatctccaaatccctgcaggctggtttggaggtcctttctgaaggcggggaggtggttgaaattaacttttgaggcccttttgggaaaccagagttcttaagtttatccaactattccatgggagttccaactcctctgagatgataagtcttccctccacccaaaaatgtatctgagccctcagccccagcaaatagatcactcatgtgtattctttttctctcttggacctaggctacctccgggatgtgacaggcaactacacggcttcttttgtggtggctggggccttccttctttcagggagtggcattctcctcaccctgccccacttcttctgcttctcaactactacctccgggccccaggaccttgtaacagaagcactagatactaaagttcccctacccaaggaggggctggaagaggactgaactccacagagtcaggcccagaaagccaaagcttgacagctccaggtcttctcttgccacgtcttggtctccacagaaccacagtgccttaagattcttgatctgcctccccctagagcaggcctggggctcctgcaatgtgtgtgccaaccctttgtattttgttgagga

SEQ ID NO: 12460 - DNA, 39 bp, Homo sapiens; identical to SEQ ID NO: 6761

SEQ ID NO: 12461 - DNA, 153 bp, Homo sapiens; identical to SEQ ID NO: 5246

SEQ ID NO: 12462 - DNA, 121 bp, Homo sapiens; identical to SEQ ID NO: 5518

SEQ ID NO: 12463 - DNA, 2910 bp, Homo sapiens
ctcgggaggctgaggcaggagaatcgcttgaacccgggaggcggaggttgcagtgagccaagatcgcaccactgcactccagcctgggcgacagagcaagattctgtctcaaaaaaaaaaaaaaaaaaaaaaaaaaagatgaaaccaagtatacaagcccagaagcccagggctaatgggactggagtgcaaaaggaagaattactataaaatggtgctaggggccaggcacggtggctcacgcctgtaatcccagcactttgggaggccgaggcgggcggatcacgaggtcaggagatcaagaccatcctggctaacacggtgaaatcacgtctctactaaaaacacaaaaaattagctgggcgtggtggcaggtgactgtagtcccagctactcgggaggctgaggcaggagaatggtgtgaacccgggaagcagagcttgcagtgagccgagattgcaccactgcactccagcctgggcgacagagcgagactccgtctcaaaaaaaaaaagaaaaaaaaaggtgctaggtactgtgactgtgaaatcgatatcattattggatttacagctggggaaaagctttaaagcttatacaacttggcaaatgaaggtcacacagctagaaatggtagagcccaggtctaactccaaagttctgtgctagttaccttacaaactttgtctctaatcttccacaatcccaaaaagtgtattattacattttgcagttgagaaggttgaggctgggggtgttaagtaaaacacacaaggttacacagctatgaagtatccaagccaagattgtatcccaggtctgtgggactccgaagcaagtgctacattctgctgctgggcaatgcggggattactgtgtgccttgagctccctaagagttctcaacaccacttcttcctttttgacaggctctggctgggctttgaccttcgctccgaccctggcctgcctgtcctgttatttctctcgccgacgatccctggccaccgggctggcactgacaggcgtgggcctctcctccttcacatttgccccctttttccagtggctgctcagccactacgcctggagggggtccctgctgctggtgtctgccctctccctccacctagtggcctgtggtgctctcctccgcccaccctccctggctgaggaccctgctgtgggtggtcccagggcccaactcacctctctcctccatcatggccccttcctccgttacactgttgccctcaccctgatcaacactggctacttcattccctacctccacctggtggcccatctccaggacctggattgggacccactacctgctgccttcctactctcagttgttgctatttctgacctcgtggggcgtgtggtctccggatggctgggagatgcagtcccagggcctgtgacacgactcctgatgctctggaccaccttgactggggtgtcactagccctgttccctgtagctcaggctcccacagccctggtggctctggctgtggcctacggcttcacatcaggggctctggccccactggccttctccgtgctgcctgaactaatagggactagaaggatttactgtggcctgggactgttgcagatgatagagagcatcggggggctgctggggcctcctctctcaggtaagtggaatggggttcccagggggtgagggctgccatgttgcacaactaggggagggtactattctcattacagtgtatgtgaatattgccctctggtgtagtacagtacacagcctgcgtggccaaccatagcatccctgaaatgggtccatggggcaaagaacttggggctgggaaagtctgagtggaaagacaaaaagaagctaagtggaacccttggcagggtgcctacggcttgggtttgcagaggacctggcagaacctggccagacacagacgtagcattccagtgtgcaccctttcctttggcctactgggccccaaaccaggtatctgaggcacctggtcaaagttctgctggctcagggtgccagaactttcagacctttatctcctcttacccattaactgaagctttagaaaggccacagttggtgggcgcctgtagtcccagctactcaggaggctgaggcaggagaatggcatgaacccgggaggcggagcttgcagtgagctgagatcgcgccactgcacttcagcctgggcgacagagcgagactccgtctcaaaaaaaaaaaaaaaagaaaggccacagttgccagaaagaaaggcacaagtatgcctgactcaatctggatctccaaatccctgcaggctggtttggaggtcctttctgaaggcggggaggtggttgaaattaacttttgaggcccttttgggaaaccagagttcttaagtttatccaactattccatgggagttccaactcctctgagatgataagtcttccctccacccaaaaatgtatctgagccctcagccccagcaaatagatcactcatgtgtattctttttctctcttggacctaggctacctccgggatgtgacaggcaactacacggcttcttttgtggtggctggggccttccttctttcagggagtggcattctcctcaccctgccccacttcttctgcttctcaactactacctccgggccccaggaccttgtaacagaagcactagatactaaagttcccctacccaaggaggggctggaagaggactgaactccacagagtcaggcccagaaagccaaagcttgacagctccaggtcttctcttgccacgtcttggtctccacagaaccacagtgccttaagattcttgatctgcctccccctagagcaggcctggggctcctgcaatgtgtgtgccaaccctttgtattttgttgagga

SEQ ID NO: 12464 - DNA, 158 bp, Homo sapiens; identical to SEQ ID NO: 5531

SEQ ID NO: 12465 - DNA, 193 bp, Homo sapiens; identical to SEQ ID NO: 5539

SEQ ID NO: 12466 - DNA, 183 bp, Homo sapiens; identical to SEQ ID NO: 5556

SEQ ID NO: 12467 - DNA, 136 bp, Homo sapiens; identical to SEQ ID NO: 5560

SEQ ID NO: 12468 - DNA, 153 bp, Homo sapiens; identical to SEQ ID NO: 5573

SEQ ID NO: 12469 - DNA, 150 bp, Homo sapiens; identical to SEQ ID NO: 5248

SEQ ID NO: 12470 - DNA, 142 bp, Homo sapiens; identical to SEQ ID NO: 5249

SEQ ID NO: 12471 - DNA, 181 bp, Homo sapiens; identical to SEQ ID NO: 5586

SEQ ID NO: 12472 - DNA, 123 bp, Homo sapiens; identical to SEQ ID NO: 5589

SEQ ID NO: 12473 - DNA, 176 bp, Homo sapiens; identical to SEQ ID NO: 5590

SEQ ID NO: 12474 - DNA, 177 bp, Homo sapiens; identical to SEQ ID NO: 5600

SEQ ID NO: 12475 - DNA, 154 bp, Homo sapiens; identical to SEQ ID NO: 5604

SEQ ID NO: 12476 - DNA, 166 bp, Homo sapiens; identical to SEQ ID NO: 5608

SEQ ID NO: 12477 - DNA, 142 bp, Homo sapiens; identical to SEQ ID NO: 5251

SEQ ID NO: 12478 - DNA, 131 bp, Homo sapiens; identical to SEQ ID NO: 5613

SEQ ID NO: 12479 - DNA, 268 bp, Homo sapiens; identical to SEQ ID NO: 5616

SEQ ID NO: 12480 - DNA, 906 bp, Homo sapiens; identical to SEQ ID NO: 5620

SEQ ID NO: 12481 - DNA, 2705 bp, Homo sapiens; identical to SEQ ID NO: 5621

SEQ ID NO: 12482 - DNA, 368 bp, Homo sapiens; identical to SEQ ID NO: 5252

SEQ ID NO: 12483 - DNA, 2925 bp, Homo sapiens; identical to SEQ ID NO: 5990

SEQ ID NO: 12484 - DNA, 87 bp, Homo sapiens
ctcacgcctgtaatcccagcactttgggaagccgaggcgggtggatcacgaggtcaggagtttgagaccagcctggccaacatggtg

SEQ ID NO: 12485 - DNA, 127 bp, Homo sapiens
agacggagtcttgctctgttgcccaggctggagtgcagtgatgtgatctcggctcactgcaacctccgcttcccgggttcaagcgattctcctgcctcagcctcccaagtagctgggattacaggcg

SEQ ID NO: 12486 - DNA, 212 bp, Homo sapiens; identical to SEQ ID NO: 6783

SEQ ID NO: 12487 - DNA, 127 bp, Homo sapiens; identical to SEQ ID NO: 12485

SEQ ID NO: 12488 - DNA, 87 bp, Homo sapiens; identical to SEQ ID NO: 12484

SEQ ID NO: 12489 - DNA, 1548 bp, Homo sapiens; identical to SEQ ID NO: 5628

SEQ ID NO: 12490 - DNA, 4704 bp, Homo sapiens; identical to SEQ ID NO: 5253

SEQ ID NO: 12491 - DNA, 125 bp, Homo sapiens; identical to SEQ ID NO: 5632

SEQ ID NO: 12492 - DNA, 7203 bp, Homo sapiens
aagcaggggagaaagtgcgttttttatttatagggccatctgcaaaaggggcaaactgtctgtcaccacccgctccaccaactttacgggcgggggtgggggtagggagtcattcctcccgccaacccccgcaatcctcagtaacctataatctggggaaaagggtcccgagggctgggtcatcccgtgcctcccactgggtttaggacgcgacagcggaatgggcaggaggtggaggtgcacttctgcaaatctcaagaaccgaagccctggaggcggcggatgagaaagtccacagccctagcaattttgggtgtgtaggcagggatttagcgtatgtccacagccgctctagtgagggtgcccccacccacgttcctcggaagggcagcgctccatccccaccctgctaccctttccccgagagcctaatcccaccttagctggcgctcccggagcctccggggcaggagggaggcgtggcctcgggcggcccgcccctttgatgtgcgccggcaccgctgcgattggacagtcgcttgtgacgttggggactgcggtgggctccgctgctgcagcagccgcagcgccggccgcggctccggctccggctccggctcccgggcatttaaaggggacgcggcggctgcccgggggggatgaggggcaagtggaggggacggctcagacgcacatcatcctcagtccctcgggactggagggactcgtgagccggagcccagaaatccgggggtggataagacaccgcgtcccctccaattcccgtaagcaccccttgctccatcctgcgccccaatacctcagctagcccccttccccacttcttacactccaaactcagccgggacagacctctgctgccgccgcccccacgtgagtcctgggctccgggagataggggagggctggggtcccggcgcggggtgggggctgtggagtttgaaggcgctccttcacgcgcgtggcactgggggagttctggagctcaggagtgagtccccttctctctcctacccaggaacatagtgctggggtatccctccgtccccgactctgacaaagccaaggaattggtgtccccttgctccctgccacccacaatacccctccccgagccgcgcaccccccgcccgcattggagcccagcgcccgccagccgggggtgcgccagagtgctggcttcctagtcacctctaaaaatatctctcccccaaccctaccggcagctgccacctccctgcccctgcccctgcccctaggatcccctcccagcttgtcctcccacccagggagtgcccagaggtgactgctagacccagacgcctcactggcaccagggcgcagggccaccaccgccagctggtcaggaccgcaagctccctgcccactggagtctccagggccaaggggggagctccagctgcaattctcccaagaggcgccagagactcctgagttctaatcgcggttccgatgctgtgtgacccctaggatgttagcctgacctctctgggcctctgtttttcctatctgctgctcgggcgtggtgagcaaggaagatggtcatgtttgggagcactgtctgggaaagggagggaattctagcttagttgttggatctgatttctagtgattgatacaaggagacttgtttttggacagagagggcttgttactgtggtctttctggagtcctcgcctccccatcctcattctgcacatttcctttggaaaactatcccaaaacttttctaggaactccatctgcccagtaagaggggaatttgaaacttagggcctgtatcagagaggggcctgtttccctcccacccccttcccacagatttaatctaagagcatttgtgtgaaaggcgggagaagcaggcagggatctgtgacccggtgcagaattaaggaggcaggcactgcttttaggtgggactagaatatggactccctgcaaccccccagaagcccttctccctgctctggcctgtgagagaagctcagatcctgccccctactctgagggactctgtttggtgaccacaaaaggatttgatgactcagaacaaaggtgtcagaggtgagagaccttttggagcatcacaggagccaaattccaactggggaaggggttcctctgactcctgtggggtggggacgaggtgtcacagcatggccttctcagttttctggggaagaaacccaagatgcctgactttctgccttggagactgaaagaaacaagggcaactcaccaaacaataagtgtttaactgaatcccctagatactattattagcagaaaaatgtaactgtattttatgatgagaaatgaggagttttgtgtgtgtgtgtgtgtgtgtgtgtgtgttggggatggggttactccctctgtcacccaggctggagtgcagtggtaccattacagctcactgcaacctctgtctcctgggtttaagtgatcctcgtgcctcagcctcccaagtagctgggactatgggcacaagctaccatacccagctaatttttttttttttttttttttttgagacggagtctcgctgtcgcccaggctggaatgcaatggcgcaatctcggctcactgcaagttccgcctcccgggttcacgccattctcctgcctcagcctcccgagtagctgggactacaggcgcccgccaccacacccagctaattttttgtatttttagtagagacagggtttcaccatgttagccaggatggtctcgatcttctgacctcgtgattcgcctgcctcggcctcccaaagtgctgggattacaggcatgagccaccacgcccggccttaatttttgtttttaaagagacagggttttgccatgtcacccagtctggtctcaaactcctagacttaagtgatctgcctgcctcgcctcccaaagtgttgggattacaggcttaagccaccctgcctggctgaaaaaatgagaagttttgaccataattaatgatcaatagaatagaaaaaaggaaggaaggaaggaaggaaggaaggaggaaggaaggaaggaaggaaggaaggaaggaaggaaggaaggaaggaaggagagagacaggaaggaaggaagggcaaagtaatgagacccttctctataggatgaaagctggtctctgggtagctgttggtgaccccttggaatctttgtatctaccccttgcttctccagatgctgcatgtttgcttttacaaggggagtggcatccctgacctttctcttataaatcgcctggctgaggttggacatgtgatatcagctgggaatctggaaggttggaagtccctccagatagggactggggacagctccaacccatgccatttccttgtccctcatgcaaccctccccttctctcccacctcctccttgacctgtcttctctcccatccctcaccctctctttgcccactgcttcattcagctttgaccacctctcctaattcctagattagaagttcttggaaaaaactgagagccgcattccatccctgcagaaggatttaacacatgtgtggtctggttgttgtgagggagggagtaccgcaagatggatattgctagagcctgtaccctgctcctgggatgtccccgtctctgtcctggggcgattgcttctccctcctgaatagtcaggggagagtgtcaccttgacagaggggtttacagtgtcaccattgtcaccaccagagggcagcagccagccagacctctgcttctctcaaggtcttgtctcctggctctctttatctttccaaatcttgtcccagctgcttctggtctcattcaaccccaggagcacaggtgggagagtagagaggcactggaagctgtaggtggtgtcctttgccactgtcttggtgaagtccccaagaggttaaacccagttcccaaagccacaccaaagtcttgccaagatttcaacctgactcttctgtgtgactgccggacccctgagagcaacagggaggccattcccagatcatctgtgagacctggctgggggtcccagaccccagctatggtatagtaagctttggtcagctccttcctttttgagggcatgaggaaggcaaagctgcagtcaagcgttcatgaagcagtctatgccccatgtaaacagcgtggctggttagttaacctctctgagcccttctcattggctgaattcatgactgatgagtagtgagagaatatgagtgaaggtgatttgtaaactatgatgtgtcaaacacatttaagggacaatgatgatactagagaaaaaacactggactcaggctcagatgtgggtttgagatctgtctgccatttacagtgggtgacttttgggaaagtcagttaacttctctgggtctccaataccatctgaaacctctctagagttgtaggcactgggcctatttgaggggttgtttttgctaagaccctgggaatgcctcctgtagctcagcagaaggaccagggccaggtgggtattcctggtggaagcaaagtcagctgactgggcaccctcaaatgaacttttgtggttgtcaggaacgtgtgacgacggctggaggccaacagagtccctacaggtggtgctcacggtaatgcaccgacaatgagtggctgttttccagtttctggcctccgctgcctatctagggtaagtgggtccctccaggggtctcctaggatgaggcctcagcccccagtttcccatcacctttccatagggccttgggagaggccctatccagcccgttttaggtttaccctcacctctactggggcttcattaattcctagaagcttccatcccaggtgtggggtcctgatgctttatatctgcaatttgaaggatcctgggccactgaaatgcccactggatgttgatgagaccagagggtgactctagggatgaggtggaagggacagcttggttagggaggcagatagccaatcgaaatcccagctccgaaatgaggagcttgggtttctgtttcacaaggtgtgccaggccataagcacaccaggaatatgagagaggggcttaggaagaaaccagaaagagaaacaatcccatctcaattaactggggtgggagctgggcgggagaaaagcagtgtgtgggtatctggaagctgcatgtcacctgctcactgcccctctgcgcctctcacacactggcaggcaaaggtgatggaaacttgctgccaagggctcttgctgcctccattgcttgcctttccttgtgcccagacatgtcccctcttgtcctctgtcctctcccatgctgcctaccaccctcccctccaacaagaatctggcccaaggtctccgcttcctggaactcccttatccctacccctactctgtcttcctgtccagcagtctgtctccaagatcccctagaatgacctcctctcagccctctcctccacaccccccaagtccccactacctggcccctcccactcctctgccttttcagccactgctgctctcttctcttctcccttacctgtctcccaggtgtgtcatggcctggtgcgggaggctcttacctccccaagccccactgcttctcctgctgcccgcttgcttcggactctggcagaaaccccacctgctgacacgttcctcctggggaattggcaagtgattagtgatgagctgtcagcacagggccctaaaactccccgaagaagctgtgccccatccctagacccctgttcagtgccattgggctagaagcagctcccagagagccatagattccccatggcccaaaaggagaatgaggaaactggtccagttgggtggatgggtggttggtttcccttgactctacctcagggaatgagggaggggagagttcccaccaccctttcttgatccacaccaacaacaggggccactggaagtctccaaaacagtccagtccagaaacctccccaaagtggtgatccttggaagctgctcttcccttcttttgacccttgttaagccccattggccctcgatgagagtaggggaaacaggtgccgagaagccctctgggcataaaccccactgcagttaactaagaggtgccactggagtagtcagggaaggctggggatagaggtggtggcattgggtactcctcccagcttaaccagacttgggtcctcctcaggtgttggatgtgccagcgcctctggccgtggcccgctaaccagcctctcccgggcgggctcctgccgcgccccctctcgcttgccccctcctcctcctcctcctgctgctctcccccctgctcccaggacggcaggatggccgcgcagggcgcgccgcgcttcctcctgaccttcgacttcgacgagactatcgtggacgaaaacagcgacgattcgatcgtgcgcgccgcgccgggccagcggctcccggagagcctgcgagccacctaccgcgagggcttctacaacgagtacatgcagcgcgtcttcaagtacctgggcgagcagggcgtgcggccgcgggacctgagcgccatctacgaagccatccctttgtcgccaggcatgagcgacctgctgcagtttgtggcaaaacagggcgcctgcttcgaggtgattctcatctccgatgccaacacctttggcgtggagagctcgctgcgcgccgccggccaccacagcctgttccgccgcatcctcagcaacccgtcggggccggatgcgcggggactgctggctctgcggccgttccacacacacagctgcgcgcgctgccccgccaacatgtgcaagcacaaggtgctcagcgactacctgcgcgagcgggcccacgacggcgtgcacttcgagcgcctcttctacgtgggcgacggcgccaacgacttctgccccatggggctgctggcgggcggcgacgtggccttcccgcgccgcggctaccccatgcaccgcctcattcaggaggcccagaaggccgagcccagctcgttccgcgccagcgtggtgccctgggaaacggctgcagatgtgcgcctccacctgcaacaggtgctgaagtcgtgctgagtctggccgcctgcaggggggtacccgggccaacggcggagggggcggggaagggagattcggcaaagacagctttactactccctt

SEQ ID NO: 12493 - DNA, 7175 bp, Homo sapiens
aagcaggggagaaagtgcgttttttatttatagggccatctgcaaaaggggcaaactgtctgtcaccacccgctccaccaactttacgggcgggggtgggggtagggagtcattcctcccgccaacccccgcaatcctcagtaacctataatctggggaaaagggtcccgagggctgggtcatcccgtgcctcccactgggtttaggacgcgacagcggaatgggcaggaggtggaggtgcacttctgcaaatctcaagaaccgaagccctggaggcggcggatgagaaagtccacagccctagcaattttgggtgtgtaggcagggatttagcgtatgtccacagccgctctagtgagggtgcccccacccacgttcctcggaagggcagcgctccatccccaccctgctaccctttccccgagagcctaatcccaccttagctggcgctcccggagcctccggggcaggagggaggcgtggcctcgggcggcccgcccctttgatgtgcgccggcaccgctgcgattggacagtcgcttgtgacgttggggactgcggtgggctccgctgctgcagcagccgcagcgccggccgcggctccggctccggctccggctcccgggcatttaaaggggacgcggcggctgcccgggggggatgaggggcaagtggaggggacggctcagacgcacatcatcctcagtccctcgggactggagggactcgtgagccggagcccagaaatccgggggtggataagacaccgcgtcccctccaattcccgtaagcaccccttgctccatcctgcgccccaatacctcagctagcccccttccccacttcttacactccaaactcagccgggacagacctctgctgccgccgcccccacgtgagtcctgggctccgggagataggggagggctggggtcccggcgcggggtgggggctgtggagtttgaaggcgctccttcacgcgcgtggcactgggggagttctggagctcaggagtgagtccccttctctctcctacccaggaacatagtgctggggtatccctccgtccccgactctgacaaagccaaggaattggtgtccccttgctccctgccacccacaatacccctccccgagccgcgcaccccccgcccgcattggagcccagcgcccgccagccgggggtgcgccagagtgctggcttcctagtcacctctaaaaatatctctcccccaaccctaccggcagctgccacctccctgcccctgcccctgcccctaggatcccctcccagcttgtcctcccacccagggagtgcccagaggtgactgctagacccagacgcctcactggcaccagggcgcagggccaccaccgccagctggtcaggaccgcaagctccctgcccactggagtctccagggccaaggggggagctccagctgcaattttcccaagaggcgccagagactcctgagttctaatcgcggttccgatgctgtgtgacccctaggatgttagcctgacctctctgggcctctgtttttcctatctgctgctcgggcgtggtgagcaaggaagatggtcatgtttgggagcactgtctgggaaagggagggaattctagcttagttgttggatctgatttctagtgattgatacaaggagacttgtttttggacagagagggcttgttactgtggtctttctggagtcctcgcctccccatcctcattctgcacatttcctttggaaaactatcccaaaacttttctaggaactccatctgcccagtaagaggggaatttgaaacttagggcctgtatcagagaggggcctgtttccctcccacccccttcccacagatttaatctaagagcatttgtgtgaaaggcgggagaagcaggcagggatctgtgacccggtgcagaattaaggaggcaggcactgcttttaggtgggactagaatatggactccctgcaaccccccagaagcccttctccctgctctggcctgtgagagaagctcagatcctgccccctactctgagggactctgtttggtgaccacaaaaggatttgatgactcagaacaaaggtgtcagaggtgagagaccttttggagcatcacaggagccaaattccaactggggaaggggttcctctgactcctgtggggtggggacgaggtgtcacagcatggccttctcagttttctggggaagaaacccaagatgcctgactttctgccttggagactgaaagaaacaagggcaactcaccaaacaataagtgtttaactgaatcccctagatactattattagcagaaaaatgtaactgtattttatgatgagaaatgaggagttgtgtgtgtgtgtgtgtgtgtgtgtgttggggatggggttactccctctgtcacccaggctggagtgcagtggtaccattacagctcactgcaacctctgtctcctgggtttaagtgatcctcgtgcctcagcctcccaagtagctgggactatgggcacaagctaccatacccagctaattttttttttttttttttttttgagacggagtctcgctgtcacccaggctggaatgcaatggcgcaatctcggctcactgcaagttctgcctcccgggttcacgccattctcctgcctcagcctcccgagtagctgggactacaggcgcccgccaccacacccagctaattttttgtatttttagtagagacagggtttcaccatgttagacaggatggtctcgatcttctgacctcgtgattcgcctgcctcggcctcccaaagtgctgggattacaggcatgagccaccacgcccggccttaatttttgtttttaaagagacagggttttgccatgtcacccagtctggtctcaaactcctagacttaagtgatctgcctgcctcgcctcccaaagtgttgggattacaggcttaagccaccctgcctggctgaaaaaatgagaagttttgaccataattaatgatcaatagaatagaaaaaaggaaggaaggaaggaaggaaggaaggaaggaaggaaggaaggaaggaaggaaggagagagacaggaaggaaggaagggcaaagtaatgagacccttctctataggatgaaagctggtctctgggtagctgttggtgaccccttggaatctttgtatctaccccttgcttctccagatgctgcatgtttgcttttacaaggggagtggcatccctgacctttctcttataaatcgcctggctgaggttggacatgtgatatcagctgggaatctggaaggttggaagtccctccagatagggactggggacagctccaacccatgccatttccttgtccctcatgcaaccctccccttctctcccacctcctccttgacctgtcttctctcccatccctcaccctctctttgcccactgcttcattcagctttgaccacctctcctaattcctagattagaagttcttggaaaaaactgagagccgcattccatccctgcagaaggatttaacacatgtgtggtctggttgttgtgagggagggagtaccgcaagatggatattgctagagcctgtaccctgctcctgggatgtccccgtctctgtcctggggcgattgcttctccctcctgaatagtcaggggagagtgtcaccttgacagaggggtttacagtgtcaccattgtcaccaccagagggcagcagccagccagacctctgcttctctcaaggtcttgtctcctggctctctttatctttccaaatcttgtcccagctgcttctggtctcattcaaccccaggagcacaggtgggagagtagagaggcactggaagctgtaggtggtgtcctttgccactgtcttggtgaagtccccaagaggttaaacccagttcccaaagccacaccaaagtcttgccaagatttcaacctgactcttctgtgtgactgccggacccctgagagcaacagggaggccattcccagatcatctgtgagacctggctgggggtcccagaccccagctatggtatagtaagctttggtcagctccttcctttttgagggcatgaggaaggcaaagctgcagtcaagcgttcatgaagcagtctatgccccatgtaaacagcgtggctggttagttaacctctctgagcccttctcattggctgaattcatgactgatgagtagtgagagaatatgagtgaaggtgatttgtaaactatgatgtgtcaaacacatttaagggacaatgatgatactagagaaaaaacactggactcaggctcagatgtgggtttgagatctgtctgccatttacagtgggtgacttttgggaaagtcagttaacttctctgggtctccaataccatctgaaacctctctagagttgtaggcactgggcctatttgaggggttgtttttgctaagaccctgggaatgcctcctgtagctcagcagaaggaccagggccaggtgggtattcctggtggaagcaaagtcagctgactgggcaccctcaaatgaacttttgtggttgtcaggaacgtgtgacgacggctggaggccaacagagtccctacaggtggtgctcacggtaatgcaccgacaatgagtggctgttttccagtttctggcctccgctgcctatctagggtaagtgggtccctccaggggtctcctaggatgaggcctcagcccccagtttcccatcacctttccatagggccttgggagaggccctatccagcccgttttaggtttaccctcacctctactggggcttcattaattcctagaagcttccatcccaggtgtggggtcctgatgctttatatctgcaatttgaaggatcctgggccactgaaatgcccactggatgttgatgagaccagagggtgactctagggatgaggtggaagggacagcttggttagggaggcagatagccaatcgaaatcccagctccgaaatgaggagcttgggtttctgtttcacaaggtgtgccaggccataagcacaccaggaatatgagagaggggcttaggaagaaaccagaaagagaaacaatcccatctcaattaactggggtgggagctgggcgggagaaaagcagtgtgtgggtatctggaagctgcatgtcacctgctcactgcccctctgcgcctctcacacactggcaggcaaaggtgatggaaacttgctgccgagggctcttgctgcctccattgcttgcctttccttgtgcccagacatgtcccctcttgtcctctgtcctctcccatgctgcctaccaccctcccctccaacaagaatctggcccaaggtctccgcttcctggaactcccttatccctacccctactctgtcttcctgtccagcagtctgtctccaagatcccctagaatgacctcctctcagccctctcctccacaccccccaagtccccactacctggcccctcccactcctctgccttttcagccactgctgctctcttctcttctcccttacctgtctcccaggtgtgtcatggcctggtgcgggaggctcttacctccccaagccccactgcttctcctgctgcccgcttgcttcggactctggcagaaaccccacctgctgacacgttcctcctggggaattggcaagtgattagtgatgagctgtcagcacagggccctaaaactccccgaagaagctgtgccccatccctagacccctgttcagtgccattgggctagaagcagctcccagagagccatagattccccatggcccaaaaggagaatgaggaaactggtccagttgggtggatgggtggttggtttcccttgactctacctcagggaatgagggaggggagagttcccaccaccctttcttgatccacaccaacaacaggggccactggaagtctccaaaacagtccagtccagaaacctccccaaagtggtgatccttggaagctgctcttcccttcttttgacccttgttaagccccattggccctcgatgagagtaggggaaacaggtgccgagaagccctctgggcataaaccccactgcagttaactaagaggtgccactggagtagtcagggaaggctggggatagaggtggtggcattgggtactcctcccagcttaaccagacttgggtcctcctcaggtgttggatgtgccagcgcctctggccgtggcccgctaaccagcctctcccgggcgggctcctgccgcgccccctctcgcttgccccctcctcctcctcctcctgctgctctcccccctgctcccaggacggcaggatggccgcgcagggcgcgccgcgcttcctcctgaccttcgacttcgacgagactatcgtggacgaaaacagcgacgattcgatcgtgcgcgccgcgccgggccagcggctcccggagagcctgcgagccacctaccgcgagggcttctacaacgagtacatgcagcgcgtcttcaagtacctgggcgagcagggcgtgcggccgcgggacctgagcgccatctacgaagccatccctttgtcgccaggcatgagcgacctgctgcagtttgtggcaaaacagggcgcctgcttcgaggtgattctcatctccgatgccaacacctttggcgtggagagctcgctgcgcgccgccggccaccacagcctgttccgccgcatcctcagcaacccgtcggggccggatgcgcggggactgctggctctgcggccgttccacacacacagctgcgcgcgctgccccgccaacatgtgcaagcacaaggtgctcagcgactacctgcgcgagcgggcccacgacggcgtgcacttcgagcgcctcttctacgtgggcgacggcgccaacgacttctgccccatggggctgctggcgggcggcgacgtggccttcccgcgccgcggctaccccatgcaccgcctcattcaggaggcccagaaggccgagcccagctcgttccgcgccagcgtggtgccctgggaaacggctgcagatgtgcgcctccacctgcaacaggtgctgaagtcgtgctgagtctggccgcctgcaggggggtacccgggccaacggcggagggggcggggaagggagattcggcaaagacagctttactactccctt

SEQ ID NO: 12494 - DNA, 136 bp, Homo sapiens
tttttttttttttttttgagatggagtgttgctctgtcgcccaggctggagtgcagcatgatcttggctcactgcaacctctgcctcccgggttcaagtgattctcctgcctcagcctcccgagtagctgggatta

SEQ ID NO: 12495 - DNA, 496 bp, Homo sapiens
tccagtctactgtggagggaacccaggatcctgaaattctcctggccgcaagaactccccacagaggcagaagagggtctccacctatggccccaggcctttgcgatcttgcttcacccaccgcgaccccacactatttctgtgctgtccacactctcttgcctcccgacccccgcactcccttctagcacccccaaaggaaaagccagaggaacaatcgcctcctggtggtggtacgaggtagcgcaccgtccggctcgggtccggacagccagtaacctcgcagagagtgacggtgtctccttgcatcccagcctcgtctatgcagcaagagaccagggacttcaccaaagtcaccctcgcgggctgggccttccacgcatcccccccaccccccatggaacagaaagccatgtttttaagcagaaccagcgaaacccaagcccctccttcctctggtgttttacaactataaaggaggtgaagggggaagaaa

SEQ ID NO: 12496 - DNA, 46 bp, Homo sapiens
gtctccctatgttgtccaggctggtctcgaactccggggctcaagc

SEQ ID NO: 12497 - DNA, 496 bp, Homo sapiens; identical to SEQ ID NO: 12495

SEQ ID NO: 12498 - DNA, 165 bp, Homo sapiens; identical to SEQ ID NO: 5838

SEQ ID NO: 12499 - DNA, 143 bp, Homo sapiens; identical to SEQ ID NO: 5839

SEQ ID NO: 12500 - DNA, 151 bp, Homo sapiens; identical to SEQ ID NO: 5841

SEQ ID NO: 12501 - DNA, 202 bp, Homo sapiens; identical to SEQ ID NO: 6792

SEQ ID NO: 12502 - DNA, 125 bp, Homo sapiens; identical to SEQ ID NO: 5842
  SITE (33): n equals a,t,g, or c
  SITE (49): n equals a,t,g, or c
  SITE (61): n equals a,t,g, or c
  SITE (90): n equals a,t,g, or c
  SITE (91): n equals a,t,g, or c
  SITE (116): n equals a,t,g, or c
  SITE (117): n equals a,t,g, or c

SEQ ID NO: 12503 - DNA, 126 bp, Homo sapiens; identical to SEQ ID NO: 6134
  SITE (9): n equals a,t,g, or c
  SITE (10): n equals a,t,g, or c
  SITE (14): n equals a,t,g, or c
  SITE (20): n equals a,t,g, or c
  SITE (95): n equals a,t,g, or c
  SITE (107): n equals a,t,g, or c
  SITE (108): n equals a,t,g, or c
  SITE (110): n equals a,t,g, or c
  SITE (118): n equals a,t,g, or c

SEQ ID NO: 12504 - DNA, 195 bp, Homo sapiens; identical to SEQ ID NO: 5845
  SITE (3): n equals a,t,g, or c
  SITE (30): n equals a,t,g, or c
  SITE (32): n equals a,t,g, or c
  SITE (37): n equals a,t,g, or c

SEQ ID NO: 12505 - DNA, 77 bp, Homo sapiens; identical to SEQ ID NO: 6798

SEQ ID NO: 12506 - DNA, 152 bp, Homo sapiens; identical to SEQ ID NO: 6129

SEQ ID NO: 12507 - DNA, 165 bp, Homo sapiens; identical to SEQ ID NO: 5838

SEQ ID NO: 12508 - DNA, 143 bp, Homo sapiens; identical to SEQ ID NO: 5839

SEQ ID NO: 12509 - DNA, 151 bp, Homo sapiens; identical to SEQ ID NO: 5841

SEQ ID NO: 12510 - DNA, 125 bp, Homo sapiens; identical to SEQ ID NO: 5842
  SITE (33): n equals a,t,g, or c
  SITE (49): n equals a,t,g, or c
  SITE (61): n equals a,t,g, or c
  SITE (90): n equals a,t,g, or c
  SITE (91): n equals a,t,g, or c
  SITE (116): n equals a,t,g, or c
  SITE (117): n equals a,t,g, or c

SEQ ID NO: 12511 - DNA, 126 bp, Homo sapiens; identical to SEQ ID NO: 6134
  SITE (9): n equals a,t,g, or c
  SITE (10): n equals a,t,g, or c
  SITE (14): n equals a,t,g, or c
  SITE (20): n equals a,t,g, or c
  SITE (95): n equals a,t,g, or c
  SITE (107): n equals a,t,g, or c
  SITE (108): n equals a,t,g, or c
  SITE (110): n equals a,t,g, or c
  SITE (118): n equals a,t,g, or c

SEQ ID NO: 12512 - DNA, 195 bp, Homo sapiens; identical to SEQ ID NO: 5845
  SITE (3): n equals a,t,g, or c
  SITE (30): n equals a,t,g, or c
  SITE (32): n equals a,t,g, or c
  SITE (37): n equals a,t,g, or c

SEQ ID NO: 12513 - DNA, 152 bp, Homo sapiens; identical to SEQ ID NO: 6129

SEQ ID NO: 12514 - DNA, 165 bp, Homo sapiens; identical to SEQ ID NO: 5838

SEQ ID NO: 12515 - DNA, 143 bp, Homo sapiens; identical to SEQ ID NO: 5839

SEQ ID NO: 12516 - DNA, 151 bp, Homo sapiens; identical to SEQ ID NO: 5841

SEQ ID NO: 12517 - DNA, 125 bp, Homo sapiens; identical to SEQ ID NO: 5842
  SITE (33): n equals a,t,g, or c
  SITE (49): n equals a,t,g, or c
  SITE (61): n equals a,t,g, or c
  SITE (90): n equals a,t,g, or c
  SITE (91): n equals a,t,g, or c
  SITE (116): n equals a,t,g, or c
  SITE (117): n equals a,t,g, or c

SEQ ID NO: 12518 - DNA, 126 bp, Homo sapiens; identical to SEQ ID NO: 6134
  SITE (9): n equals a,t,g, or c
  SITE (10): n equals a,t,g, or c
  SITE (14): n equals a,t,g, or c
  SITE (20): n equals a,t,g, or c
  SITE (95): n equals a,t,g, or c
  SITE (107): n equals a,t,g, or c
  SITE (108): n equals a,t,g, or c
  SITE (110): n equals a,t,g, or c
  SITE (118): n equals a,t,g, or c

SEQ ID NO: 12519 - DNA, 195 bp, Homo sapiens; identical to SEQ ID NO: 5845
  SITE (3): n equals a,t,g, or c
  SITE (30): n equals a,t,g, or c
  SITE (32): n equals a,t,g, or c
  SITE (37): n equals a,t,g, or c

SEQ ID NO: 12520 - DNA, 4493 bp, Homo sapiens
aggaggcagagggggcgtcaggccgcgggagaggaggccatgggcgcgcgcggggcgctgctgctggcgctgctgctggctcgggctggactcaggaagccgggtgagctcggggcgctgctggcgggatggggaggcgggggagcggtggggaggacgggaggtggaggccgcggggagtcacttcttgtctcccgcagagtcgcaggaggcggcgccgttatcaggtagggcgcccaggacgcgcgattcctgccagggccgttgggccgaggtggacggggggcggtgagggggtagaggggggcctttactgctctctcgcccccgcccccgggatcgagaactctgttggcgtggaaagtaactaacggacgctggagggggatgggcgggccctgcagagcacgtgggaggatctccagtgtcacctacttcctgctgcacacacgcgaggggaccctgggtgggcaaaaacgtgctttcccggacggggttgaaggggagaaagggagaggtcgggcttggggggctgcctcccgcggctcagcagttcctctgaccatccgaggaccatgcggccgacgggtcatcacgtcgcgcatcgtgggtggagaggacgccgaactcgggcgttggccgtggcaggggagcctgcgcctgtgggattcccacgtatgcggagtgagcctgctcagccaccgctgggcactcacggcggcgcactgctttgaaacgtgagtgggggtgcgaacggaggggtgcggggacgggcaggaacagggctggagggagtgccaccgaactttacctctggtctgatgccagacttgggcgtgaaagttgtgcgtggatgcggcctggtgttctcctgagccccaggctgtgctgcagccggttacacccactccagttccctttgggtctcctggagggaaccctgttcaggttattccagaatgttcttccagaacatttccacacacttttgggtattctctccctttttctttcaacccaaagttcaccactgaccatcccaccctcatcccccctcctggtggacggtgcggtacagtgtggggcactgagccaaggccagcacccccgggccgctgtgtggactccatcctgccaatcccacattggcgtggtgcatctccccattcctccttgggctgcatgggggtgcccctggaggccttggctcaatgcaaggctccttgggacagctctgggaggtgacaagaccccacccttctgctgcaggagcaggtcctaggactttggttgtggtctgtctgggctccttcatttctgcaggggaccctgggtgttagcaagtagcagcaacaccacagtttcccctcctgcactggaccccagttgtgctcaggtagccagccctccgtccagggcccctgactgctctcttctcttctgccagctatagtgaccttagtgatccctccgggtggatggtccagtttggccagctgacttccatgccatccttctggagcctgcaggcctactacacccgttacttcgtatcgaatatctatctgagccctcgctacctggggaattcaccctatgacattgccttggtgaagctgtctgcacctgtcacctacactaaacacatccagcccatctgtctccaggcctccacatttgagtttgagaaccggacagactgctgggtgactggctgggggtacatcaaagaggatgagggtgaggctggggacaggcgggtcagggaggaactgtctttgttcacctgttcccctgcataggcacaatagccccctgcttggtctgggggtgcaggctatgcccctcttgcttgcagtctctcctcacctgccagggcagggaccaaacacccagttctctcccttccaggggctgtgggggccagaaggagagtgtgagagggaggccagtttggcgcaggcctgtgggtggtgcggtggtggaggggttctggagggcttggcgacataaacctcatacttggatttattcctgcatctttccacctcccccagtgctcaccaatgccccaggcatcaggctcctgggctgcctctccatgcctcccacacccaccctagctctggccgattctcctgcagcactgagcccattcctctccccagaaacttccaagccatgctcaaccgcagctcccacggaaacccctctgggggttcctctggtgggcctgccctggcacctgcgtgtcccccaacacacatgccctgaaagaagtgggcccagcatccggaggagccccggcagccccagactgggcgtgttccctgtatcaggaatcccttccctctgctcccctgtctggcccgtccctgcatcatcccacaacagtagtaacaataacaaacgtggttccttgagcacacgctgtgtgcctggcactgttctagccatgggggcccagcagtgagccaggcgcggcctctcctcctgctggagctcacctaggaatgaagttggtaacgttcttatacccatcttacagatgagaaaactgagagggttatggaaattgccaagaactagtaaatggagaagtcagggccccttgccttagagagggtaagggatgtccccaagtcacaccccggcagttgggagtggggaactcagcactggagccgcctccctctggaggagggatcctttgccttccctgagaaggacccttgctgcaaacacgagtggatatgagccaggggcacggccaggctgcctctgccaccctctctccccagcccagggtagacaggtcacaccaaccccaggctgtgcctcaattcacagtgccggggaggcaggggacaggcacttctggagccccctgcctggtgtgcacctttgctgtgccctgcgcgggctgggaggccttgggcaaaggtgttcatcttacagtgcctcagtttcctcccctgtgaaataggggaatgatggtgccacatcagaggctagttcccaggttgttagtcccgagggcttaggagaggccccgctgacgggaagcgctgcctgcaggttgggtctcattgtcttttgtcatcctctgcaggacaaggtgctggctggcactctgaggcaggaattggacaggtgtgggctcctgtcaggctctgaaacttccccagtgccttgctgggggtcagcggggcaatatccccctgactctccttatctgggagtaggtcctgatgactgccgcctcccaggggtgctgggggtccctaagagtgctgcaacaagcttgtgtccaggcctggaaagcgcccagctgctactgaggccagggctgcagccaggctgcccctcccccaggtctggctttggatgctcatctgaacaccgtctcagctgccttcgcccctccctcggctccttttggctgaggaatctctccatggctgcaggcagggccattgttgccattctacagatagggaaagtgcggctgggggagctctgacagcctgtccctccccggggccttctgtgatgctgctgagggcctctgttgtgctggggtctgggttggagctgggggtaatggagatgaacctgccaggcacagtgggtgccccagggcccccacccccgcagcctatgccatccctccatagaggggcctcaggttgctgtctctctccttcccactatcgtccgcacagcactgccatctccccacaccctccaggaagttcaggtcgccatcataaacaactctatgtgcaaccacctcttcctcaagtacagtttccgcaaggacatctttggagacatggtttgtgctggcaatgcccaaggcgggaaggatgcctgcttcgtgagtgtccttgccaccactcccagcccaggaaagcatcctgtgtccctgtgccttatttgaccctcatgccaaccccgggaggtggagactgttgccccactctgcagatgcagaaacggaggcttggctgctgccagggggaggaggaggatgtgcacccagtctacccagccccatagcccttcccactctcagcccctcccctgccccactcactctgccccaggctgacctcagccccgctgctccccagggtgactcaggtggacccttggcctgtaacaagaatggactgtggtatcagattggagtcgtgagctggggagtgggctgtggtcggcccaatcggcccggtgtctacaccaatatcagccaccactttgagtggatccagaagctgatggcccagagtggcatgtcccagccagacccctcctggccgctactctttttccctcttctctgggctctcccactcctggggccggtctgagcctacctgagcccatgcagcctggggccactgccaagtcaggccctggttctcttctgtcttgtttggtaataaacacattccagttgatgccttgcagggcattcttcaaaagca

SEQ ID NO: 12521 - DNA, 139 bp, Homo sapiens
gtgctggcgcgcgcctgtaaccccagctacttgggaggctgaggcaggagaatcgcttgaacccaggaggtggaggttgcagtgagctgggatcacgccaatgcactccagcctgggcgacaagagcgaaactccatct

SEQ ID NO: 12522 - DNA, 2112 bp, Homo sapiens
atttttaaaagatatcttttgtgtagaagtaacccaggaatgccagcatttgttttgatagtctcattccaatagtagttactttaaaatgaagaatgttcttaatttacaaaatattatgtatgtatttaagttatgaatattgcagatatgtaaatatgtgtatatgtgtgttgattttaatttgtatcttcacagattttattatcagttatgttttgaatttttacctttggagaaaacatactacttaaatcttccagtgtagtgatagcaaattatctttatataaattttattcagattattcaaagtaatcaaagatttttaattatttttattaaattaaatttatcagtataaataattaagatcattaaccttatttaattaaatttattaattttgattatagaaaaatgcattttcttcttaaatagattctttacacttaaagctgaagtgttattttgctacttgtatgtatatcagatactttgtttattaatctaatacgttagtaataaaaggagtactttacaattattgcctgtatattttttcatgtgtaggaaaatgaagaagattatgggacctgttctagttctgtacaatatacaccagtttacaaattacacaatgaaaagggaggaaactcagaaaagcgtaagcttgctcaggtaagtaaggttatttacccttcattcccccacattctcaaattatataattccagtaaattatttaggaacaatttggatccactaattttttatcttatatgaaaacctgcagtattggtcaaggggaggagttagtggaacctgggaaggctacaaggggattgagagtcaaatgtttcagatatcggtctctacatgctttgttagcccatgccctcatagatctcatagtccagtgaaggaaaagacaattgaatgtgtgattcttatagagtgtgaatagcttgatgataaactggaaatcataggattcctttactacaaaaataaaatcaatcttatacatgggtatttggccattaaaatagtctatagaaattaaaatctgaactactataagtctatcctattctaaagttagattattttatttgctataaatagttaaagcttctttttatatgctgatgctacttaaaatattgtttcaagtgactgagtgttcagaatcatagctataagtgttcctggtttttttttcataagtacatttatgaaggctctaactaaacaaaattggtatatacaaaattgtatcttaagtggccttagaaaactagcttcaaaaaagaattcttgagtggactgtagctacaaaattacagaactggaagtggctgcaaagcttcatttataacagttgccaaggtttgcagatgagaaagttgatagctagaatggtcacaacacttgccataagtctcataactgatcagtggcagaaggaggcgaaaagccatctctgatgctcagttagctttcctggatagccaggcaccacagaagtatacatggccataaggtgcttccagggtctttgtctttgagcccattttgtgctgctgtaccagaatacctgaggctgggtaatttgtaaagaacagaagtttatttctcacagttcgggaggctggaaagtccaagatcaaggcactggcaccttatgaggcccttcttgctgtgtcatcccatggtggaaggcagaaaggcaagagagatgagggggccaaactcacccttttataacagcactaatcccacccaagagggtggaaccctcatggcccaatcacctcttaaaagtcccacttcttaataccattacaatggcaattaaatttcaacatgagattttgagaggacaaaattcaaaccgtaacaacagtctttaagaatgggaaaggatagtgaagctgtactgaaactctagtcctttgtaaaaaaaaaaaaaaaaaaaaaaaaaatcccattaattcagtcattcatcaacactatatgccacacacttttctagataccaggtgtatataaaaggaaaacacaaaaattctctgctttcatgggactgtttttgtaacatactgagtat

SEQ ID NO: 12523 - DNA, 2112 bp, Homo sapiens
atttttaaaagatatcttttgtgtagaagtaacccaggaatgccagcatttgttttgatagtctcattccaatagtagttactttaaaatgaagaatgttcttaatttacaaaatattatgtatgtatttaagttatgaatattgcagatatgtaaatatgtgtatatgtgtgttgattttaatttgtatcttcacagattttattatcagttatgttttgaatttttacctttggagaaaacatactacttaaatcttccagtgtagtgatagcaaattatctttatataaattttattcagattattcaaagtaatcaaagatttttaattatttttattaaattaaatttatcagtataaataattaagatcattaaccttatttaattaaatttattaattttgattatagaaaaatgcattttcttcttaaatagattctttacacttaaagctgaagtgttattttgctacttgtatgtatatcagatactttgtttattaatctaatacgttagtaataaaaggagtactttacaattattgcctgtatattttttcatgtgtaggaaaatgaagaagattatgggacctgttctagttctgtacaatatacaccagtttacaaattacacaatgaaaagggaggaaactcagaaaagcgtaagcttgctcaggtaagtaaggttatttacccttcattcccccacattctcaaattatataattccagtaaattatttaggaacaatttggatccactaattttttatcttatatgaaaacctgcagtattggtcaaggggaggagttagtggaacctgggaaggctacaaggggattgagagtcaaatgtttcagatatcggtctctacatgctttgttagcccatgccctcatagatctcatagtccagtgaaggaaaagacaattgaatgtgtgattcttatagagtgtgaatagcttgatgataaactggaaatcataggattcctttactacaaaaataaaatcaatcttatacatgggtatttggccattaaaatagtctatagaaattaaaatctgaactactataagtctatcctattctaaagttagattattttatttgctataaatagttaaagcttctttttatatgctgatgctacttaaaatattgtttcaagtgactgagtgttcagaatcatagctataagtgttcctggtttttttttcataagtacatttatgaaggctctaactaaacaaaattggtatatacaaaattgtatcttaagtggccttagaaaactagcttcaaaaaagaattcttgagtggactgtagctacaaaattacagaactggaagtggctgcaaagcttcatttataacagttgccaaggtttgcagatgagaaagttgatagctagaatggtcacaacacttgccataagtctcataactgatcagtggcagaaggaggcgaaaagcatctctgatgctcagttagctttcctggatagccaggcaccacagaagtatacatggccataaggtgcttccagggtctttgtctttgagcccattttgtgctgctgtaccagaatacctgaggctgggtaatttgtaaagaacagaagtttatttctcacagttcgggaggctggaaagtccaagatcaaggcactggcaccttatgaggcccttcttgctgtgtcatcccatggtggaaggcagaaaggcaagagagatgagggggccaaactcacccttttataacagcactaatcccacccaagagggtggaaaccctcatggcccaatcacctcttaaaagtcccacttcttaataccattacaatggcaattaaatttcaacatgagattttgagaggacaaaattcaaaccgtaacaacagtctttaagaatgggaaaggatagtgaagctgtactgaaactctagtcctttgtaaaaaaaaaaaaaaaaaaaaaaaaaatcccattaattcagtcattcatcaacactatatgccacacacttttctagataccaggtatatataaaaggaaaacacaaaaattctctgctttcatgggactgtttttgtaacatactgagtat

SEQ ID NO: 12524 - DNA, 2111 bp, Homo sapiens
atttttaaaagatatcttttgtgtagaagtaacccaggaatgccagcatttgttttgatagtctcattccaatagtagttactttaaaatgaagaatgttcttaatttacaaaatattatgtatgtatttaagttatgaatattgcagatatgtaaatatgtgtatatgtgtgttgattttaatttgtatcttcacagattttattatcagttatgttttgaatttttacctttggagaaaacatactacttaaatcttccagtgtagtgatagcaaattatctttatataaattttattcagattattcaaagtaatcaaagatttttaattatttttattaaattaaatttatcagtataaataattaagatcattaaccttatttaattaaatttattaattttgattatagaaaaatgcattttcttcttaaatagattctttacacttaaagctgaagtgttattttgctacttgtatgtatatcagatactttgtttattaatctaatacgttagtaataaaaggagtactttacaattattgcctgtatattttttcatgtgtaggaaaatgaagaagattatgggacctgttctagttctgtacaatatacaccagtttacaaattacacaatgaaaagggaggaaactcagaaaagcgtaagcttgctcaggtaagtaaggttatttacccttcattcccccacattctcaaattatataattccagtaaattatttaggaacaatttggatccactaattttttatcttatatgaaaacctgcagtattggtcaaggggaggagttagtggaacctgggaaggctacaaggggattgagagtcaaatgtttcagatatcggtctctacatgctttgttagcccatgccctcatagatctcatagtccagtgaaggaaaagacaattgaatgtgtgattcttatagagtgtgaatagcttgatgataaactggaaatcataggattcctttactacaaaaataaaatcaatcttatacatgggtatttggccattaaaatagtctatagaaattaaaatctgaactactataagtctatcctattctaaagttagattattttatttgctataaatagttaaagcttctttttatatgctgatgctacttaaaatattgtttcaagtgactgagtgttcagaatcatagctataagtgttcctggtttttttttcataagtacatttatgaaggctctaactaaacaaaattggtatatacaaaattgtatcttaagtggccttagaaaactagcttcaaaaaagaattcttgagtggactgtagctacaaaattacagaactggaagtggctgcaaagcttcatttataacagttgccaaggtttgcagatgagaaagttgatagctagaatggtcacaacacttgccataagtctcataactgatcagtggcagaaggaggcgaaaagccatctctgatgctcagttagctttcctggatagccaggcaccacagaagtatacatggccataaggtgcttccagggtctttgtctttgagcccattttgtgctgctgtaccagaatacctgaggctgggtaatttgtaaagaacagaagtttatttctcacagttcgggaggctggaaagtccaagatcaaggcactggcaccttatgaggcccttcttgctgtgtcatcccatggtggaaggcagaaaggcaagagagatgagggggccaaactcacccttttataacagcactaatcccacccaagagggtggaaccctcatggcccaatcacctcttaaaagtcccacttcttaataccattacaatggcaattaaatttcaacatgagattttgagaggacaaaattcaaaccgtaacaacagtctttaagaatgggaaaggatagtgaagctgtactgaaactctagtcctttgtaaaaaaaaaaaaaaaaaaaaaaaaaatcccattaattcagtcattcatcaacactatatgccacacacttttctagataccaggtgtttataaaaggaaaacacaaaaattctctgctttcatgggactgttttgtaacatactgagtat

SEQ ID NO: 12525 - DNA, 192 bp, Homo sapiens
tttttctctgagacggagtcttgctctgtcccccaggctggagtgcagtggtgcgatctcggctcactgcaagctccgcctcctgggttcacgccattctcctgcctcagcctcccaagcagctgggactacaggcacccgccaccacgcctggctaattttgtttttgtatttttagtagagacggggttt

SEQ ID NO: 12526 - DNA, 154 bp, Homo sapiens
tgagacggagtcttgctctgtcccccaggctggagtgcagtggtgcgatctcggctcactgcaagctccgcctcctgggttcacgccattctcctgcctcagcctcccaagcagctgggactacaggcacccgccaccacgcctggctaatttt

SEQ ID NO: 12527 - DNA, 154 bp, Homo sapiens; identical to SEQ ID NO: 12526

SEQ ID NO: 12528 - DNA, 450 bp, Homo sapiens
cagtaatttatttgacagatctctattctataaatgtgtaatgtgatgaagaaagagatctttcttttttaatgaaaacattaatgtgttaataccctgtatggataatgcttgacatttagtggtttccaaaatatattagtatattgttgaacatacattatgccttagaaatgcacattctgtattttgtgggatgataatctaattcagtatagaatatgctgtttggcaatgagtttgtggccagatttcaaatagggagttaagtggtactttcacaatccaaagatttttagttaaaaatcatgtagtctaatatgctgcagttatttttttatatttttcaatgcatttaattatcttttttataattctttgtactaactcagcatgtaacaaccaatttacatggaaataaatcgaaatatgataactattatgcttaaa

SEQ ID NO: 12529 - DNA, 375 bp, Homo sapiens
taacctggaggaagtctctggtatggagttctgagagcttaagagctaaacatgagtttagacacacaagattctaaaatgcaaatgtttattttgaagcaggcattgacaacacaaaaactgtgtagtggtcttgatgctggattgtttctagagtcacaatgaattatttttatgagattaccttatttttatatatgacaaactacttctataatgcttattatggtaaaataaaattggaaaaaattaaaactgacctataagagtgttaaggacctaatagagtgacatatataaattaagcataaaatatgtaaccaggaaaagactgttaacattacatttatgcaaattaaatgcccttaaatttca

SEQ ID NO: 12530 - DNA, 4702 bp, Homo sapiens
gtgccaatgttggccagtcgcggtggttcacgcctgtaatcccagcactttgggaggctgaggtgggtggatcacgaggtcaggagattgagaccatcctggctaacacggtgaaaccccatctctactaaaaatacaaaaaaattagccgggcatggtggcagacacctgtagtcccagctactcgggaggctgaggcaggagaatggtgtgaaccccggaggcggagcttgcaatgagctgagattgtgccactgcattccagcctgggcgatagagcgagactccatctcaaataaataaataaataaatagtgccaatgttatgaccagaggcagcaaggcctgacacagcatccaaggccagtctgggcacctgctcttttgcacattaatataataagctttaacaagaaatacatgttaactttctcaggatcaaaggattcagaaggctattttgctctcattttatccttaggcttcagcagaagaaacacttcctataaatctcgcccaaacaggaaaggtaagtggcctaaaatttttctagtattttcaaaatgacccagttacaataggaaatttcttcttgtactattgtcactaatcccgactcaatatcctttaaaggacaaagatgcatgcataagtaaaaatatgacaggtcacaatcacgccggggtggtcctggggcgaggcccaagttccctgcacgcaccggcacaagcacgcacactgtgatggggaggacgtttacgtaccatgtccacaccactccagacttggtgagcgccagtaggaactgagctccacactcaatctggcacaccccctgtccatttagtctctcaatgttctggggaatgttgcagccttcacttccgccccggcccaattttccaaagtcaccatcaccccaggaaaataccaaacctaggtttaaaaatagggaagggaagggaagggagagaagaaaggaaagataaagaaagcccaacctccttccaaaatgtcatgagaatcttgagcacatatggtccttggcatgaccacatgacctgcagagcccctgttatagaactcatttttatattttccttagtataacagttaatgtaatatgtcatttttgttaatagtgtctttttgtcattttactttttaaaagattgtattgaaatatacatacaggaaagtgcatctatcataagtgtgcaaattgatgaattctaaaatctttattgtacctgtttagcacctagattgacactgaacataactaacaaccagaaatctccgtgtactcccttcctgtaactacccctgcgcccgaccaaatcactctcttctaacagcataactttgtgtgactagcttttttaatgtaaaagaatgaaatctacagcatgtattcatttgcatctggcttctgccacccaacattatatttgtgggattcatttgtacagttgcatattagtttgcagatccctcactctcgtttctatatggtattatattgcataaacgtaccacactttatctaactactgttaaatatttgtgcatcttctacttgggggcgatttcaaatagtgctgctatgaacattcttgtaaatgtcttttggtgaacatatgcaacacatatatgcgttgttgttggttcccaggaggggcattcctgggtcataaacaatgcatgtgttcaggtttagtatggtataatgccaaacaggtttccaaagtgtttgtgccactttacatacccgccattattgaaaaagagttctgtttgctccacattttcaccaatacttgatattttgtttttttttcttttaaaccgtactagtgggtgtgcagtgatattgcaatgtggttttaatttgcatcttccttgtgacaaattaaccttgattactgtaagccacttggaaatgtgatttaaattcatataaagatatagtagcaaaacacatagtaagttactttcatatccagaaagtttagatagaatgatttctatgtaagcttttactgtgtagtctgagtccatgaatattgattacaaaaaacacatctgtaggtgagttacaatacctcacttataattcaaaattcatgttgtgttagctcaatatttttcaaataatttttgcatgcaattttcaccttctttctgagtagtttcaggtattttgtatggttccagcagtcagttaggttgccattgtttggaagcacacatccacgtatctgcaccatgatgatatgacacgcccataccccccatttcacattttgtcagaagtgcatagttatcactaactttgccagtagaaatgtactcccaatttcccacagacttatcttgaataatctctccactgaagcataacaggttttgaattctgttagaatagttgtttttactatcttttaattttatacaaatttcaaagttacgtaatacttttatttaaaaagtgaaacaaagcttttcctctcccttacccacatgttagcccagcagagggggaaagcattggccccaggccaaaatcataaacgctttcaattaactaataataattgctggcatgttgccattaaatatccttgtctcattatccctggttgcttcatcagacccataggtcactgaagcccacttttgagacaaagactatttctcccccaaaagtcaagggaaatataaaaagtgaaattagtgattaagcatagaagtcaattaatacaatcattttgtcttaattatttaaagtccagtttttttcctccagcaaacctgaaaatacactatcctccagctatcagaattatattgagatctactcacatttatgatgatgttcagagattcatcattgggaaggaaaatgcacacgctgcggcggtcttgcatgactctgttgtggaaattcaatttgttcattgtgttttgggctctctgggtggtcagggctgggctctgggtccttggcaattcctcaggttcccagcactccaaagccaagctcacctcctcatcacacgccctgcaggagaagcatcagggtgtccgactacgtgggtttcatagctgtggaaaagccaaaggggagactcctgaagaaaggcggtgaagactgtgaagagcgggtcaggaagatgagcacagcactgctactcctgtgggcacagggacagcatgtctccagccagcgccaccttgtttaatacatgggaactcactgaaattcattctgtattttgcccacaaagttttaaagctttcatccacagtcaggaattaaacttataccaatgagagcctcacacattcaaggatgtactaagcactacaggcctcacagaaacagagatcccatcttggagttttcagtcccacatgggagataaagggttttgaacatgaaatgacaaaaacaacagcaagaagaaaattctcgtcctttttcattactatcaaactcaaataaatgtcttggctcttacattacattcattcttcaaccattgtggtctggcttccacttccttcacttcaccaacatggctctgccaaaggaagcctgtgatctctaggccatcactttaattgatctctctacaacatttatcctggtcgttaagccctccttacaacattcttctctctttgtttttatggctctgtctctcctgcttctttaacctgataatgcatacttgatttttccatttattatttcatcaaccaattaatacacagataaaacaagactgtgtatatcaaaccatgtttgtatagaaaaaatggattttggatgcctctcatatgtaattagttctattaaacatattaattgtattgtttaatttatcaggtttttgacacagagaattttgtttgcaagtaataaaaattttatctccaattttcaataattacacccattatttctgttttatgtctcattgcattggtgagatcttgcagaataattttagaacagtagtgggtattttctacttttaatgggtgtgtctagtatttcatatattgttgcttatagaacactattcaaccaagacatgtcaagactagttgtctctcaaaccattagtatttatattattcctttccagctacatttgtgggatgtaaaagaccatttccaggaatatggaactgttttactaggtggagggtatatataaccatacaatagtcacagaaactacattaatactcacataaatcaaagcataaatgacatagaatcttggcagatttgcttaaggttaaatgtataactcttatcagcaggaggtgaaagaatatattcttagatacttggcacatttagaaaatataatctaatattctttttaaagaacaggccgggcacggtggctcacgcctgtaatcccagcactttgggaggccaaggcgggcggatcacgaggtcaggagatccagaccatcctggataacacagtgaaaccccgtctctaccaaaaatacaaaaaattatctgggcatggtggcgggcgcctgtagtcccagctactcgggaggctgaggcaggagaatggcgtgaacccaggaggtggagcttgcagtgagccgagatcacgccactgcactccggcctgggcaaaagagcgagactccgtctcaaacaaacaaa

SEQ ID NO: 12531 - DNA, 4721 bp, Homo sapiens
gtgccaatgttggccagtcgcggtggttcacgcctgtaatcccagcactttgggaggctgaggtgggtggatcacgaggtcaggagattgagaccatcctggctaacacggtgaaaccccatctctactaaaaatacaaaaaaattagccgggcatggtggcagacacctgtagtcccagctactcgggaggctgaggcaggagaatggtgtgaaccccggaggcggagcttgcaatgagctgagattgtgccactgcattccagcctgggcgatagagcgagactccatctcaaataaataaataaataaatagtgccaatgttatgaccagaggcagcaaggcctgacacagcatccaaggccagtctgggcacctgctcttttgcacattaatataataagctttaacaagaaatacatgttaactttctcaggatcaaaggattcagaaggctattttgctctcattttatccttaggcttcagcagaagaaacacttcctataaatctcgcccaaacaggaaaggtaagtggcctaaaatttttctagtattttcaaaatgacccagttacaataggaaatttcttcttgtactattgtcactaatcccgactcaatatcctttaaaggacaaagatgcatgcataagtaaaaatatgacaggtcacaatcacgccggggtggtcctggggcgaggcccaagttccctgcacgcaccggcacaagcacgcacactgtgatggggaggacgtttacgtaccatgtccacaccactccagacttggtgagcgccagtaggaactgagctccacactcaatctggcacaccccctgtccatttagtctctcaatgttctggggaatgttgcagccttcacttccgccccggcccaattttccaaagtcaccatcaccccaggaaaataccaaacctaggtttaaaaatagggaagggaagggaagggagagaagaaaggaaagataaagaaagcccaacctccttccaaaatgtcatgagaatcttgagcacatatggtccttggcatgaccacatgacctgcagagcccctgttatagaactcatttttatattttccttagtataacagttaatgtaatatgtcatttttgttaatagtgtctttttgtcattttactttttaaaagattgtattgaaatatacatacaggaaagtgcatctatcataagtgtgcaaattgatgaattctaaaatctttattgtacctgtttagcacctagattgacactgaacataactaacaaccagaaatctccgtgtactcccttcctgtaactacccctgcgcccgaccaaatcactctcttctaacagcataactttgtgtgactagcttttttaatgtaaaagaatgaaatctacagcatgtattcatttgcatctggcttctgccacccaacattatatttgtgggattcatttgtacagttgcatattagtttgcagatccctcactctcgtttctatatggtattatattgcataaacgtaccacactttatctaactactgttaaatatttgtgcatcttctacttgggggcaatttcaaatagtgctgctatgaacattcttgtaaatgtcttttggtgaacatatgcaacacatatatgcgttgttgttggttcccaggaggggcattcctgggtcataaacaatgcatgtgttcaggtttagtatggtataatgccaaacaggtttccaaagtgtttgtgccactttacatacccgccattattgaaaaagagttctgtttgctccacattttcaccaatacttgatattttgtttttttttcttttaaaccgtactagtgggtgtgcagtgatattgcaatgtggttttaatttgcatcttccttgtgacaaattaaccttgattactgtaagccacttggaaatgtgatttaaattcatataaagatatagtagcaaaacacatagtaagttactttcatatccagaaagtttagatagaatgatttctatgtaagcttttactgtgtagtctgagtccatgaatattgattacaaaaaacacatctgtaggtgagttacaatacctcacttataattcaaaattcatgttgtgttagctcaatatttttcaaataatttttgcatgcaattttcaccttctttctgagtagtttcaggtattttgtatggttccagcagtcagttaggttgccattgtttggaagcacacatccacgtatctgcaccatgatgatatgacacgcccataccccccatttcacattttgtcagaagtgcatagttatcactaactttgccagtagaaatgtactcccaatttcccacggacttatcttgaataatctctccactgaagcataacaggttttgaattctgttagaatagttgtttttactatcttttaattttatacaaatttcaaagttacgtaatacttttatttaaaaagtgaaacaaagcttttcctctcccttacccacatgttagcccagcagagggggaaagcattggccccaggccaaaatcataaacgctttcaattaactaataataattgctggcatgttgccattaaatatccttgtctcattatccctggttgcttcatcagacccataggtcactgaagcccacttttgagacaaagactatttctcccccaaaagtcaagggaaatataaaaagtgaaattagtgattaagcatagaagtcaattaatacaatcattttgtcttaattatttaaagtccagtttttttcctccagcaaacctgaaaatacactatcctccagctatcagaattatattgagatctactcacatttatgatgatgttcagagattcatcattgggaaggaaaatgcacacgctgcggcggtcttgcatgactctgttgtggaaattcaatttgttcattgtgttttgggctctctgggtggtcagggctgggctctgggtccttggcaattcctcaggttcccagcactccaaagccaagctcacctcctcatcacacgccctgcaggagaagcatcagggtgtccgactacgtgggtttcatagctgtggaaaagccaaaggggagactcctgaagaaaggcggtgaagactgtgaagagcgggtcaggaagatgagcacagcactgctactcctgtgggcacagggacagcatgtctccagccagcgccaccttgtttaatacatgggaactcactgaaattcattctgtattttgcccgcaaagttttaaagctttcatccacagtcaggaattaaacttataccaatgagagcctcacacattcaaggatgtactaagcactacaggcctcacagaaacagagatcccatcttggagttttcagtcccacatgggagataaagggttttgaacatgaaatgacaaaaacaacagcaagaagaaaattctcgtcctttttcattactatcaaactcaaataaatgtcttggctcttacattacattcattcttcaaccattgtggtctggcttccacttccttcacttcaccaacatggctctgccaaaggaagcctgtgatctctaggccatcactttaattgatctctctacaacatttatcctggtcgttaagccctccttacaacattcttctctctttgtttttatggctctgtctctcctgcttctttaacctgataatgcatacttgatttttccatttattatttcatcaaccaattaatacacagataaaacaagactgtgtatatcaaaccatgtttgtatagaaaaaatggattttggatgcctctcatatgtaattagttctattaaacatattaattgtattgtttaatttatcaggtttttgacacagagaattttgtttgcaagtaataaaaattttatctccaattttcaataattacacccattatttctgttttatgtctcattgcattggtgagatcttgcagaataattttagaacagtagtgggtattttctacttttaatgggtgtgtctagtatttcatatattgttgcttatagaacactattcaaccaagacatgtcaagactagttgtctctcaaaccattagtatttatattattcctttccagctacatttgtgggatgtaaaagaccatttccaggaatatggaactgttttactaggtggagggtatatataaccatacaatagtcacagaaactacattaatactcacataaatcaaagcataaatgacatagaatcttggcagatttgcttaaggttaaatgtataactcttatcagcaggaggtgaaagaatatattcttagatacttggcacatttagaaaatataatctaatattctttttaaagaacaggccgggcacggtggctcacgcctgtaatcccagcactttgggaggccaaggcgggcggatcacgaggtcaggagatccagaccatcctggataacacagtgaaaccccgtctctaccaaaaatacaaaaaattatctgggcatggtggcgggcgcctgtagtcccagctactcgggaggctgaggcaggagaatggcgtgaacccaggaggtggagcttgcagtgagccgagatcacgccactgcactccggcctgggcaaaagagcgagactccgtctcaaacaaacaaacaaacaaataaataaataa

SEQ ID NO: 12532 - DNA, 5977 bp, Homo sapiens
aacagtaatggtaattttgttttcataaataaaattttaaattgaatatctacaagccggtcatagcatatgcttctccaagcagaagagagtgtaacacttgtcaggcactagctctgtctctaaaatgaggcatgggtgcctcctcaccagttagcaatttcctaaagcaaagtcttgttaataccttgcagtaggagcatcttcaagaataacaatcttttggccgggtgcggtggctcacgcctgtaatcccagcactttgggaggccgaggcaggtggatcacgaggtcaggagatcgagaccacggtgaaaccccgtctctactaaaaatacaaaaaattagctgggcgtggtggcgggcgcctgtagtcccagctactcgggaggctgaggcaggagaatggcatgaacccaggaggcagaacttgcagtgagccgagatcgcgccactgcactccagcctgggcgacagagcgagactctgtctcaaaaaaaaaaaaaaaaaaaaaggataacaatctttccacacacttttcacgtggacttcagagtgggaacgcctcttttctgaggaccccgcccccaacccctgctgctgagtaggcagatacaccagcgggcaaaacggatgggtcccggcctcatggttcttcaagcagtaagactcggctgagttcatcaacagctgtgatttcaacaggacgagggccatgtcgtgacccccacgtcccccaagtcaggatggcacgccacccccaggccacctgcagccttacctgccccgagtccgtgaccgccaggcagtgcagggccccgacagccacatgcacgatcttcttccctctcagcccttccaccacctacagtttccacacgtgcacgtcagagccctggcgcaacctgaagtaatccccctttcccctgagaaggaggcccgtggtggagtgttacaatatagttgtggtctgacaatgctatacaagaagacactcattgtctcacatctttcacagccagctcaatgacatcacacacagcacccaaggtcttcgaacttgtattcaaaatcatacaccattaattcaaattaacttattaagtcagctgggaaaaaccttaataccttaatacatgttctacaatatttaagttactgttgtaggttttcatatagactgaaaataagacacattactgcaaacacctatccaaagtcctatctggtatacatctttctcagagtgccaatgtcggccagtagcagtggttcacgcctgtaatcccagcactttgggaggccgaggcgggtggatcacaaggtcaggagatcgagaccatcctggctaacatggtgaaaccctatctctactaaaaacacaaaaaaattagccgggcatggtggcagacgcctgtagtcccagctactcgggaggctgaggcaggagaatggcgtgaacccgggagacggagcttgcagtgagctgagattgtgccactgcattccagcctgggcgacagagcgagactccatctcaaataaataaataaataaataaataaatagtgccaatgttatgaccagaggcagcaaggcctgacacagcatccaaggccagtctgggcacctgctcatttgcacattaatataataagcttttacaagaaatacatgttaactttctcaggatcaaaggattcagaaggctattttgctctcattttatccttaggcttcagcagaagaaacacttcctataaatctcgcccaaacaggaaaggtaagtggcctaaaatttttctagtattttcaaaatgacccagttacaataggaaatttcttcttgtactattgtcactaatcccgactcaatatcctttaaaggacaaagatgcatgcataagtaaaaatatgacaggtcacaatcacgccggggtggtcctggggcgaggcccaagttccctgcacgcgtcggcacaagcacgcacactgtgacggggaggacgtttacgtaccatgtccacaccactccagacttggtgagcgccagtaggaactgagctccacactcaatctggcacaccccctgtccatttagtctctcaatgttctggggaatgttgcagccttcacttccgccccggcccaattttccaaagtcaccatcaccccaggaaaataccaaacctaggtttaaaaatagggaagggaagggaagggaagggaagggagagaagaaaggaaagataaagaaagcccaacctccttccaaaatgtcatgagaatcttgagcacatatggtccttggcatgaccacatgacctgcagagcccctgttatagaactcatttttatattttccttagtataacagttaatataatatgtcatttttgttaatagtgtctttttgtcattttactttttaaaagattttattgaaatatacatacaggaaagtgcatctatcataagtgtgcaaattgatgaattctaaaatctttattgtacctgtttagcacatagattgacactgaacataactaacaaccagaaatctccgtgtactcccttcctgtaactacccctgcgcccgaccaaatcactctcttctaacagcataactttgtgtgactagcttttttaatgtaaaagaatgaaatctacagcatgtattcatttgcatctggcttctgccacccaacattatatttgtgggattcatttgtacagttgcatattagtttgcagatccctcactctcatttctatatggtattatattgcataaacgtaccacactttatccaactactgttaaatatttgtgcattttctacttgggggtgatttcaaatagtgctgctatgaacattcttgtaaatgtcttttggtgaacatatgcaacacatatatgcgttgttgttggttcccaggaggggcattcctgggtcataaacaatgcgtgtgttcaggtttagtacagtataatgccaaacaggtttccaaagtgtttgtgccactttacatacctgccattattgaaaaagagttctgtttgctccacattgtcaccaatacttgatattttctgttttttttttcttttaaaccgtactagtgggtgtgcagtgatattgcaatgtggttttaatttgcatcttccttgtgacaaccttgattactgtaagccacttggaaatgtgatttaaattcatataaagatatagtagcaaaacgcatactaggttactttcgtatccagaaagtttagatagaatgatttctatgtaagcttttactgtgtagtctgagtccatgaatattgattacaaaaaacacatctgtaggtgagttacaatacctcacttataattccaaattcatgttgtgttagctcaatatttttcaaataatttttgcatgcaattttcaccttctttctgagtagtttcaggtattttgtatggttccagcagtcagttaggttgccattgtttggaagcacacatccacgtatctgcaccatgatgatatgacacgcccataccccccatttcacattttgtcagaagtgcatagttatcactaactttgccagtagaaatgtactcccaatttcccacggacttatcttgaataatctctccactgaagcataacaggttttgaattctgttagaatagttgtttttactatcttttaattttatacaaatttcaaagttacgtaatacttttatttaaaaagtgaaacaaagcttttcctctcctttacccacatgttagtccagcagagggggaaagcattggccccaggccaaaatcataaacgctttcaattaactaataataattgctggcatgttgccattaaatattcttgtctcattatctctggttgctttatcaaacccataggtcactgaagcccacttttgagacaaagactatttctcccccaaaagtcaagggaaatataaaaaatgaaattagtgattaagaatagaagtcaattaatacaatcattttgtcttaattatttaaagtccagttttttccctccagcaaacctgaaaatacactatcctccagctatcagaattatattgagatctactcacatttatgatgatgttcagagattctcattgggaaggaaaaggcacacgctgcggcggtcttgcatgactctgttgttgtggaaattcaatttgttcattgtgttttgggctctctgggtggtcagggctgggctctgggtccttggcaattcctcaggttcccagcactccaaagccaagctcacctcctcatcacacaccctacaggagaagcattagggtgtccgactacgtgggtttcatagctgtggaaaagccaaaggggagactcctgaagaaaggcggtgaagactgtgaagagcgggtcaggaagatgagcacagcactgctactcctgtgggcacagggacagcatgtctccagccagcgccaccttgtttaatacatgggaactcactgaaattcattctgtattttgcccgcaaagttttaaagctttcatccacagtcaggaattaaacttataccaatgagagcctcacacattcaaggatgtactaagcactacaggcctcacagaaacagagatcccatcttggagttttcagtaccacatgggagataaagggttttgaacatgaaatgacaaaaacaacagcaagaagaaaattcttgtcctttttcattactatcagactcaaataaatgtcttggctcttacattacattcattcttcaaccattgtggtctggcttccacttccttcacttcaccaacatggctctgccaaaggaagcccgtgatctctaggccatcactttaattgatctttctacaacatttatcctggttgttaagccctccttacaacattcttctctctttgtttttatagctccatctctcctgcttctttaacttgataatgcatacttgatttttctatttgttatttcataaaccaattaatacacagataaaatgactgtatatcaaaccatgtttgtatagaaaaaatggattttggatgcctctcatatgtaattagttctattaaacatattaattgtattgtttaatttgtcaggtttttgacagaattttgtttacaagtaataaaaattttatctccaattttcaataattacacccattatttctgttttatgtctcattgcattgatgagatcttgcagaataattttaaaacagtagtgggtattttctgcttttaatgggtatgtctagtatttcatatattgttgcttatagaacactattcaaccaagacatgtcaagactagttgtctctcaaaccattagtatttatattattcctttccagctacacttgtaggatgtaaaagaccatttccaggaatatggaactgttttactaggtggagggtatatataaccatataatagtcacagaaactacattaatactcacataaatcaaagcataaatgacatagaatcttggcagatttgcttaaggttaaatgtataactcttatcagcaggaggtgaaagaatatattcttagatacttggcacatttagaaaatataatctaatattctttttaaagaataggccgggcacggtggctcacacctgtaatcccagcactttgggaggccaaggcgggcggatcacgaggtcaggagatcgagaccatcctggctaacacggtgaaaccccgtctctactaaaaatacaaaaaattagctgggcgcggtggcgggcacctgtagtcccagctactcaggaggctgaggcaggagaacggcatgaacccgggaggtggagcttgcagtgagccgagatcgcgccactgcactccagcctgggcgaaagagcgagactctgtctcaaaaaaaaaaaaaaaaaagaataaataaaa

SEQ ID NO: 12533 - DNA, 327 bp, Homo sapiens
acgtgcacgtcagagcggtggcccaacctgaagtaatccccctttcccctgagaggaggcccgtggtggagtgttacaatacggttatggtcttaccatgcgatacaagaagacactcattgtctcacatctttcacagccagctcaatgacatcacacacagcacccaaggtcttcgaacttgtattcaaaatcatacaccattaattcaaattaacttattaagtcagctgggaaaaaccttaataccttaatacatgttctacaatatttaagttactgttgtaggttttcatatagactgaaaataagacacactactgcaaa

SEQ ID NO: 12534 - DNA, 327 bp, Homo sapiens
acgtgcacgtcagagcggtggcccaacctgaagtaatccccctttcccctgagaggaggcccgtggtggagtgttacaatacggttatggtcttaccatgcgatacaagaagacactcattgtctcacatctttcacagccagctcaatgacatcacacacagcacccaaggtcttcgaacttgtattcaaaatcatacaccattaattcaaattaacttattaagtcagctgggaaaaaccttaatatcttaatacatgttctacaatatttaagttactgttgtaggttttcatatagactgaaaataagacacactactgcaaa

SEQ ID NO: 12535 - DNA, 208 bp, Homo sapiens
ctcttagaagtttacccaagagaatttcaagtggatgtccatacacaaacttgtatggaaatgtccattagcaatttcacttgcatagtcaaaaactggaaacagcccaaacattcatcaacagaaaaatggatgaacaaattgcatttgtttatcttaagatactattcaacaatttaaaagaataaactattgatacatgcaacgt

SEQ ID NO: 12536 - DNA, 4702 bp, Homo sapiens; identical to SEQ ID NO: 12530

SEQ ID NO: 12537 - DNA, 4721 bp, Homo sapiens; identical to SEQ ID NO: 12531

SEQ ID NO: 12538 - DNA, 5977 bp, Homo sapiens; identical to SEQ ID NO: 12532

SEQ ID NO: 12539 - DNA, 327 bp, Homo sapiens; identical to SEQ ID NO: 12533

SEQ ID NO: 12540 - DNA, 327 bp, Homo sapiens; identical to SEQ ID NO: 12534

SEQ ID NO: 12541 - DNA, 208 bp, Homo sapiens; identical to SEQ ID NO: 12535

SEQ ID NO: 12542 - DNA, 4702 bp, Homo sapiens; identical to SEQ ID NO: 12530

SEQ ID NO: 12543 - DNA, 640 bp, Homo sapiens; identical to SEQ ID NO: 6036

SEQ ID NO: 12544 - DNA, 606 bp, Homo sapiens; identical to SEQ ID NO: 6037

SEQ ID NO: 12545 - DNA, 4721 bp, Homo sapiens; identical to SEQ ID NO: 12531

SEQ ID NO: 12546 - DNA, 640 bp, Homo sapiens; identical to SEQ ID NO: 6036

SEQ ID NO: 12547 - DNA, 513 bp, Homo sapiens; identical to SEQ ID NO: 6040

SEQ ID NO: 12548 - DNA, 612 bp, Homo sapiens; identical to SEQ ID NO: 6041

SEQ ID NO: 12549 - DNA, 462 bp, Homo sapiens; identical to SEQ ID NO: 6326

SEQ ID NO: 12550 - DNA, 640 bp, Homo sapiens; identical to SEQ ID NO: 6036

SEQ ID NO: 12551 - DNA, 640 bp, Homo sapiens; identical to SEQ ID NO: 6036

SEQ ID NO: 12552 - DNA, 654 bp, Homo sapiens; identical to SEQ ID NO: 6044

SEQ ID NO: 12553 - DNA, 647 bp, Homo sapiens; identical to SEQ ID NO: 6045
  SITE (29): n equals a,t,g, or c

SEQ ID NO: 12554 - DNA, 5977 bp, Homo sapiens; identical to SEQ ID NO: 12532

SEQ ID NO: 12555 - DNA, 640 bp, Homo sapiens; identical to SEQ ID NO: 6046

SEQ ID NO: 12556 - DNA, 640 bp, Homo sapiens; identical to SEQ ID NO: 6047

SEQ ID NO: 12557 - DNA, 571 bp, Homo sapiens; identical to SEQ ID NO: 6048

SEQ ID NO: 12558 - DNA, 640 bp, Homo sapiens; identical to SEQ ID NO: 6036

SEQ ID NO: 12559 - DNA, 639 bp, Homo sapiens; identical to SEQ ID NO: 6050
  SITE (88): n equals a,t,g, or c

SEQ ID NO: 12560 - DNA, 648 bp, Homo sapiens; identical to SEQ ID NO: 6051

SEQ ID NO: 12561 - DNA, 624 bp, Homo sapiens; identical to SEQ ID NO: 6052

SEQ ID NO: 12562 - DNA, 509 bp, Homo sapiens; identical to SEQ ID NO: 6053

SEQ ID NO: 12563 - DNA, 654 bp, Homo sapiens; identical to SEQ ID NO: 6054

SEQ ID NO: 12564 - DNA, 546 bp, Homo sapiens; identical to SEQ ID NO: 6055
  SITE (20): n equals a,t,g, or c

SEQ ID NO: 12565 - DNA, 654 bp, Homo sapiens; identical to SEQ ID NO: 6044

SEQ ID NO: 12566 - DNA, 327 bp, Homo sapiens; identical to SEQ ID NO: 12533

SEQ ID NO: 12567 - DNA, 327 bp, Homo sapiens; identical to SEQ ID NO: 12534

SEQ ID NO: 12568 - DNA, 208 bp, Homo sapiens; identical to SEQ ID NO: 12535

SEQ ID NO: 12569 - DNA, 4702 bp, Homo sapiens; identical to SEQ ID NO: 12530

SEQ ID NO: 12570 - DNA, 4721 bp, Homo sapiens; identical to SEQ ID NO: 12531

SEQ ID NO: 12571 - DNA, 5977 bp, Homo sapiens; identical to SEQ ID NO: 12532

SEQ ID NO: 12572 - DNA, 327 bp, Homo sapiens; identical to SEQ ID NO: 12533

SEQ ID NO: 12573 - DNA, 327 bp, Homo sapiens; identical to SEQ ID NO: 12534

SEQ ID NO: 12574 - DNA, 208 bp, Homo sapiens; identical to SEQ ID NO: 12535

SEQ ID NO: 12575 - DNA, 1188 bp, Homo sapiens
gccaccctgctggttgcagtagagcttgtttgactatcttgtcccaagccctctgcacttccacccactccctccctctttccagaatttgggagcaggctcagaaaatgccatgccctgaaattccacctgataggaattgaagagaaatgaatgagcgattcccagcaggatcacttgccctaaaagatgaattgagccgagtttccgcagtgactgggtccttcccacacctcatcagtagactccaagccagaatgtaaatgaatgcaaagtgatctcattcactgagcttatccatcatggatattggtgccatgactgaagacggtgttcttgtccaagagtaagacttgtgcatgtgcttttcccctccactttcctggggagggaatggcctgatgctaccgaccagtccacattctctgaacagatgcatccccagagtgcacgtgagttcatcagcttctccaggttgatggacacatggcctgtgatgatgtttctcaaagtgtatgccacacagaacactagttcgtgagttgctccatgaaccaagggtgccatggtcagataagctgggaaatgctgcgtgctgcaccttccttagcaagattcatgtgcaaaggatctgagaagtcctgtgataccaggcttaccaatccatttggtcacatcacacaccccactcctcactgttttttggttttttttttttttttttgactaaacacactgtctcctagggacacagttctgtgtagttaacaggaaatatttattgagtttctatgtggcaggccctgaactaagctttcttttgtatgatttcatttgctccttaaagcaaccctgtgaaatttatatattgtcatcactcccattcgacaggtaaagcattcgaggcttggagagttcaagccactttccctcctcactcagccagtaagtggtagagccaggttcaaacccaggcctgcctccctccaaagtccactttatcatgcttccccagaagaaaatggccacttataataaaaaggtaaattagggccaggtgcagtggctcccgcctgtaatcccagagctttgggagaccaaggcaagaggatcatttgagcccaggtgttcaaggccagcctaggcaacataacgagaccctatctctacaaaaaaaaataataataa

SEQ ID NO: 12576 - DNA, 517 bp, Homo sapiens
ctccctacgtctgtgtgggttttctctgggtattgcggtttcctctcgtatcccaaaggtgtgcatattaggttcattggtgcgtctacatggctgcagtctgagtgagtgtggggtgtgagagatgccccgcgatggtgtcctatcctgggctggtgcccatcttgtgtcctgagctgctgggatgggctctgaccacccaagacccttaactgcaataaatgggtaaataattatttgctgttcttaatgaatctttcttaagctcatatttattctatgtatagtgcacatttatttccatgtttaatactagaagtgttttggtcttgagaagtttggtaggccaggtacaatggctgatgcctgaaatcccagcactttttgaggctaaggcaggaggatcacttgagcctgggaggtcaaagctacagtgagtatgccatgattccagcaccgcattccagcctgggtaacagagtgagacagaagaagaaagaagaaagaagaagaagaa

SEQ ID NO: 12577 - DNA, 5485 bp, Homo sapiens
ttttaggtaacaaatgtttgctgagcatctaatgatgatgacaataataactatgatctatggggcactggctatgggccagggcattgctaagagctccagatccttgatcttatctaatccacataagagcactatgagggaggtactgttatttttctcgttttacacacgaggacactgaagcagaatggtcaagaaggtggctcatggtccatatggggtacagccaggacccagcccatgatttcagctcccgtgcatgttccctccatccacagggcctggtgcagttctaggagctggggggatgaagaaaggaagccaaggtcttcaccctcaaacactcacagcttttgctggtagacacaaataagtaggcaattactagaagacatcaaagtgctgttttacagcaagggttggcagactgtttctgtgaagggccagacagtgaaggttttagagtctgcagggcaggcagtcgctgtcgcagctcctcagcaccaccactgcagctataaatgtatgggcatggctgggttcctataaaactttatttacaaaaacaggcctctggtgggatttggtcggtgggtggaggggtgtagcttgccccagttctggagggatgtggccaaagtgttctgtgaggacgctgtagtgaccctaaggagaggcacccaactccatcagggctcagggaaggcttcctggagggggtggcgcctgaatgagcatgagctggccgagacgaagagcagcctggctgaacgggtcgggtctcacaacacggtgctcatgaggaacgctcttaatgtgcacactgtcctgtgtctctgcagagcctgctcgctcagcacaaagactttggagcagcttttgagcccctgcagaggaagctcttggacctccaggtcagggtccaagccgagaaggggcttcagcgggaccttcctggaaaacaggcccagctctcaaggttgcaggtgaggggtctgtgaggcctgaatcactcctgcccaggtgctcagctgcacctggaagcagcgtctccctctagcagtaaccagcaaagcaacagctgccgtgagccagaaatttagacccttagttgagatctgacctttcacctcaacagaacctctgcttatttatctgatggttcctgacctcaaacaactgagtcttgagctcagcaaaatgacaaactgtctttctgtttactcctcagttccaaagtctaacattggtatttgtttttagaattgctttgctaagtattcttaatgagtccagaggtgttcagttaaaccaactttgggattaagaataaatgttctgaaacgtggactgtaagtaggctgaccgttgatcattgttggctggataaggaacttgatggttttttaaaatgcgcgtgatacaatagttctctctttaaaacccaagcacagctcatacataaattgagagtgttctctagaagacattaaaaatagtgcattttaggccgggagcggtggctcacgcctgtaatcccagcactttgggaggtgagcagattgcctgactttaggattttgagatcagcctgggcaacatggtgaaaccctgtctctacttaaaataaaaaattttttttaaaaaagcaaaaaatttagccaggcgtggtggcgggaatctgtaaccccagctacttgggaggccgaggcaccagaatcacttgaacccaggaggcagaggttgcagtgagcccacattgtgccactgtgctccagcctgggcgacagagtgagactctgtctccaaaaaaagaaaaaaaatagtgcattttgggttttaaaactaaaattgggacgtgtttcctcataatgagaggtggtcatcaagtatgagtcccaatgtgagtttgtccccagagatgccatctgtcttgtagcagagtttattttcatggtgtcccagaatatttttgtctgatttttaaaatctctccagccctgagagtgggcccatcagaccagccatgtggttggtacttccgctggtatgaaagagccccaccgccttggggaattcacccctcccaggctctcccactcagaggctctgccctgatcggccaccccaagggagggagaggtgggaagattagcctacctgttcccttctctactgcaggggctgcaggaagaggggctggacttgggggcacagatggaggctgcaaggcctctggtccaggagaaccccaaccaccagcacaaaatggaccagctttcctccgacttccaggccctgcagaggtctctggaggtaaggggctggcagaagggcctgtgctttgacagagagccggcccctgtcatccaacacgcctggggcctttcttcccctttcctgccttcattccttctaacctctcttttttctttctccctgttttcttcccttcctcattcatacaacagacaattattgagcacctcccatatgccaggcagtgttctaggtggccctaaggatggaggtagcagagcatgacagcccaggcccctgctctcctgggagttacgccccagttgggtagatggacaattaatcatcaagcaaacaagccaatgcacaattacatattgagattagggccaagcggcaaaagaagagagcaggctgctgagatccttaggcagcccagaacacaggcggcctcgggtcccttgcagcctgcacaaggcctggaggccacagagcttcatcgccagtgccctctagtggccacctcagctctttctagggtttgtccaggattcagtccccttccagcagtagggatggaactcaaagctccttcaaaactggcctgaggacaagtggaaatgcagactccaggccccactgtgacactgattcagatggagtcctgggtctgccgttgtaacaagccctgaggagtataaagcagggtctctggtgctcacacctcaagaaaacccagtgaggcagtgagagctctccctcctacctgacattgcacgccctatttcataccaaacattcctaacctcctctttacactcctgaaattcatagggaatatacccacccaggaaatagaaaagagaaatcaaaggaaagtaattataatacaatattgtccaatatgtaagtactcccagatggccacactcaagacataaggaggtggtcagaacgtgccctccctgtgtgacagccgcaaatgctgtgtcaggtggcacaaccatcacggcctctagtgatgtggttttctgaaatgggaacaacgcttgatagcactttgatcaaacccaagagcagtcttccatccacttacacaaagggtgcagctctagagaagtcagtatgtttgttaaaactgcaaaatcttccttgtgtttgtgtgttgattggagtgacagtctgagctcaggtcatgccaagcaggttttttactgctgtagatattaggaggacatgagaaaatcgtgtgggatgtgggcaaattctgcatttgtggactatccaccccagggtggaatgcgagcacccatccctctcactccacctagtatcaccctcaccacctctatcgcagcaactgcaaaccctccccaccagtttccaggacataaggcatcacctgtggagccccattggtgtaagtgacgattaatgtctggttgaattcatttaattacattcaataaactagcagttagtagtttcaaggtcgaggcagtagagaaataggacacactgtcctcactcctcaggagcccatagaaacccgtagaagcagcaaaagtctcctaatacctccatccaaatgatgggctagattagtcgttacgagaagcagcgttaactgagcatcactcggtgttgcaaaatgatgatattccaattcttattgattgtttatattcttctttaaagagaaattgcccttttattattttggtacccagtgcttgttaatctaatatgtccttccccacagcgaggcagtctctgtgtccccctggggggcaggtatctgatgttggagatcacagctctatgtacgggaagcccttggaggcgtctggtctaatgttggcacacagggaccaggaggggacagtggtagggacaactcagagaagtggagttttagataacttctcaggccctcattgatggctcactgaggacagaggcagcagtctccccagcccctggtatgggcctggtatccagcgatctcagtcagtgtctgtggaatgtagaaggcagggcctatggtagccctgcagagagtcatgatgaccttattcaaggaacacagctggaatgggaacggcaggccctggggtctgactggttcatggcaggctatgtaaagaaagctccaagggtctcaggctgggtggccagaggcatagagaatggctgcccttctggggacagtgtccacctttcctggtgacagagagctgaacaatagattggcccaggaaacagtactcaggaaaaagaacaaagaaagactgaacgtgaatatctgagtgtgcagctcgattactttttttaaaaattaaatgcatctgtgttaccagcacccaactaaaacacagaatattaccagcctcccaaagcctctgtgcctgcggtcatgcccagctcaccattcccgaccctcaaggggggctctgacttcatgcttcccgcaacatagcttgggcttgcctgatgttatccttcatttaaattgaattggacagaatgttttcttttgtgcctggcctttagctctccagatgatggttgtaaattcatctgctgtattgcatgtggttatagactgttcattcttgctgctgtaaaacattccattgtgtgaatataccaccgtgtatttattcattctactcttgatgggcacttggatagtttccaacttggggctgtcacatgtatgaccttgggtgaggatatgttcccatttctgggacatacaccgggagtggaatggctgggccatcagctacagccacgttccatttgggtagattctgacccgtggtttccacaagtggttgagccaatttacacttggatcagtggtggacaggagatccaatttcccccaccctcacctagacttggtcgttttcctaaaagtaagataggctttaaaccagatttgatcttccaagggtaaattccttgtgctgtgtggagggaagggccagcccagcctcttgtggtgctacttggtggggagccctggggtccccagcgggtgtgagagccctgcagggtgggggtggtgcgggggtctccccctcggccagcactcaggatgccctgggctccccgggctgtgctgcaggaccttgtggacaggtgtcggcagagtgtgcaggagcactgcaccttcagccaccagctgctggagctgcggcagtggatcgttgtg

SEQ ID NO: 12578 - DNA, 5485 bp, Homo sapiens; identical to SEQ ID NO: 12577

SEQ ID NO: 12579 - DNA, 280 bp, Homo sapiens
tcacgcctgtaatcccagcactttgggaggccgaggtgggcggatcacgaggtcaggagatcgagaccatcctggctaacacagtgaaaccccgtctctactaaaaaaatacaaaaaaattagccgggtgtggtggtgggcgcctgtagtcccagctactcgggaggctgaggcaggagaatggcgtgaacccaggaggtgaagcttgcagtgagctgagatcgtgccactgcactccagcctgggcaacagagtgagactccagctcaaaaaaaaaaaa

SEQ ID NO: 12580 - DNA, 1342 bp, Homo sapiens
caaacttcagtggggggcactgactcgtgacccgtggttccccaattctattacttttcccatgtcctggtgggtccccaccacatctctgcattgactgggctgagtttgtcttctcagcctcatcagaaactggcatctgcagaggatggaagtggattcggggaagaaaatggttttcaccaacaacatcccaaagtcaggatttctcatcaatcccatggatcctattcccaggcatcgtcgacgcgtgagtctgtctagcagggctgtgggagaaggggccaggccccaggtcaagaggtgggtaggggtctccagcacaggcccctccctgtctggggcaacatgctctgctctgaggacttggccacgtcctgtctcatttgagcctgccccagctgtggccaaagagcatttgatcctactccacagaggacctcagagatcccagagtctgcagagccaggccaccagggcagtaggggtatcccttagccagtcagatactcacctctgtgagccactagcagcagctcctgcagggaagagagtgtcggggctgaaagcttcctgctggccccagattggaaaccgaaaccatacaagatgggaaaacttttctgccatgtttcatccatcccttactgcctctaaacaaacttgagctttgtggaaaagaaagttattccttgttattcaaatacatcaaattattcattttcccattcattctttcatccactcctccatttgctgagtgctactttgttccaagaactgtgctcagagctaggatacagccgtgagtaacgcttctgaccctcagagaatttggaatccggcatagagcttttcagtgggcacacagccttgtattaaaatgcaggttctgggctgggtatggtgagctacacctacaatctcagaactttgggaggctgggaggccaaggcaggaggattgcttgaggtcaggagtttgagacaagcctgggcaagatagcaagaccccatttctataaaaaatatttaaaaattaactggacatggtggtgtgctcctgtagttccagctactcaggggcctgaggtgggaggatcacttgagcccaggagtttgaggctgcagggagctgtgattgtgccactgcactccagcctggtgacaaagcaagaccccatttcaatcaatcaatcaatcaacaaaaaataatgaaataagataaaatgcagactctgagttagtagatctggctagggcccacaattcgattctgcatttctaacaagctctcgggataggcccatgctgctgggcccgggagatactcacctctgtga

SEQ ID NO: 12581 - DNA, 1342 bp, Homo sapiens; identical to SEQ ID NO: 12580

SEQ ID NO: 12582 - DNA, 303 bp, Homo sapiens
ggctgggcacggtggctcacgcctgtaatcccagcactttgggaggccgaggtgggcggatcacgaggtcaggagatcgagaccatcctggctaacacagtgaaaccccgtctctactaaaaaaatacaaaaaaattagccgggtgtggtggtgggcgcctgtagtcccagctactcgggaggctgaggcaggagaatggcgtgaacccaggaggtgaagcttgcagtgagctgagatcgtgccactgcactccagcctgggcaacagagtgagactccagctcaaaaaaaaaaaaaaaagaa

SEQ ID NO: 12583 - DNA, 1377 bp, Homo sapiens
gtatatcttgtctgtcagctaaattgtgtccttaagggcaggacctgtgtttcagacatctttgatatttaccatgtttgtcataaatttagtgaatgtacagtatattttggttttaggcgagcagtgtatctgtcccttttgctgcttgctagttctgccttacaacttccactggaaagagctttttagtgcagcaaatagtgtctgcattttattgtataaagcattgcctgggccataccaaatcattttgacagaggtcatttcagggatgccacaggcttcataattgctacttgatgctagttgtagcaaattgcacttgggttttggtagttgtgagtatagtgttgtctccttccaccccgccttgtgtgttaatcactgactgccaggaaatctctttgacataacatcctaaaaagtttttgttatcagtagggccctgtaacatttttttccttttctaaagcctatgccttcaagttttttacaagtgtcttattccttctaaattgagaactaattgaatattttttcttgtagataaatcttattttaaatatctagttatcattactttgcattctccttttctgattttatgttacattaccaatatcttatgatatttaaacttttttgaactctgctttttaaaataaataatataaatgcctcaattatctggaacttacactgaaacactgtaatcttgtctctgagcctgcttcccctcaaaaaatttagatttagcttttcagatgcttatagctagccaagtaagtgagaataaacacaaaaaggctaaaatatgcaagttccggagttgtcaaagcttcatgtaaaatgtgtcattgtggaatttaaaaaattctacgctttttcatcaaggtttttggttggggcattagacacttcctgaaatctggcattctcctaggcactggggataccatggagaagaggcagatatggtcttggctcacatggggcatataatcaagcagtaattcttaaccttggacagacttgagtccattatgccaatggtcatctccactttgccatgccattttagttttccctaagtaaaaactacgcctgtaatcctagcactttgggaggccaaggcgggtggatcacctgaggtcaggagttcgagaccagcctggccaacatggtgaaacctcatctctactaaaaatacaaacattagctgggcgtgatggcgcgtgcctgtaatcccagctactcaggaggctgaggcaggagaatcacttgaacttgagagacggaggttgcggtgagccgagatcaagccactgcactccagtctgggtgatagagtgagactcagtctcaaaaaaaaaa

SEQ ID NO: 12584 - DNA, 38771 bp, Homo sapiens; identical to SEQ ID NO: 7561
  SITE (7892): n equals a,t,g, or c
  SITE (7893): n equals a,t,g, or c
  SITE (7894): n equals a,t,g, or c
  SITE (7895): n equals a,t,g, or c
  SITE (7896): n equals a,t,g, or c
  SITE (7897): n equals a,t,g, or c
  SITE (7898): n equals a,t,g, or c
  SITE (7899): n equals a,t,g, or c
  SITE (7900): n equals a,t,g, or c
  SITE (7901): n equals a,t,g, or c
  SITE (7902): n equals a,t,g, or c
  SITE (7903): n equals a,t,g, or c
  SITE (7904): n equals a,t,g, or c
  SITE (7905): n equals a,t,g, or c
  SITE (7906): n equals a,t,g, or c
  SITE (7907): n equals a,t,g, or c
  SITE (7908): n equals a,t,g, or c
  SITE (7909): n equals a,t,g, or c
  SITE (7910): n equals a,t,g, or c
  SITE (7911): n equals a,t,g, or c
  SITE (7912): n equals a,t,g, or c
  SITE (7913): n equals a,t,g, or c
  SITE (7914): n equals a,t,g, or c
  SITE (7915): n equals a,t,g, or c
  SITE (7916): n equals a,t,g, or c
  SITE (7917): n equals a,t,g, or c
  SITE (7918): n equals a,t,g, or c
  SITE (7919): n equals a,t,g, or c
  SITE (7920): n equals a,t,g, or c
  SITE (7921): n equals a,t,g, or c
  SITE (7922): n equals a,t,g, or c
  SITE (7923): n equals a,t,g, or c
  SITE (7924): n equals a,t,g, or c
  SITE (7925): n equals a,t,g, or c
  SITE (7926): n equals a,t,g, or c
  SITE (7927): n equals a,t,g, or c
  SITE (7928): n equals a,t,g, or c
  SITE (7929): n equals a,t,g, or c
  SITE (7930): n equals a,t,g, or c
  SITE (7931): n equals a,t,g, or c
  SITE (7932): n equals a,t,g, or c
  SITE (7933): n equals a,t,g, or c
  SITE (7934): n equals a,t,g, or c
  SITE (7935): n equals a,t,g, or c
  SITE (7936): n equals a,t,g, or c
  SITE (7937): n equals a,t,g, or c
  SITE (7938): n equals a,t,g, or c
  SITE (7939): n equals a,t,g, or c
  SITE (7940): n equals a,t,g, or c
  SITE (7941): n equals a,t,g, or c
  SITE (7942): n equals a,t,g, or c
  SITE (7943): n equals a,t,g, or c
  SITE (7944): n equals a,t,g, or c
  SITE (7945): n equals a,t,g, or c
  SITE (7946): n equals a,t,g, or c
  SITE (7947): n equals a,t,g, or c
  SITE (7948): n equals a,t,g, or c
  SITE (7949): n equals a,t,g, or c
  SITE (7950): n equals a,t,g, or c
  SITE (7951): n equals a,t,g, or c
  SITE (7952): n equals a,t,g, or c
  SITE (7953): n equals a,t,g, or c
  SITE (7954): n equals a,t,g, or c
  SITE (7955): n equals a,t,g, or c
  SITE (7956): n equals a,t,g, or c
  SITE (7957): n equals a,t,g, or c
  SITE (7958): n equals a,t,g, or c
  SITE (7959): n equals a,t,g, or c
  SITE (7960): n equals a,t,g, or c
  SITE (7961): n equals a,t,g, or c
  SITE (7962): n equals a,t,g, or c
  SITE (7963): n equals a,t,g, or c
  SITE (7964): n equals a,t,g, or c
  SITE (7965): n equals a,t,g, or c
  SITE (7966): n equals a,t,g, or c
  SITE (7967): n equals a,t,g, or c
  SITE (7968): n equals a,t,g, or c
  SITE (7969): n equals a,t,g, or c
  SITE (7970): n equals a,t,g, or c
  SITE (7971): n equals a,t,g, or c
  SITE (7972): n equals a,t,g, or c
  SITE (7973): n equals a,t,g, or c
  SITE (7974): n equals a,t,g, or c
  SITE (7975): n equals a,t,g, or c
  SITE (7976): n equals a,t,g, or c
  SITE (7977): n equals a,t,g, or c
  SITE (7978): n equals a,t,g, or c
  SITE (7979): n equals a,t,g, or c
  SITE (7980): n equals a,t,g, or c
  SITE (7981): n equals a,t,g, or c
  SITE (7982): n equals a,t,g, or c
  SITE (7983): n equals a,t,g, or c
  SITE (7984): n equals a,t,g, or c
  SITE (7985): n equals a,t,g, or c
  SITE (7986): n equals a,t,g, or c
  SITE (7987): n equals a,t,g, or c
  SITE (7988): n equals a,t,g, or c
  SITE (7989): n equals a,t,g, or c
  SITE (7990): n equals a,t,g, or c
  SITE (7991): n equals a,t,g, or c
  SITE (7992): n equals a,t,g, or c
  SITE (7993): n equals a,t,g, or c
  SITE (7994): n equals a,t,g, or c
  SITE (7995): n equals a,t,g, or c
  SITE (7996): n equals a,t,g, or c
  SITE (7997): n equals a,t,g, or c
  SITE (7998): n equals a,t,g, or c
  SITE (7999): n equals a,t,g, or c
  SITE (8000): n equals a,t,g, or c
  SITE (8001): n equals a,t,g, or c
  SITE (8002): n equals a,t,g, or c
  SITE (8003): n equals a,t,g, or c
  SITE (8004): n equals a,t,g, or c
  SITE (8005): n equals a,t,g, or c
  SITE (8006): n equals a,t,g, or c
  SITE (8007): n equals a,t,g, or c
  SITE (8008): n equals a,t,g, or c
  SITE (8009): n equals a,t,g, or c
  SITE (8010): n equals a,t,g, or c
  SITE (8011): n equals a,t,g, or c
  SITE (8012): n equals a,t,g, or c
  SITE (8013): n equals a,t,g, or c
  SITE (8014): n equals a,t,g, or c
  SITE (8015): n equals a,t,g, or c
  SITE (8016): n equals a,t,g, or c
  SITE (8017): n equals a,t,g, or c
  SITE (8018): n equals a,t,g, or c
  SITE (8019): n equals a,t,g, or c
  SITE (8020): n equals a,t,g, or c
  SITE (8021): n equals a,t,g, or c
  SITE (8022): n equals a,t,g, or c
  SITE (8023): n equals a,t,g, or c
  SITE (8024): n equals a,t,g, or c
  SITE (8025): n equals a,t,g, or c
  SITE (8026): n equals a,t,g, or c
  SITE (8027): n equals a,t,g, or c
  SITE (8028): n equals a,t,g, or c
  SITE (8029): n equals a,t,g, or c
  SITE (8030): n equals a,t,g, or c
  SITE (8031): n equals a,t,g, or c
  SITE (8032): n equals a,t,g, or c
  SITE (8033): n equals a,t,g, or c
  SITE (8034): n equals a,t,g, or c
  SITE (8035): n equals a,t,g, or c
  SITE (8036): n equals a,t,g, or c
  SITE (8037): n equals a,t,g, or c
  SITE (8038): n equals a,t,g, or c
  SITE (8039): n equals a,t,g, or c
  SITE (8040): n equals a,t,g, or c
  SITE (8041): n equals a,t,g, or c
  SITE (8042): n equals a,t,g, or c
  SITE (8043): n equals a,t,g, or c
  SITE (8044): n equals a,t,g, or c
  SITE (8045): n equals a,t,g, or c
  SITE (8046): n equals a,t,g, or c
  SITE (8047): n equals a,t,g, or c
  SITE (8048): n equals a,t,g, or c
  SITE (8049): n equals a,t,g, or c
  SITE (8050): n equals a,t,g, or c
  SITE (8051): n equals a,t,g, or c
  SITE (8052): n equals a,t,g, or c
  SITE (8053): n equals a,t,g, or c
  SITE (8054): n equals a,t,g, or c
  SITE (8055): n equals a,t,g, or c
  SITE (8056): n equals a,t,g, or c
  SITE (8057): n equals a,t,g, or c
  SITE (8058): n equals a,t,g, or c
  SITE (8059): n equals a,t,g, or c
  SITE (8060): n equals a,t,g, or c
  SITE (8061): n equals a,t,g, or c
  SITE (8062): n equals a,t,g, or c
  SITE (8063): n equals a,t,g, or c
  SITE (8064): n equals a,t,g, or c
  SITE (8065): n equals a,t,g, or c
  SITE (8066): n equals a,t,g, or c
  SITE (8067): n equals a,t,g, or c
  SITE (8068): n equals a,t,g, or c
  SITE (8069): n equals a,t,g, or c
  SITE (8070): n equals a,t,g, or c
  SITE (8071): n equals a,t,g, or c
  SITE (8072): n equals a,t,g, or c
  SITE (8073): n equals a,t,g, or c
  SITE (8074): n equals a,t,g, or c
  SITE (8075): n equals a,t,g, or c
  SITE (8076): n equals a,t,g, or c
  SITE (8077): n equals a,t,g, or c
  SITE (8078): n equals a,t,g, or c
  SITE (8079): n equals a,t,g, or c
  SITE (8080): n equals a,t,g, or c
  SITE (8081): n equals a,t,g, or c
  SITE (8082): n equals a,t,g, or c
  SITE (8083): n equals a,t,g, or c
  SITE (8084): n equals a,t,g, or c
  SITE (8085): n equals a,t,g, or c
  SITE (8086): n equals a,t,g, or c
  SITE (8087): n equals a,t,g, or c
  SITE (8088): n equals a,t,g, or c
  SITE (8089): n equals a,t,g, or c
  SITE (8090): n equals a,t,g, or c
  SITE (8091): n equals a,t,g, or c
  SITE (8092): n equals a,t,g, or c
  SITE (8093): n equals a,t,g, or c
  SITE (8094): n equals a,t,g, or c
  SITE (8095): n equals a,t,g, or c
  SITE (8096): n equals a,t,g, or c
  SITE (8097): n equals a,t,g, or c
  SITE (8098): n equals a,t,g, or c
  SITE (8099): n equals a,t,g, or c
  SITE (8100): n equals a,t,g, or c
  SITE (8101): n equals a,t,g, or c
  SITE (8102): n equals a,t,g, or c
  SITE (8103): n equals a,t,g, or c
  SITE (8104): n equals a,t,g, or c
  SITE (8105): n equals a,t,g, or c
  SITE (8106): n equals a,t,g, or c
  SITE (8107): n equals a,t,g, or c
  SITE (8108): n equals a,t,g, or c
  SITE (8109): n equals a,t,g, or c
  SITE (8110): n equals a,t,g, or c
  SITE (8111): n equals a,t,g, or c
  SITE (8112): n equals a,t,g, or c
  SITE (8113): n equals a,t,g, or c
  SITE (8114): n equals a,t,g, or c
  SITE (8115): n equals a,t,g, or c
  SITE (8116): n equals a,t,g, or c
  SITE (8117): n equals a,t,g, or c
  SITE (8118): n equals a,t,g, or c
  SITE (8119): n equals a,t,g, or c
  SITE (8120): n equals a,t,g, or c
  SITE (8121): n equals a,t,g, or c
  SITE (8122): n equals a,t,g, or c
  SITE (8123): n equals a,t,g, or c
  SITE (8124): n equals a,t,g, or c
  SITE (8125): n equals a,t,g, or c
  SITE (8126): n equals a,t,g, or c
  SITE (8127): n equals a,t,g, or c
  SITE (8128): n equals a,t,g, or c
  SITE (8129): n equals a,t,g, or c
  SITE (8130): n equals a,t,g, or c
  SITE (8131): n equals a,t,g, or c
  SITE (8132): n equals a,t,g, or c
  SITE (8133): n equals a,t,g, or c
  SITE (8134): n equals a,t,g, or c
  SITE (8135): n equals a,t,g, or c
  SITE (8136): n equals a,t,g, or c
  SITE (8137): n equals a,t,g, or c
  SITE (8138): n equals a,t,g, or c
  SITE (8139): n equals a,t,g, or c
  SITE (8140): n equals a,t,g, or c
  SITE (8141): n equals a,t,g, or c
  SITE (8142): n equals a,t,g, or c
  SITE (8143): n equals a,t,g, or c
  SITE (8144): n equals a,t,g, or c
  SITE (8145): n equals a,t,g, or c
  SITE (8146): n equals a,t,g, or c
  SITE (8147): n equals a,t,g, or c
  SITE (8148): n equals a,t,g, or c
  SITE (8149): n equals a,t,g, or c
  SITE (8150): n equals a,t,g, or c
  SITE (8151): n equals a,t,g, or c
  SITE (8152): n equals a,t,g, or c
  SITE (8153): n equals a,t,g, or c
  SITE (8154): n equals a,t,g, or c
  SITE (8155): n equals a,t,g, or c
  SITE (8156): n equals a,t,g, or c
  SITE (8157): n equals a,t,g, or c
  SITE (8158): n equals a,t,g, or c
  SITE (8159): n equals a,t,g, or c
  SITE (8160): n equals a,t,g, or c
  SITE (8161): n equals a,t,g, or c
  SITE (8162): n equals a,t,g, or c
  SITE (8163): n equals a,t,g, or c
  SITE (8164): n equals a,t,g, or c
  SITE (8165): n equals a,t,g, or c
  SITE (8166): n equals a,t,g, or c
  SITE (8167): n equals a,t,g, or c
  SITE (8168): n equals a,t,g, or c
  SITE (8169): n equals a,t,g, or c
  SITE (8170): n equals a,t,g, or c
  SITE (8171): n equals a,t,g, or c
  SITE (8172): n equals a,t,g, or c
  SITE (8173): n equals a,t,g, or c
  SITE (8174): n equals a,t,g, or c
  SITE (8175): n equals a,t,g, or c
  SITE (8176): n equals a,t,g, or c
  SITE (8177): n equals a,t,g, or c
  SITE (8178): n equals a,t,g, or c
  SITE (8179): n equals a,t,g, or c
  SITE (8180): n equals a,t,g, or c
  SITE (8181): n equals a,t,g, or c
  SITE (8182): n equals a,t,g, or c
  SITE (8183): n equals a,t,g, or c
  SITE (8184): n equals a,t,g, or c
  SITE (8185): n equals a,t,g, or c
  SITE (8186): n equals a,t,g, or c
  SITE (8187): n equals a,t,g, or c
  SITE (8188): n equals a,t,g, or c
  SITE (8189): n equals a,t,g, or c
  SITE (8190): n equals a,t,g, or c
  SITE (8191): n equals a,t,g, or c
  SITE (8192): n equals a,t,g, or c
  SITE (8193): n equals a,t,g, or c
  SITE (8194): n equals a,t,g, or c
  SITE (8195): n equals a,t,g, or c
  SITE (8196): n equals a,t,g, or c
  SITE (8197): n equals a,t,g, or c
  SITE (8198): n equals a,t,g, or c
  SITE (8199): n equals a,t,g, or c
  SITE (8200): n equals a,t,g, or c
  SITE (8201): n equals a,t,g, or c
  SITE (8202): n equals a,t,g, or c
  SITE (8203): n equals a,t,g, or c
  SITE (8204): n equals a,t,g, or c
  SITE (8205): n equals a,t,g, or c
  SITE (8206): n equals a,t,g, or c
  SITE (8207): n equals a,t,g, or c
  SITE (8208): n equals a,t,g, or c
  SITE (8209): n equals a,t,g, or c
  SITE (8210): n equals a,t,g, or c
  SITE (8211): n equals a,t,g, or c
  SITE (8212): n equals a,t,g, or c
  SITE (8213): n equals a,t,g, or c
  SITE (8214): n equals a,t,g, or c
  SITE (8215): n equals a,t,g, or c
  SITE (8216): n equals a,t,g, or c
  SITE (8217): n equals a,t,g, or c
  SITE (8218): n equals a,t,g, or c
  SITE (8219): n equals a,t,g, or c
  SITE (8220): n equals a,t,g, or c
  SITE (8221): n equals a,t,g, or c
  SITE (8222): n equals a,t,g, or c
  SITE (8223): n equals a,t,g, or c
  SITE (8224): n equals a,t,g, or c
  SITE (8225): n equals a,t,g, or c
  SITE (8226): n equals a,t,g, or c
  SITE (8227): n equals a,t,g, or c
  SITE (8228): n equals a,t,g, or c
  SITE (8229): n equals a,t,g, or c
  SITE (8230): n equals a,t,g, or c
  SITE (8231): n equals a,t,g, or c
  SITE (8232): n equals a,t,g, or c
  SITE (8233): n equals a,t,g, or c
  SITE (8234): n equals a,t,g, or c
  SITE (8235): n equals a,t,g, or c
  SITE (8236): n equals a,t,g, or c
  SITE (8237): n equals a,t,g, or c
  SITE (8238): n equals a,t,g, or c
  SITE (8239): n equals a,t,g, or c
  SITE (8240): n equals a,t,g, or c
  SITE (8241): n equals a,t,g, or c
  SITE (8242): n equals a,t,g, or c
  SITE (8243): n equals a,t,g, or c
  SITE (8244): n equals a,t,g, or c
  SITE (8245): n equals a,t,g, or c
  SITE (8246): n equals a,t,g, or c
  SITE (8247): n equals a,t,g, or c
  SITE (8248): n equals a,t,g, or c
  SITE (8249): n equals a,t,g, or c
  SITE (8250): n equals a,t,g, or c
  SITE (8251): n equals a,t,g, or c
  SITE (8252): n equals a,t,g, or c
  SITE (8253): n equals a,t,g, or c
  SITE (8254): n equals a,t,g, or c
  SITE (8255): n equals a,t,g, or c
  SITE (8256): n equals a,t,g, or c
  SITE (8257): n equals a,t,g, or c
  SITE (8258): n equals a,t,g, or c
  SITE (8259): n equals a,t,g, or c
  SITE (8260): n equals a,t,g, or c
  SITE (8261): n equals a,t,g, or c
  SITE (8262): n equals a,t,g, or c
  SITE (8263): n equals a,t,g, or c
  SITE (8264): n equals a,t,g, or c
  SITE (8265): n equals a,t,g, or c
  SITE (8266): n equals a,t,g, or c
  SITE (8267): n equals a,t,g, or c
  SITE (8268): n equals a,t,g, or c
  SITE (8269): n equals a,t,g, or c
  SITE (8270): n equals a,t,g, or c
  SITE (8271): n equals a,t,g, or c
  SITE (8272): n equals a,t,g, or c
  SITE (8273): n equals a,t,g, or c
  SITE (8274): n equals a,t,g, or c
  SITE (8275): n equals a,t,g, or c
  SITE (8276): n equals a,t,g, or c
  SITE (8277): n equals a,t,g, or c
  SITE (8278): n equals a,t,g, or c
  SITE (8279): n equals a,t,g, or c
  SITE (8280): n equals a,t,g, or c
  SITE (8281): n equals a,t,g, or c
  SITE (8282): n equals a,t,g, or c
  SITE (8283): n equals a,t,g, or c
  SITE (8284): n equals a,t,g, or c
  SITE (8285): n equals a,t,g, or c
  SITE (8286): n equals a,t,g, or c
  SITE (8287): n equals a,t,g, or c
  SITE (8288): n equals a,t,g, or c
  SITE (8289): n equals a,t,g, or c
  SITE (8290): n equals a,t,g, or c
  SITE (8291): n equals a,t,g, or c
  SITE (8292): n equals a,t,g, or c
  SITE (8293): n equals a,t,g, or c
  SITE (8294): n equals a,t,g, or c
  SITE (8295): n equals a,t,g, or c
  SITE (8296): n equals a,t,g, or c
  SITE (8297): n equals a,t,g, or c
  SITE (8298): n equals a,t,g, or c
  SITE (8299): n equals a,t,g, or c
  SITE (8300): n equals a,t,g, or c
  SITE (8301): n equals a,t,g, or c
  SITE (8302): n equals a,t,g, or c
  SITE (8303): n equals a,t,g, or c
  SITE (8304): n equals a,t,g, or c
  SITE (8305): n equals a,t,g, or c
  SITE (8306): n equals a,t,g, or c
  SITE (8307): n equals a,t,g, or c
  SITE (8308): n equals a,t,g, or c
  SITE (8309): n equals a,t,g, or c
  SITE (8310): n equals a,t,g, or c
  SITE (8311): n equals a,t,g, or c
  SITE (8312): n equals a,t,g, or c
  SITE (8313): n equals a,t,g, or c
  SITE (8314): n equals a,t,g, or c
  SITE (8315): n equals a,t,g, or c
  SITE (8316): n equals a,t,g, or c
  SITE (8317): n equals a,t,g, or c
  SITE (8318): n equals a,t,g, or c
  SITE (8319): n equals a,t,g, or c
  SITE (8320): n equals a,t,g, or c
  SITE (8321): n equals a,t,g, or c
  SITE (8322): n equals a,t,g, or c
  SITE (8323): n equals a,t,g, or c
  SITE (8324): n equals a,t,g, or c
  SITE (8325): n equals a,t,g, or c
  SITE (8326): n equals a,t,g, or c
  SITE (8327): n equals a,t,g, or c
  SITE (8328): n equals a,t,g, or c
  SITE (8329): n equals a,t,g, or c
  SITE (8330): n equals a,t,g, or c
  SITE (8331): n equals a,t,g, or c
  SITE (8332): n equals a,t,g, or c
  SITE (8333): n equals a,t,g, or c
  SITE (8334): n equals a,t,g, or c
  SITE (8335): n equals a,t,g, or c
  SITE (8336): n equals a,t,g, or c
  SITE (8337): n equals a,t,g, or c
  SITE (8338): n equals a,t,g, or c
  SITE (8339): n equals a,t,g, or c
  SITE (8340): n equals a,t,g, or c
  SITE (8341): n equals a,t,g, or c
  SITE (8342): n equals a,t,g, or c
  SITE (8343): n equals a,t,g, or c
  SITE (8344): n equals a,t,g, or c
  SITE (8345): n equals a,t,g, or c
  SITE (8346): n equals a,t,g, or c
  SITE (8347): n equals a,t,g, or c
  SITE (8348): n equals a,t,g, or c
  SITE (8349): n equals a,t,g, or c
  SITE (8350): n equals a,t,g, or c
  SITE (8351): n equals a,t,g, or c
  SITE (8352): n equals a,t,g, or c
  SITE (8353): n equals a,t,g, or c
  SITE (8354): n equals a,t,g, or c
  SITE (8355): n equals a,t,g, or c
  SITE (8356): n equals a,t,g, or c
  SITE (8357): n equals a,t,g, or c
  SITE (8358): n equals a,t,g, or c
  SITE (8359): n equals a,t,g, or c
  SITE (8360): n equals a,t,g, or c
  SITE (8361): n equals a,t,g, or c
  SITE (8362): n equals a,t,g, or c
  SITE (8363): n equals a,t,g, or c
  SITE (8364): n equals a,t,g, or c
  SITE (8365): n equals a,t,g, or c
  SITE (8366): n equals a,t,g, or c
  SITE (8367): n equals a,t,g, or c
  SITE (8368): n equals a,t,g, or c
  SITE (8369): n equals a,t,g, or c
  SITE (8370): n equals a,t,g, or c
  SITE (8371): n equals a,t,g, or c
  SITE (8372): n equals a,t,g, or c
  SITE (8373): n equals a,t,g, or c
  SITE (8374): n equals a,t,g, or c
  SITE (8375): n equals a,t,g, or c
  SITE (8376): n equals a,t,g, or c
  SITE (8377): n equals a,t,g, or c
  SITE (8378): n equals a,t,g, or c
  SITE (8379): n equals a,t,g, or c
  SITE (8380): n equals a,t,g, or c
  SITE (8381): n equals a,t,g, or c
  SITE (8382): n equals a,t,g, or c
  SITE (8383): n equals a,t,g, or c
  SITE (8384): n equals a,t,g, or c
  SITE (8385): n equals a,t,g, or c
  SITE (8386): n equals a,t,g, or c
  SITE (8387): n equals a,t,g, or c
  SITE (8388): n equals a,t,g, or c
  SITE (8389): n equals a,t,g, or c
  SITE (8390): n equals a,t,g, or c
  SITE (8391): n equals a,t,g, or c
  SITE (8392): n equals a,t,g, or c
  SITE (8393): n equals a,t,g, or c
  SITE (8394): n equals a,t,g, or c
  SITE (8395): n equals a,t,g, or c
  SITE (8396): n equals a,t,g, or c
  SITE (8397): n equals a,t,g, or c
  SITE (8398): n equals a,t,g, or c
  SITE (8399): n equals a,t,g, or c
  SITE (8400): n equals a,t,g, or c
  SITE (8401): n equals a,t,g, or c
  SITE (8402): n equals a,t,g, or c
  SITE (8403): n equals a,t,g, or c
  SITE (8404): n equals a,t,g, or c
  SITE (8405): n equals a,t,g, or c
  SITE (8406): n equals a,t,g, or c
  SITE (8407): n equals a,t,g, or c
  SITE (8408): n equals a,t,g, or c
  SITE (8409): n equals a,t,g, or c
  SITE (8410): n equals a,t,g, or c
  SITE (8411): n equals a,t,g, or c
  SITE (8412): n equals a,t,g, or c
  SITE (8413): n equals a,t,g, or c
  SITE (8414): n equals a,t,g, or c
  SITE (8415): n equals a,t,g, or c
  SITE (8416): n equals a,t,g, or c
  SITE (8417): n equals a,t,g, or c
  SITE (8418): n equals a,t,g, or c
  SITE (8419): n equals a,t,g, or c
  SITE (8420): n equals a,t,g, or c
  SITE (8421): n equals a,t,g, or c
  SITE (8422): n equals a,t,g, or c
  SITE (8423): n equals a,t,g, or c
  SITE (8424): n equals a,t,g, or c
  SITE (8425): n equals a,t,g, or c
  SITE (8426): n equals a,t,g, or c
  SITE (8427): n equals a,t,g, or c
  SITE (8428): n equals a,t,g, or c
  SITE (8429): n equals a,t,g, or c
  SITE (8430): n equals a,t,g, or c
  SITE (8431): n equals a,t,g, or c
  SITE (8432): n equals a,t,g, or c
  SITE (8433): n equals a,t,g, or c
  SITE (8434): n equals a,t,g, or c
  SITE (8435): n equals a,t,g, or c
  SITE (8436): n equals a,t,g, or c
  SITE (8437): n equals a,t,g, or c
  SITE (8438): n equals a,t,g, or c
  SITE (8439): n equals a,t,g, or c
  SITE (8440): n equals a,t,g, or c
  SITE (8441): n equals a,t,g, or c
  SITE (8442): n equals a,t,g, or c
  SITE (8443): n equals a,t,g, or c
  SITE (8444): n equals a,t,g, or c
  SITE (8445): n equals a,t,g, or c
  SITE (8446): n equals a,t,g, or c
  SITE (8447): n equals a,t,g, or c
  SITE (8448): n equals a,t,g, or c
  SITE (8449): n equals a,t,g, or c
  SITE (8450): n equals a,t,g, or c
  SITE (8451): n equals a,t,g, or c
  SITE (8452): n equals a,t,g, or c
  SITE (8453): n equals a,t,g, or c
  SITE (8454): n equals a,t,g, or c
  SITE (8455): n equals a,t,g, or c
  SITE (8456): n equals a,t,g, or c
  SITE (8457): n equals a,t,g, or c
  SITE (8458): n equals a,t,g, or c
  SITE (8459): n equals a,t,g, or c
  SITE (8460): n equals a,t,g, or c
  SITE (8461): n equals a,t,g, or c
  SITE (8462): n equals a,t,g, or c
  SITE (8463): n equals a,t,g, or c
  SITE (8464): n equals a,t,g, or c
  SITE (8465): n equals a,t,g, or c
  SITE (8466): n equals a,t,g, or c
  SITE (8467): n equals a,t,g, or c
  SITE (8468): n equals a,t,g, or c
  SITE (8469): n equals a,t,g, or c
  SITE (8470): n equals a,t,g, or c
  SITE (8471): n equals a,t,g, or c
  SITE (8472): n equals a,t,g, or c
  SITE (8473): n equals a,t,g, or c
  SITE (8474): n equals a,t,g, or c
  SITE (8475): n equals a,t,g, or c
  SITE (8476): n equals a,t,g, or c
  SITE (8477): n equals a,t,g, or c
  SITE (8478): n equals a,t,g, or c
  SITE (8479): n equals a,t,g, or c
  SITE (8480): n equals a,t,g, or c
  SITE (8481): n equals a,t,g, or c
  SITE (8482): n equals a,t,g, or c
  SITE (8483): n equals a,t,g, or c
  SITE (8484): n equals a,t,g, or c
  SITE (8485): n equals a,t,g, or c
  SITE (8486): n equals a,t,g, or c
  SITE (8487): n equals a,t,g, or c
  SITE (8488): n equals a,t,g, or c
  SITE (8489): n equals a,t,g, or c
  SITE (8490): n equals a,t,g, or c
  SITE (8491): n equals a,t,g, or c
  SITE (8492): n equals a,t,g, or c
  SITE (8493): n equals a,t,g, or c
  SITE (8494): n equals a,t,g, or c
  SITE (8495): n equals a,t,g, or c
  SITE (8496): n equals a,t,g, or c
  SITE (8497): n equals a,t,g, or c
  SITE (8498): n equals a,t,g, or c
  SITE (8499): n equals a,t,g, or c
  SITE (8500): n equals a,t,g, or c
  SITE (8501): n equals a,t,g, or c
  SITE (8502): n equals a,t,g, or c
  SITE (8503): n equals a,t,g, or c
  SITE (8504): n equals a,t,g, or c
  SITE (8505): n equals a,t,g, or c
  SITE (8506): n equals a,t,g, or c
  SITE (8507): n equals a,t,g, or c
  SITE (8508): n equals a,t,g, or c
  SITE (8509): n equals a,t,g, or c
  SITE (8510): n equals a,t,g, or c
  SITE (8511): n equals a,t,g, or c
  SITE (8512): n equals a,t,g, or c
  SITE (8513): n equals a,t,g, or c
  SITE (8514): n equals a,t,g, or c
  SITE (8515): n equals a,t,g, or c
  SITE (8516): n equals a,t,g, or c
  SITE (8517): n equals a,t,g, or c
  SITE (8518): n equals a,t,g, or c
  SITE (8519): n equals a,t,g, or c
  SITE (8520): n equals a,t,g, or c
  SITE (8521): n equals a,t,g, or c
  SITE (8522): n equals a,t,g, or c
  SITE (8523): n equals a,t,g, or c
  SITE (8524): n equals a,t,g, or c
  SITE (8525): n equals a,t,g, or c
  SITE (8526): n equals a,t,g, or c
  SITE (8527): n equals a,t,g, or c
  SITE (8528): n equals a,t,g, or c
  SITE (8529): n equals a,t,g, or c
  SITE (8530): n equals a,t,g, or c
  SITE (8531): n equals a,t,g, or c
  SITE (8532): n equals a,t,g, or c
  SITE (8533): n equals a,t,g, or c
  SITE (8534): n equals a,t,g, or c
  SITE (8535): n equals a,t,g, or c
  SITE (8536): n equals a,t,g, or c
  SITE (8537): n equals a,t,g, or c
  SITE (8538): n equals a,t,g, or c
  SITE (8539): n equals a,t,g, or c
  SITE (8540): n equals a,t,g, or c
  SITE (8541): n equals a,t,g, or c
  SITE (8542): n equals a,t,g, or c
  SITE (8543): n equals a,t,g, or c
  SITE (8544): n equals a,t,g, or c
  SITE (8545): n equals a,t,g, or c
  SITE (8546): n equals a,t,g, or c
  SITE (8547): n equals a,t,g, or c
  SITE (8548): n equals a,t,g, or c
  SITE (8549): n equals a,t,g, or c
  SITE (8550): n equals a,t,g, or c
  SITE (8551): n equals a,t,g, or c
  SITE (8552): n equals a,t,g, or c
  SITE (8553): n equals a,t,g, or c
  SITE (8554): n equals a,t,g, or c
  SITE (8555): n equals a,t,g, or c
  SITE (8556): n equals a,t,g, or c
  SITE (8557): n equals a,t,g, or c
  SITE (8558): n equals a,t,g, or c
  SITE (8559): n equals a,t,g, or c
  SITE (8560): n equals a,t,g, or c
  SITE (8561): n equals a,t,g, or c
  SITE (8562): n equals a,t,g, or c
  SITE (8563): n equals a,t,g, or c
  SITE (8564): n equals a,t,g, or c
  SITE (8565): n equals a,t,g, or c
  SITE (8566): n equals a,t,g, or c
  SITE (8567): n equals a,t,g, or c
  SITE (8568): n equals a,t,g, or c
  SITE (8569): n equals a,t,g, or c
  SITE (8570): n equals a,t,g, or c
  SITE (8571): n equals a,t,g, or c
  SITE (8572): n equals a,t,g, or c
  SITE (8573): n equals a,t,g, or c
  SITE (8574): n equals a,t,g, or c
  SITE (8575): n equals a,t,g, or c
  SITE (8576): n equals a,t,g, or c
  SITE (8577): n equals a,t,g, or c
  SITE (8578): n equals a,t,g, or c
  SITE (8579): n equals a,t,g, or c
  SITE (8580): n equals a,t,g, or c
  SITE (8581): n equals a,t,g, or c
  SITE (8582): n equals a,t,g, or c
  SITE (8583): n equals a,t,g, or c
  SITE (8584): n equals a,t,g, or c
  SITE (8585): n equals a,t,g, or c
  SITE (8586): n equals a,t,g, or c
  SITE (8587): n equals a,t,g, or c
  SITE (8588): n equals a,t,g, or c
  SITE (8589): n equals a,t,g, or c
  SITE (8590): n equals a,t,g, or c
  SITE (8591): n equals a,t,g, or c
  SITE (8592): n equals a,t,g, or c
  SITE (8593): n equals a,t,g, or c
  SITE (8594): n equals a,t,g, or c
  SITE (8595): n equals a,t,g, or c
  SITE (8596): n equals a,t,g, or c
  SITE (8597): n equals a,t,g, or c
  SITE (8598): n equals a,t,g, or c
  SITE (8599): n equals a,t,g, or c
  SITE (8600): n equals a,t,g, or c
  SITE (8601): n equals a,t,g, or c
  SITE (8602): n equals a,t,g, or c
  SITE (8603): n equals a,t,g, or c
  SITE (8604): n equals a,t,g, or c
  SITE (8605): n equals a,t,g, or c
  SITE (8606): n equals a,t,g, or c
  SITE (8607): n equals a,t,g, or c
  SITE (8608): n equals a,t,g, or c
  SITE (8609): n equals a,t,g, or c
  SITE (8610): n equals a,t,g, or c
  SITE (8611): n equals a,t,g, or c
  SITE (8612): n equals a,t,g, or c
  SITE (8613): n equals a,t,g, or c
  SITE (8614): n equals a,t,g, or c
  SITE (8615): n equals a,t,g, or c
  SITE (8616): n equals a,t,g, or c
  SITE (8617): n equals a,t,g, or c
  SITE (8618): n equals a,t,g, or c
  SITE (8619): n equals a,t,g, or c
  SITE (8620): n equals a,t,g, or c
  SITE (8621): n equals a,t,g, or c
  SITE (8622): n equals a,t,g, or c
  SITE (8623): n equals a,t,g, or c
  SITE (8624): n equals a,t,g, or c
  SITE (8625): n equals a,t,g, or c
  SITE (8626): n equals a,t,g, or c
  SITE (8627): n equals a,t,g, or c
  SITE (8628): n equals a,t,g, or c
  SITE (8629): n equals a,t,g, or c
  SITE (8630): n equals a,t,g, or c
  SITE (8631): n equals a,t,g, or c
  SITE (8632): n equals a,t,g, or c
  SITE (8633): n equals a,t,g, or c
  SITE (8634): n equals a,t,g, or c
  SITE (8635): n equals a,t,g, or c
  SITE (8636): n equals a,t,g, or c
  SITE (8637): n equals a,t,g, or c
  SITE (8638): n equals a,t,g, or c
  SITE (8639): n equals a,t,g, or c
  SITE (8640): n equals a,t,g, or c
  SITE (8641): n equals a,t,g, or c
  SITE (8642): n equals a,t,g, or c
  SITE (8643): n equals a,t,g, or c
  SITE (8644): n equals a,t,g, or c
  SITE (8645): n equals a,t,g, or c
  SITE (8646): n equals a,t,g, or c
  SITE (8647): n equals a,t,g, or c
  SITE (8648): n equals a,t,g, or c
  SITE (8649): n equals a,t,g, or c
  SITE (8650): n equals a,t,g, or c
  SITE (8651): n equals a,t,g, or c
  SITE (8652): n equals a,t,g, or c
  SITE (8653): n equals a,t,g, or c
  SITE (8654): n equals a,t,g, or c
  SITE (8655): n equals a,t,g, or c
  SITE (8656): n equals a,t,g, or c
  SITE (8657): n equals a,t,g, or c
  SITE (8658): n equals a,t,g, or c
  SITE (8659): n equals a,t,g, or c
  SITE (8660): n equals a,t,g, or c
  SITE (8661): n equals a,t,g, or c
  SITE (8662): n equals a,t,g, or c
  SITE (8663): n equals a,t,g, or c
  SITE (8664): n equals a,t,g, or c
  SITE (8665): n equals a,t,g, or c
  SITE (8666): n equals a,t,g, or c
  SITE (8667): n equals a,t,g, or c
  SITE (8668): n equals a,t,g, or c
  SITE (8669): n equals a,t,g, or c
  SITE (8670): n equals a,t,g, or c
  SITE (8671): n equals a,t,g, or c
  SITE (8672): n equals a,t,g, or c
  SITE (8673): n equals a,t,g, or c
  SITE (8674): n equals a,t,g, or c
  SITE (8675): n equals a,t,g, or c
  SITE (8676): n equals a,t,g, or c
  SITE (8677): n equals a,t,g, or c
  SITE (8678): n equals a,t,g, or c
  SITE (8679): n equals a,t,g, or c
  SITE (8680): n equals a,t,g, or c
  SITE (8681): n equals a,t,g, or c
  SITE (8682): n equals a,t,g, or c
  SITE (8683): n equals a,t,g, or c
  SITE (8684): n equals a,t,g, or c
  SITE (8685): n equals a,t,g, or c
  SITE (8686): n equals a,t,g, or c
  SITE (8687): n equals a,t,g, or c
  SITE (8688): n equals a,t,g, or c
  SITE (8689): n equals a,t,g, or c
  SITE (8690): n equals a,t,g, or c
  SITE (8691): n equals a,t,g, or c
  SITE (8692): n equals a,t,g, or c
  SITE (8693): n equals a,t,g, or c
  SITE (8694): n equals a,t,g, or c
  SITE (8695): n equals a,t,g, or c
  SITE (8696): n equals a,t,g, or c
  SITE (8697): n equals a,t,g, or c
  SITE (8698): n equals a,t,g, or c
  SITE (8699): n equals a,t,g, or c
  SITE (8700): n equals a,t,g, or c
  SITE (8701): n equals a,t,g, or c
  SITE (8702): n equals a,t,g, or c
  SITE (8703): n equals a,t,g, or c
  SITE (8704): n equals a,t,g, or c
  SITE (8705): n equals a,t,g, or c
  SITE (8706): n equals a,t,g, or c
  SITE (8707): n equals a,t,g, or c
  SITE (8708): n equals a,t,g, or c
  SITE (8709): n equals a,t,g, or c
  SITE (8710): n equals a,t,g, or c
  SITE (8711): n equals a,t,g, or c
  SITE (8712): n equals a,t,g, or c
  SITE (8713): n equals a,t,g, or c
  SITE (8714): n equals a,t,g, or c
  SITE (8715): n equals a,t,g, or c
  SITE (8716): n equals a,t,g, or c
  SITE (8717): n equals a,t,g, or c
  SITE (8718): n equals a,t,g, or c
  SITE (8719): n equals a,t,g, or c
  SITE (8720): n equals a,t,g, or c
  SITE (8721): n equals a,t,g, or c
  SITE (8722): n equals a,t,g, or c
  SITE (8723): n equals a,t,g, or c
  SITE (8724): n equals a,t,g, or c
  SITE (8725): n equals a,t,g, or c
  SITE (8726): n equals a,t,g, or c
  SITE (8727): n equals a,t,g, or c
  SITE (8728): n equals a,t,g, or c
  SITE (8729): n equals a,t,g, or c
  SITE (8730): n equals a,t,g, or c
  SITE (8731): n equals a,t,g, or c
  SITE (8732): n equals a,t,g, or c
  SITE (8733): n equals a,t,g, or c
  SITE (8734): n equals a,t,g, or c
  SITE (8735): n equals a,t,g, or c
  SITE (8736): n equals a,t,g, or c
  SITE (8737): n equals a,t,g, or c
  SITE (8738): n equals a,t,g, or c
  SITE (8739): n equals a,t,g, or c
  SITE (8740): n equals a,t,g, or c
  SITE (8741): n equals a,t,g, or c
  SITE (8742): n equals a,t,g, or c
  SITE (8743): n equals a,t,g, or c
  SITE (8744): n equals a,t,g, or c
  SITE (8745): n equals a,t,g, or c
  SITE (8746): n equals a,t,g, or c
  SITE (8747): n equals a,t,g, or c
  SITE (8748): n equals a,t,g, or c
  SITE (8749): n equals a,t,g, or c
  SITE (8750): n equals a,t,g, or c
  SITE (8751): n equals a,t,g, or c
  SITE (8752): n equals a,t,g, or c
  SITE (8753): n equals a,t,g, or c
  SITE (8754): n equals a,t,g, or c
  SITE (8755): n equals a,t,g, or c
  SITE (8756): n equals a,t,g, or c
  SITE (8757): n equals a,t,g, or c
  SITE (8758): n equals a,t,g, or c
  SITE (8759): n equals a,t,g, or c
  SITE (8760): n equals a,t,g, or c
  SITE (8761): n equals a,t,g, or c
  SITE (8762): n equals a,t,g, or c
  SITE (8763): n equals a,t,g, or c
  SITE (8764): n equals a,t,g, or c
  SITE (8765): n equals a,t,g, or c
  SITE (8766): n equals a,t,g, or c
  SITE (8767): n equals a,t,g, or c
  SITE (8768): n equals a,t,g, or c
  SITE (8769): n equals a,t,g, or c
  SITE (8770): n equals a,t,g, or c
  SITE (8771): n equals a,t,g, or c
  SITE (8772): n equals a,t,g, or c
  SITE (8773): n equals a,t,g, or c
  SITE (8774): n equals a,t,g, or c
  SITE (8775): n equals a,t,g, or c
  SITE (8776): n equals a,t,g, or c
  SITE (8777): n equals a,t,g, or c
  SITE (8778): n equals a,t,g, or c
  SITE (8779): n equals a,t,g, or c
  SITE (8780): n equals a,t,g, or c
  SITE (8781): n equals a,t,g, or c
  SITE (8782): n equals a,t,g, or c
  SITE (8783): n equals a,t,g, or c
  SITE (8784): n equals a,t,g, or c
  SITE (8785): n equals a,t,g, or c
  SITE (8786): n equals a,t,g, or c
  SITE (8787): n equals a,t,g, or c
  SITE (8788): n equals a,t,g, or c
  SITE (8789): n equals a,t,g, or c
  SITE (8790): n equals a,t,g, or c
  SITE (8791): n equals a,t,g, or c
  SITE (8792): n equals a,t,g, or c
  SITE (8793): n equals a,t,g, or c
  SITE (8794): n equals a,t,g, or c
  SITE (8795): n equals a,t,g, or c
  SITE (8796): n equals a,t,g, or c
  SITE (8797): n equals a,t,g, or c
  SITE (8798): n equals a,t,g, or c
  SITE (8799): n equals a,t,g, or c
  SITE (8800): n equals a,t,g, or c
  SITE (8801): n equals a,t,g, or c
  SITE (8802): n equals a,t,g, or c
  SITE (8803): n equals a,t,g, or c
  SITE (8804): n equals a,t,g, or c
  SITE (8805): n equals a,t,g, or c
  SITE (8806): n equals a,t,g, or c
  SITE (8807): n equals a,t,g, or c
  SITE (8808): n equals a,t,g, or c
  SITE (8809): n equals a,t,g, or c
  SITE (8810): n equals a,t,g, or c
  SITE (8811): n equals a,t,g, or c
  SITE (8812): n equals a,t,g, or c
  SITE (8813): n equals a,t,g, or c
  SITE (8814): n equals a,t,g, or c
  SITE (8815): n equals a,t,g, or c
  SITE (8816): n equals a,t,g, or c
  SITE (8817): n equals a,t,g, or c
  SITE (8818): n equals a,t,g, or c
  SITE (8819): n equals a,t,g, or c
  SITE (8820): n equals a,t,g, or c
  SITE (8821): n equals a,t,g, or c
  SITE (8822): n equals a,t,g, or c
  SITE (8823): n equals a,t,g, or c
  SITE (8824): n equals a,t,g, or c
  SITE (8825): n equals a,t,g, or c
  SITE (8826): n equals a,t,g, or c
  SITE (8827): n equals a,t,g, or c
  SITE (8828): n equals a,t,g, or c
  SITE (8829): n equals a,t,g, or c
  SITE (8830): n equals a,t,g, or c
  SITE (8831): n equals a,t,g, or c
  SITE (8832): n equals a,t,g, or c
  SITE (8833): n equals a,t,g, or c
  SITE (8834): n equals a,t,g, or c
  SITE (8835): n equals a,t,g, or c
  SITE (8836): n equals a,t,g, or c
  SITE (8837): n equals a,t,g, or c
  SITE (8838): n equals a,t,g, or c
  SITE (8839): n equals a,t,g, or c
  SITE (8840): n equals a,t,g, or c
  SITE (8841): n equals a,t,g, or c
  SITE (8842): n equals a,t,g, or c
  SITE (8843): n equals a,t,g, or c
  SITE (8844): n equals a,t,g, or c
  SITE (8845): n equals a,t,g, or c
  SITE (8846): n equals a,t,g, or c
  SITE (8847): n equals a,t,g, or c
  SITE (8848): n equals a,t,g, or c
  SITE (8849): n equals a,t,g, or c
  SITE (8850): n equals a,t,g, or c
  SITE (8851): n equals a,t,g, or c
  SITE (8852): n equals a,t,g, or c
  SITE (8853): n equals a,t,g, or c
  SITE (8854): n equals a,t,g, or c
  SITE (8855): n equals a,t,g, or c
  SITE (8856): n equals a,t,g, or c
  SITE (8857): n equals a,t,g, or c
  SITE (8858): n equals a,t,g, or c
  SITE (8859): n equals a,t,g, or c
  SITE (8860): n equals a,t,g, or c
  SITE (8861): n equals a,t,g, or c
  SITE (8862): n equals a,t,g, or c
  SITE (8863): n equals a,t,g, or c
  SITE (8864): n equals a,t,g, or c
  SITE (8865): n equals a,t,g, or c
  SITE (8866): n equals a,t,g, or c
  SITE (8867): n equals a,t,g, or c
  SITE (8868): n equals a,t,g, or c
  SITE (8869): n equals a,t,g, or c
  SITE (8870): n equals a,t,g, or c
  SITE (8871): n equals a,t,g, or c
  SITE (8872): n equals a,t,g, or c
  SITE (8873): n equals a,t,g, or c
  SITE (8874): n equals a,t,g, or c
  SITE (8875): n equals a,t,g, or c
  SITE (8876): n equals a,t,g, or c
  SITE (8877): n equals a,t,g, or c
  SITE (8878): n equals a,t,g, or c
  SITE (8879): n equals a,t,g, or c
  SITE (8880): n equals a,t,g, or c
  SITE (8881): n equals a,t,g, or c
  SITE (8882): n equals a,t,g, or c
  SITE (8883): n equals a,t,g, or c
  SITE (8884): n equals a,t,g, or c
  SITE (8885): n equals a,t,g, or c
  SITE (8886): n equals a,t,g, or c
  SITE (8887): n equals a,t,g, or c
  SITE (8888): n equals a,t,g, or c
  SITE (8889): n equals a,t,g, or c
  SITE (8890): n equals a,t,g, or c
  SITE (8891): n equals a,t,g, or c
  SITE (8892): n equals a,t,g, or c
  SITE (8893): n equals a,t,g, or c
  SITE (8894): n equals a,t,g, or c
  SITE (8895): n equals a,t,g, or c
  SITE (8896): n equals a,t,g, or c
  SITE (8897): n equals a,t,g, or c
  SITE (8898): n equals a,t,g, or c
  SITE (8899): n equals a,t,g, or c
  SITE (8900): n equals a,t,g, or c
  SITE (8901): n equals a,t,g, or c
  SITE (8902): n equals a,t,g, or c
  SITE (8903): n equals a,t,g, or c
  SITE (8904): n equals a,t,g, or c
  SITE (8905): n equals a,t,g, or c
  SITE (8906): n equals a,t,g, or c
  SITE (8907): n equals a,t,g, or c
  SITE (8908): n equals a,t,g, or c
  SITE (8909): n equals a,t,g, or c
  SITE (8910): n equals a,t,g, or c
  SITE (8911): n equals a,t,g, or c
  SITE (8912): n equals a,t,g, or c
  SITE (8913): n equals a,t,g, or c
  SITE (8914): n equals a,t,g, or c
  SITE (8915): n equals a,t,g, or c
  SITE (8916): n equals a,t,g, or c
  SITE (8917): n equals a,t,g, or c
  SITE (8918): n equals a,t,g, or c
  SITE (8919): n equals a,t,g, or c
  SITE (8920): n equals a,t,g, or c
  SITE (8921): n equals a,t,g, or c
  SITE (8922): n equals a,t,g, or c
  SITE (8923): n equals a,t,g, or c
  SITE (8924): n equals a,t,g, or c
  SITE (8925): n equals a,t,g, or c
  SITE (8926): n equals a,t,g, or c
  SITE (8927): n equals a,t,g, or c
  SITE (8928): n equals a,t,g, or c
  SITE (8929): n equals a,t,g, or c
  SITE (8930): n equals a,t,g, or c
  SITE (8931): n equals a,t,g, or c
  SITE (8932): n equals a,t,g, or c
  SITE (8933): n equals a,t,g, or c
  SITE (8934): n equals a,t,g, or c
  SITE (8935): n equals a,t,g, or c
  SITE (8936): n equals a,t,g, or c
  SITE (8937): n equals a,t,g, or c
  SITE (8938): n equals a,t,g, or c
  SITE (8939): n equals a,t,g, or c
  SITE (8940): n equals a,t,g, or c
  SITE (8941): n equals a,t,g, or c
  SITE (8942): n equals a,t,g, or c
  SITE (8943): n equals a,t,g, or c
  SITE (8944): n equals a,t,g, or c
  SITE (8945): n equals a,t,g, or c
  SITE (8946): n equals a,t,g, or c
  SITE (8947): n equals a,t,g, or c
  SITE (8948): n equals a,t,g, or c
  SITE (8949): n equals a,t,g, or c
  SITE (8950): n equals a,t,g, or c
  SITE (8951): n equals a,t,g, or c
  SITE (8952): n equals a,t,g, or c
  SITE (8953): n equals a,t,g, or c
  SITE (8954): n equals a,t,g, or c
  SITE (8955): n equals a,t,g, or c
  SITE (8956): n equals a,t,g, or c
  SITE (8957): n equals a,t,g, or c
  SITE (8958): n equals a,t,g, or c
  SITE (8959): n equals a,t,g, or c
  SITE (8960): n equals a,t,g, or c
  SITE (8961): n equals a,t,g, or c
  SITE (8962): n equals a,t,g, or c
  SITE (8963): n equals a,t,g, or c
  SITE (8964): n equals a,t,g, or c
  SITE (8965): n equals a,t,g, or c
  SITE (8966): n equals a,t,g, or c
  SITE (8967): n equals a,t,g, or c
  SITE (8968): n equals a,t,g, or c
  SITE (8969): n equals a,t,g, or c
  SITE (8970): n equals a,t,g, or c
  SITE (8971): n equals a,t,g, or c
  SITE (8972): n equals a,t,g, or c
  SITE (8973): n equals a,t,g, or c
  SITE (8974): n equals a,t,g, or c
  SITE (8975): n equals a,t,g, or c
  SITE (8976): n equals a,t,g, or c
  SITE (8977): n equals a,t,g, or c
  SITE (8978): n equals a,t,g, or c
  SITE (8979): n equals a,t,g, or c
  SITE (8980): n equals a,t,g, or c
  SITE (8981): n equals a,t,g, or c
  SITE (8982): n equals a,t,g, or c
  SITE (8983): n equals a,t,g, or c
  SITE (8984): n equals a,t,g, or c
  SITE (8985): n equals a,t,g, or c
  SITE (8986): n equals a,t,g, or c
  SITE (8987): n equals a,t,g, or c
  SITE (8988): n equals a,t,g, or c
  SITE (8989): n equals a,t,g, or c
  SITE (8990): n equals a,t,g, or c
  SITE (8991): n equals a,t,g, or c
  SITE (8992): n equals a,t,g, or c
  SITE (8993): n equals a,t,g, or c
  SITE (8994): n equals a,t,g, or c
  SITE (8995): n equals a,t,g, or c
  SITE (8996): n equals a,t,g, or c
  SITE (8997): n equals a,t,g, or c
  SITE (8998): n equals a,t,g, or c
  SITE (8999): n equals a,t,g, or c
  SITE (9000): n equals a,t,g, or c
  SITE (9001): n equals a,t,g, or c
  SITE (9002): n equals a,t,g, or c
  SITE (9003): n equals a,t,g, or c
  SITE (9004): n equals a,t,g, or c
  SITE (9005): n equals a,t,g, or c
  SITE (9006): n equals a,t,g, or c
  SITE (9007): n equals a,t,g, or c
  SITE (9008): n equals a,t,g, or c
  SITE (9009): n equals a,t,g, or c
  SITE (9010): n equals a,t,g, or c
  SITE (9011): n equals a,t,g, or c
  SITE (9012): n equals a,t,g, or c
  SITE (9013): n equals a,t,g, or c
  SITE (9014): n equals a,t,g, or c
  SITE (9015): n equals a,t,g, or c
  SITE (9016): n equals a,t,g, or c
  SITE (9017): n equals a,t,g, or c
  SITE (9018): n equals a,t,g, or c
  SITE (9019): n equals a,t,g, or c
  SITE (9020): n equals a,t,g, or c
  SITE (9021): n equals a,t,g, or c
  SITE (9022): n equals a,t,g, or c
  SITE (9023): n equals a,t,g, or c
  SITE (9024): n equals a,t,g, or c
  SITE (9025): n equals a,t,g, or c
  SITE (9026): n equals a,t,g, or c
  SITE (9027): n equals a,t,g, or c
  SITE (9028): n equals a,t,g, or c
  SITE (9029): n equals a,t,g, or c
  SITE (9030): n equals a,t,g, or c
  SITE (9031): n equals a,t,g, or c
  SITE (9032): n equals a,t,g, or c
  SITE (9033): n equals a,t,g, or c
  SITE (9034): n equals a,t,g, or c
  SITE (9035): n equals a,t,g, or c
  SITE (9036): n equals a,t,g, or c
  SITE (9037): n equals a,t,g, or c
  SITE (9038): n equals a,t,g, or c
  SITE (9039): n equals a,t,g, or c
  SITE (9040): n equals a,t,g, or c
  SITE (9041): n equals a,t,g, or c
  SITE (9042): n equals a,t,g, or c
  SITE (9043): n equals a,t,g, or c
  SITE (9044): n equals a,t,g, or c
  SITE (9045): n equals a,t,g, or c
  SITE (9046): n equals a,t,g, or c
  SITE (9047): n equals a,t,g, or c
  SITE (9048): n equals a,t,g, or c
  SITE (9049): n equals a,t,g, or c
  SITE (9050): n equals a,t,g, or c
  SITE (9051): n equals a,t,g, or c
  SITE (9052): n equals a,t,g, or c
  SITE (9053): n equals a,t,g, or c
  SITE (9054): n equals a,t,g, or c
  SITE (9055): n equals a,t,g, or c
  SITE (9056): n equals a,t,g, or c
  SITE (9057): n equals a,t,g, or c
  SITE (9058): n equals a,t,g, or c
  SITE (9059): n equals a,t,g, or c
  SITE (9060): n equals a,t,g, or c
  SITE (9061): n equals a,t,g, or c
  SITE (9062): n equals a,t,g, or c
  SITE (9063): n equals a,t,g, or c
  SITE (9064): n equals a,t,g, or c
  SITE (9065): n equals a,t,g, or c
  SITE (9066): n equals a,t,g, or c
  SITE (9067): n equals a,t,g, or c
  SITE (9068): n equals a,t,g, or c
  SITE (9069): n equals a,t,g, or c
  SITE (9070): n equals a,t,g, or c
  SITE (9071): n equals a,t,g, or c
  SITE (9072): n equals a,t,g, or c
  SITE (9073): n equals a,t,g, or c
  SITE (9074): n equals a,t,g, or c
  SITE (9075): n equals a,t,g, or c
  SITE (9076): n equals a,t,g, or c
  SITE (9077): n equals a,t,g, or c
  SITE (9078): n equals a,t,g, or c
  SITE (9079): n equals a,t,g, or c
  SITE (9080): n equals a,t,g, or c
  SITE (9081): n equals a,t,g, or c
  SITE (9082): n equals a,t,g, or c
  SITE (9083): n equals a,t,g, or c
  SITE (9084): n equals a,t,g, or c
  SITE (9085): n equals a,t,g, or c
  SITE (9086): n equals a,t,g, or c
  SITE (9087): n equals a,t,g, or c
  SITE (9088): n equals a,t,g, or c
  SITE (9089): n equals a,t,g, or c
  SITE (9090): n equals a,t,g, or c
  SITE (9091): n equals a,t,g, or c
  SITE (9092): n equals a,t,g, or c
  SITE (9093): n equals a,t,g, or c
  SITE (9094): n equals a,t,g, or c
  SITE (9095): n equals a,t,g, or c
  SITE (9096): n equals a,t,g, or c
  SITE (9097): n equals a,t,g, or c
  SITE (9098): n equals a,t,g, or c
  SITE (9099): n equals a,t,g, or c
  SITE (9100): n equals a,t,g, or c
  SITE (9101): n equals a,t,g, or c
  SITE (9102): n equals a,t,g, or c
  SITE (9103): n equals a,t,g, or c
  SITE (9104): n equals a,t,g, or c
  SITE (9105): n equals a,t,g, or c
  SITE (9106): n equals a,t,g, or c
  SITE (9107): n equals a,t,g, or c
  SITE (9108): n equals a,t,g, or c
  SITE (9109): n equals a,t,g, or c
  SITE (9110): n equals a,t,g, or c
  SITE (9111): n equals a,t,g, or c
  SITE (9112): n equals a,t,g, or c
  SITE (9113): n equals a,t,g, or c
  SITE (9114): n equals a,t,g, or c
  SITE (9115): n equals a,t,g, or c
  SITE (9116): n equals a,t,g, or c
  SITE (9117): n equals a,t,g, or c
  SITE (9118): n equals a,t,g, or c
  SITE (9119): n equals a,t,g, or c
  SITE (9120): n equals a,t,g, or c
  SITE (9121): n equals a,t,g, or c
  SITE (9122): n equals a,t,g, or c
  SITE (9123): n equals a,t,g, or c
  SITE (9124): n equals a,t,g, or c
  SITE (9125): n equals a,t,g, or c
  SITE (9126): n equals a,t,g, or c
  SITE (9127): n equals a,t,g, or c
  SITE (9128): n equals a,t,g, or c
  SITE (9129): n equals a,t,g, or c
  SITE (9130): n equals a,t,g, or c
  SITE (9131): n equals a,t,g, or c
  SITE (9132): n equals a,t,g, or c
  SITE (9133): n equals a,t,g, or c
  SITE (9134): n equals a,t,g, or c
  SITE (9135): n equals a,t,g, or c
  SITE (9136): n equals a,t,g, or c
  SITE (9137): n equals a,t,g, or c
  SITE (9138): n equals a,t,g, or c
  SITE (9139): n equals a,t,g, or c
  SITE (9140): n equals a,t,g, or c
  SITE (9141): n equals a,t,g, or c
  SITE (9142): n equals a,t,g, or c
  SITE (9143): n equals a,t,g, or c
  SITE (9144): n equals a,t,g, or c
  SITE (9145): n equals a,t,g, or c
  SITE (9146): n equals a,t,g, or c
  SITE (9147): n equals a,t,g, or c
  SITE (9148): n equals a,t,g, or c
  SITE (9149): n equals a,t,g, or c
  SITE (9150): n equals a,t,g, or c
  SITE (9151): n equals a,t,g, or c
  SITE (9152): n equals a,t,g, or c
  SITE (9153): n equals a,t,g, or c
  SITE (9154): n equals a,t,g, or c
  SITE (9155): n equals a,t,g, or c
  SITE (9156): n equals a,t,g, or c
  SITE (9157): n equals a,t,g, or c
  SITE (9158): n equals a,t,g, or c
  SITE (9159): n equals a,t,g, or c
  SITE (9160): n equals a,t,g, or c
  SITE (9161): n equals a,t,g, or c
  SITE (9162): n equals a,t,g, or c
  SITE (9163): n equals a,t,g, or c
  SITE (9164): n equals a,t,g, or c
  SITE (9165): n equals a,t,g, or c
  SITE (9166): n equals a,t,g, or c
  SITE (9167): n equals a,t,g, or c
  SITE (9168): n equals a,t,g, or c
  SITE (9169): n equals a,t,g, or c
  SITE (9170): n equals a,t,g, or c
  SITE (9171): n equals a,t,g, or c
  SITE (9172): n equals a,t,g, or c
  SITE (9173): n equals a,t,g, or c
  SITE (9174): n equals a,t,g, or c
  SITE (9175): n equals a,t,g, or c
  SITE (9176): n equals a,t,g, or c
  SITE (9177): n equals a,t,g, or c
  SITE (9178): n equals a,t,g, or c
  SITE (9179): n equals a,t,g, or c
  SITE (9180): n equals a,t,g, or c
  SITE (9181): n equals a,t,g, or c
  SITE (9182): n equals a,t,g, or c
  SITE (9183): n equals a,t,g, or c
  SITE (9184): n equals a,t,g, or c
  SITE (9185): n equals a,t,g, or c
  SITE (9186): n equals a,t,g, or c
  SITE (9187): n equals a,t,g, or c
  SITE (9188): n equals a,t,g, or c
  SITE (9189): n equals a,t,g, or c
  SITE (9190): n equals a,t,g, or c
  SITE (9191): n equals a,t,g, or c
  SITE (9192): n equals a,t,g, or c
  SITE (9193): n equals a,t,g, or c
  SITE (9194): n equals a,t,g, or c
  SITE (9195): n equals a,t,g, or c
  SITE (9196): n equals a,t,g, or c
  SITE (9197): n equals a,t,g, or c
  SITE (9198): n equals a,t,g, or c
  SITE (9199): n equals a,t,g, or c
  SITE (9200): n equals a,t,g, or c
  SITE (9201): n equals a,t,g, or c
  SITE (9202): n equals a,t,g, or c
  SITE (9203): n equals a,t,g, or c
  SITE (9204): n equals a,t,g, or c
  SITE (9205): n equals a,t,g, or c
  SITE (9206): n equals a,t,g, or c
  SITE (9207): n equals a,t,g, or c
  SITE (9208): n equals a,t,g, or c
  SITE (9209): n equals a,t,g, or c
  SITE (9210): n equals a,t,g, or c
  SITE (9211): n equals a,t,g, or c
  SITE (9212): n equals a,t,g, or c
  SITE (9213): n equals a,t,g, or c
  SITE (9214): n equals a,t,g, or c
  SITE (9215): n equals a,t,g, or c
  SITE (9216): n equals a,t,g, or c
  SITE (9217): n equals a,t,g, or c
  SITE (9218): n equals a,t,g, or c
  SITE (9219): n equals a,t,g, or c
  SITE (9220): n equals a,t,g, or c
  SITE (9221): n equals a,t,g, or c
  SITE (9222): n equals a,t,g, or c
  SITE (9223): n equals a,t,g, or c
  SITE (9224): n equals a,t,g, or c
  SITE (9225): n equals a,t,g, or c
  SITE (9226): n equals a,t,g, or c
  SITE (9227): n equals a,t,g, or c
  SITE (9228): n equals a,t,g, or c
  SITE (9229): n equals a,t,g, or c
  SITE (9230): n equals a,t,g, or c
  SITE (9231): n equals a,t,g, or c
  SITE (9232): n equals a,t,g, or c
  SITE (9233): n equals a,t,g, or c
  SITE (9234): n equals a,t,g, or c
  SITE (9235): n equals a,t,g, or c
  SITE (9236): n equals a,t,g, or c
  SITE (9237): n equals a,t,g, or c
  SITE (9238): n equals a,t,g, or c
  SITE (9239): n equals a,t,g, or c
  SITE (9240): n equals a,t,g, or c
  SITE (9241): n equals a,t,g, or c
  SITE (9242): n equals a,t,g, or c
  SITE (9243): n equals a,t,g, or c
  SITE (9244): n equals a,t,g, or c
  SITE (9245): n equals a,t,g, or c
  SITE (9246): n equals a,t,g, or c
  SITE (9247): n equals a,t,g, or c
  SITE (9248): n equals a,t,g, or c
  SITE (9249): n equals a,t,g, or c
  SITE (9250): n equals a,t,g, or c
  SITE (9251): n equals a,t,g, or c
  SITE (9252): n equals a,t,g, or c
  SITE (9253): n equals a,t,g, or c
  SITE (9254): n equals a,t,g, or c
  SITE (9255): n equals a,t,g, or c
  SITE (9256): n equals a,t,g, or c
  SITE (9257): n equals a,t,g, or c
  SITE (9258): n equals a,t,g, or c
  SITE (9259): n equals a,t,g, or c
  SITE (9260): n equals a,t,g, or c
  SITE (9261): n equals a,t,g, or c
  SITE (9262): n equals a,t,g, or c
  SITE (9263): n equals a,t,g, or c
  SITE (9264): n equals a,t,g, or c
  SITE (9265): n equals a,t,g, or c
  SITE (9266): n equals a,t,g, or c
  SITE (9267): n equals a,t,g, or c
  SITE (9268): n equals a,t,g, or c
  SITE (9269): n equals a,t,g, or c
  SITE (9270): n equals a,t,g, or c
  SITE (9271): n equals a,t,g, or c
  SITE (9272): n equals a,t,g, or c
  SITE (9273): n equals a,t,g, or c
  SITE (9274): n equals a,t,g, or c
  SITE (9275): n equals a,t,g, or c
  SITE (9276): n equals a,t,g, or c
  SITE (9277): n equals a,t,g, or c
  SITE (9278): n equals a,t,g, or c
  SITE (9279): n equals a,t,g, or c
  SITE (9280): n equals a,t,g, or c
  SITE (9281): n equals a,t,g, or c
  SITE (9282): n equals a,t,g, or c
  SITE (9283): n equals a,t,g, or c
  SITE (9284): n equals a,t,g, or c
  SITE (9285): n equals a,t,g, or c
  SITE (9286): n equals a,t,g, or c
  SITE (9287): n equals a,t,g, or c
  SITE (9288): n equals a,t,g, or c
  SITE (9289): n equals a,t,g, or c
  SITE (9290): n equals a,t,g, or c
  SITE (9291): n equals a,t,g, or c
  SITE (9292): n equals a,t,g, or c
  SITE (9293): n equals a,t,g, or c
  SITE (9294): n equals a,t,g, or c
  SITE (9295): n equals a,t,g, or c
  SITE (9296): n equals a,t,g, or c
  SITE (9297): n equals a,t,g, or c
  SITE (9298): n equals a,t,g, or c
  SITE (9299): n equals a,t,g, or c
  SITE (9300): n equals a,t,g, or c
  SITE (9301): n equals a,t,g, or c
  SITE (9302): n equals a,t,g, or c
  SITE (9303): n equals a,t,g, or c
  SITE (9304): n equals a,t,g, or c
  SITE (9305): n equals a,t,g, or c
  SITE (9306): n equals a,t,g, or c
  SITE (9307): n equals a,t,g, or c
  SITE (9308): n equals a,t,g, or c
  SITE (9309): n equals a,t,g, or c
  SITE (9310): n equals a,t,g, or c
  SITE (9311): n equals a,t,g, or c
  SITE (9312): n equals a,t,g, or c
  SITE (9313): n equals a,t,g, or c
  SITE (9314): n equals a,t,g, or c
  SITE (9315): n equals a,t,g, or c
  SITE (9316): n equals a,t,g, or c
  SITE (9317): n equals a,t,g, or c
  SITE (9318): n equals a,t,g, or c
  SITE (9319): n equals a,t,g, or c
  SITE (9320): n equals a,t,g, or c
  SITE (9321): n equals a,t,g, or c
  SITE (9322): n equals a,t,g, or c
  SITE (9323): n equals a,t,g, or c
  SITE (9324): n equals a,t,g, or c
  SITE (9325): n equals a,t,g, or c
  SITE (9326): n equals a,t,g, or c
  SITE (9327): n equals a,t,g, or c
  SITE (9328): n equals a,t,g, or c
  SITE (9329): n equals a,t,g, or c
  SITE (9330): n equals a,t,g, or c
  SITE (9331): n equals a,t,g, or c
  SITE (9332): n equals a,t,g, or c
  SITE (9333): n equals a,t,g, or c
  SITE (9334): n equals a,t,g, or c
  SITE (9335): n equals a,t,g, or c
  SITE (9336): n equals a,t,g, or c
  SITE (9337): n equals a,t,g, or c
  SITE (9338): n equals a,t,g, or c
  SITE (9339): n equals a,t,g, or c
  SITE (9340): n equals a,t,g, or c
  SITE (9341): n equals a,t,g, or c
  SITE (9342): n equals a,t,g, or c
  SITE (9343): n equals a,t,g, or c
  SITE (9344): n equals a,t,g, or c
  SITE (9345): n equals a,t,g, or c
  SITE (9346): n equals a,t,g, or c
  SITE (9347): n equals a,t,g, or c
  SITE (9348): n equals a,t,g, or c
  SITE (9349): n equals a,t,g, or c
  SITE (9350): n equals a,t,g, or c
  SITE (9351): n equals a,t,g, or c
  SITE (9352): n equals a,t,g, or c
  SITE (9353): n equals a,t,g, or c
  SITE (9354): n equals a,t,g, or c
  SITE (9355): n equals a,t,g, or c
  SITE (9356): n equals a,t,g, or c
  SITE (9357): n equals a,t,g, or c
  SITE (9358): n equals a,t,g, or c
  SITE (9359): n equals a,t,g, or c
  SITE (9360): n equals a,t,g, or c
  SITE (9361): n equals a,t,g, or c
  SITE (9362): n equals a,t,g, or c
  SITE (9363): n equals a,t,g, or c
  SITE (9364): n equals a,t,g, or c
  SITE (9365): n equals a,t,g, or c
  SITE (9366): n equals a,t,g, or c
  SITE (9367): n equals a,t,g, or c
  SITE (9368): n equals a,t,g, or c
  SITE (9369): n equals a,t,g, or c
  SITE (9370): n equals a,t,g, or c
  SITE (9371): n equals a,t,g, or c
  SITE (9372): n equals a,t,g, or c
  SITE (9373): n equals a,t,g, or c
  SITE (9374): n equals a,t,g, or c
  SITE (9375): n equals a,t,g, or c
  SITE (9376): n equals a,t,g, or c
  SITE (9377): n equals a,t,g, or c
  SITE (9378): n equals a,t,g, or c
  SITE (9379): n equals a,t,g, or c
  SITE (9380): n equals a,t,g, or c
  SITE (9381): n equals a,t,g, or c
  SITE (9382): n equals a,t,g, or c
  SITE (9383): n equals a,t,g, or c
  SITE (9384): n equals a,t,g, or c
  SITE (9385): n equals a,t,g, or c
  SITE (9386): n equals a,t,g, or c
  SITE (9387): n equals a,t,g, or c
  SITE (9388): n equals a,t,g, or c
  SITE (9389): n equals a,t,g, or c
  SITE (9390): n equals a,t,g, or c
  SITE (9391): n equals a,t,g, or c
  SITE (9392): n equals a,t,g, or c
  SITE (9393): n equals a,t,g, or c
  SITE (9394): n equals a,t,g, or c
  SITE (9395): n equals a,t,g, or c
  SITE (9396): n equals a,t,g, or c
  SITE (9397): n equals a,t,g, or c
  SITE (9398): n equals a,t,g, or c
  SITE (9399): n equals a,t,g, or c
  SITE (9400): n equals a,t,g, or c
  SITE (9401): n equals a,t,g, or c
  SITE (9402): n equals a,t,g, or c
  SITE (9403): n equals a,t,g, or c
  SITE (9404): n equals a,t,g, or c
  SITE (9405): n equals a,t,g, or c
  SITE (9406): n equals a,t,g, or c
  SITE (9407): n equals a,t,g, or c
  SITE (9408): n equals a,t,g, or c
  SITE (9409): n equals a,t,g, or c
  SITE (9410): n equals a,t,g, or c
  SITE (9411): n equals a,t,g, or c
  SITE (9412): n equals a,t,g, or c
  SITE (9413): n equals a,t,g, or c
  SITE (9414): n equals a,t,g, or c
  SITE (9415): n equals a,t,g, or c
  SITE (9416): n equals a,t,g, or c

SEQ ID NO: 12585 - DNA, 1390 bp, Homo sapiens
gtatatcttgtctgtcagctaaattgtgtccttaagggcaggacctgtgtttcagacatctttgatatttaccatgtttgtcataaatttagtgaatgtacagtatattttggttttaggcgagcagtgtatctgtcccttttgctgcttgctagttctgccttacaacttccactggaaagagctttttagtgcagcaaatagtgtctgcattttattgtataaagcattgcctgggccataccaaatcattttgacagaggtcatttcagggatgccacaggcttcataattgctacttgatgctagttgtagcaaattgcacttgggttttggtagttgtgagtatagtgttgtctccttccaccccgccttgtgtgttaatcactgactgccaggaaatctctttgacataacatcctaaaaagtttttgttatcagtagggccctgtaacatttttttccttttctaaagcctatgccttcaagttttttacaagtgtcttattccttctaaattgagaactaattgaatattttttcttgtagataaatcttattttaaatatctagttatcattactttgcattctccttttctgattttatgttacattaccaatatcttatgatatttaaacttttttgaactctgctttttaaaataaataatataaatgcctcaattatctggaacttacactgaaacactgtaatcttgtctctgagcctgcttcccctcaaaaaatttagatttagcttttcagatgcttatagctagccaagtaagtgagaataaacacaaaaaggctaaaatatgcaagttccggagttgtcaaagcttcatgtaaaatgtgtcattgtggaatttaaaaaattctacgctttttcatcaaggtttttggttggggcattagacacttcctgaaatctggcattctcctaggcactggggataccatggagaagaggcagatatggtcttggctcacatggggcatataatcaagcagtaattcttaaccttggacagacttgagtccattatgccaatggtcatctccactttgccatgccattttagttttccctaagtaaaaactacgcctgtaatcctagcactttgggaggccaaggcgggtggatcacctgaggtcaggagttcgagaccagcctggccaacatggtgaaacctcatctctactaaaaatacaaacattagctgggcgtgatggcgcgtgcctgtaatcccagctactcaggaggctgaggcaggagaatcacttgaacttgagagacggaggttgcggtgagccgagatcaagccactgcactccagtctgggtgatagagtgagactcagtctcaaaaaaaaaaaaaaaaaaaacaa

SEQ ID NO: 12586 - DNA, 248 bp, Homo sapiens
cgagttttgtattgtcattcttgaataagccacaattgtgtgtgtgtgtgcgtgcgtgtgtattttcgggacgaaattgttccacctcacatcatcaggcgttagattcttgggagtgccgcacaacctagatccttcgcatgggctgttcacagtaggatccgtgctcctatgagaatcagcgttgcctctgatctgacaggaagcggagctcagcgggtaatgctggcttgcctgctgctcacctc

SEQ ID NO: 12587 - DNA, 1155 bp, Homo sapiens
tagagtgtacttacacaaccctagatggtatagcctgctacatacctaggctatatggcatagcctattgctcctaggctgcaaacctgtatagcatgttactatatggaatactgtaggcagatgtaacacaagacgaatatttgtgtatctaaacatatccaagccataaacgtagagaaggtacagccaaattatggtataaccttatggttatagttatgggaccaccatcatgtatatatggttaatcattgactgaagtgtcattgttcaacacatgcctgtactctttctaaaccaaaatagtgtcatcttgctttgtacataaatcatacctgctttttttgtcattgctcaaaaggtttattctggaatgtccttcgaccaccttgtagatttatatattctttattcaaatttagctcaagtcccatttccaacactaagatatttggataccctcagctttcattgatgtttcttttttagtacttgttttgtcatttggcaattagggtgtgctaccttgtactgttttttacttgcttcttataaatctgttcagtcaatttaacaaatatttattgagcgtctactacatgcaagtaactgttctaggaattagggatatagcagtcaacagcacagacaatctctcatctctttggcaacttcctctgtacctttaaagacaaatatctccaacacctatcacggtatatgttgttaatgatgttaaaattgtgtccaaattaacagaaggccaaatttaacattgaagtccaaatttcttggctaataatgcaagtaaaaaaaatagatgataccttttggctgatctgaatacactgataactggctggacgcggtggatcatgcctgtaatcccagcactttgagaggccgaggcgggcggatcacctgaggtcaggagttggagaccagcctggccaacatggtgaaacccgtctctactaaagtacaaaaattagctaggtgtggtggcacatgcctgtaatcccagctactcaggtggctgaggcaggagaatcacttgaacctgggaggcggaggttgcagtgagcccagatcacatcactttactccagcctgggcgacagagtgagactctgtcacaaaaaaaaaaaaaaa

SEQ ID NO: 12588 - DNA, 5775 bp, Homo sapiens; identical to SEQ ID NO: 7562

SEQ ID NO: 12589 - DNA, 738 bp, Homo sapiens; identical to SEQ ID NO: 7563

SEQ ID NO: 12590 - DNA, 1155 bp, Homo sapiens
  SITE (1139): n equals a,t,g, or c
  SITE (1142): n equals a,t,g, or c
tagagtgtacttacacaaccctagatggtatagcctgctacatacctaggctatatggcatagcctattgctcctaggctgcaaacctgtatagcatgttactatatggaatactgtaggcagatgtaacacaagacgaatatttgtgtatctaaacatatccaagccataaacgtagagaaggtacagccaaattatggtataaccttatggttatagttatgggaccaccatcatgtatatatggttaatcattgactgaagtgtcattgttcaacacatgcctgtactctttctaaaccaaaatagtgtcatcttgctttgtacataaatcatacctgctttttttgtcattgctcaaaaggtttattctggaatgtccttcgaccaccttgtagatttatatattctttattcaaatttagctcaagtcccatttccaacactaagatatttggataccctcagctttcattgatgtttcttttttagtacttgttttgtcatttggcaattagggtgtgctaccttgtactgttttttacttgcttcttataaatctgttcagtcaatttaacaaatatttattgagcgtctactacatgcaagtaactgttctaggaattagggatatagcagtcaacagcacagacaatctctcatctctttggcaacttcctctgtacctttaaagacaaatatctccaacacctatcacggtatatgttgttaatgatgttaaaattgtgtccaaattaacagaaggccaaatttaacattgaagtccaaatttcttggctaataatgcaagtaaaaaaaatagatgataccttttggctgatctgaatacactgataactggctggacgcggtggatcatgcctgtaatcccagcactttgagaggccgaggcgggcggatcacctgaggtcaggagttggagaccagcctggccaacatggtgaaacccgtctctactaaagtacaaaaattagctaggtgtggtggcacatgcctgtaatcccagctactcaggtggctgaggcaggagaatcacttgaacctgggaggcggaggttgcagtgagcccagatcacatcactttactccagcctgggcgacagagtgagactctgtcncanaaaaaaaaaaaaa

SEQ ID NO: 12591 - DNA, 248 bp, Homo sapiens; identical to SEQ ID NO: 12586

SEQ ID NO: 12592 - DNA, 1443 bp, Homo sapiens
cccaagctcccttggactctgtatgttccaactgcatactgtgcttatgctaatgaatttcgttgttgccttgtctgtccctctgactttgaagacagaggcagtgagtacagatgtttgacacagtgcccagtacatatatgatcttaatatttgttgactattaacatcgttgttattgttaataattatagaatgtactgttaactttttttaactttttaaaaaatcttgttttttatagcctcaaggaataggttctcctagtgtctatcatgcagttatcgtcatctttttggagttttttgcttggggactattgacagcacccaccttggtggtaagtaatcttttaaattatttaacactgactccaaaatctcttcttcttcagttttggaggaaaatgtgggccttttccctttgcacggttaattctcccaccagtattgttcagtattcaccagtattttactggttgtcttttccaactgttaactctcccttacctttttttgggaggggggtggcgtggaggtgtttgaatttggacttgtcactgggcatgttcaagcagaggctctgtaactactctgagtaaaatggaagagattcttaaaccgacaggtttagaaaagatgatgtctgtgacctgcatgactcggcataattactttgaggttcatttatgcagctgtactttccaaaaacaggtttctgttcatttgggctaagtacctagaagggctattctttaatagatctaagctgattttacccaaattctcccaggtttgaaactttagaaaagacctccctgcccgaccaaacaactcagaagatagccagttttcttatattggtgtagataaggggaatggaaggagggaaggactatctatggtaaatatctataccatcttgaaaggagtaattatgataaatgtacagtttaccaaatcctagaggaatagagttttaaagtaatatactatgttttcatgaaggtttttataaaaaagttatttaatagaaaaattatgtaagtagattgaactagcctaagaacatttacagtacatatttcttgatatatttattgacagctgtgtaattgttactatctatacataaaatattgatgtttagcagttgcttatgcctgtaatcccagcattttgggaggctgggtgggcagatcgcttgagctctggagttgagaccagcctgggcaacatggtaaaaccttgtctctacaaaaaatgcaaaaattagttgtgcatggtggcatatgtttgtagtcccagctactcgggaggctaaggcaggagaatcacttgagcccaggaggcagaggttgtagtgacccgatatcgtgccaccacactccagcctgggcgacgggagtgaaaccttgtctcaaaaaaaaaaaacaaaaaaaaa

SEQ ID NO: 12593 - DNA, 1443 bp, Homo sapiens
cccaagctcccttggactctgtatgttccaactgcatactgtgcttatgctaatgaatttcgttgttgccttgtctgtccctctgactttgaagacagaggcagtgagtacagatgtttgacacagtgcccagtacatatatgatcttaatatttgttgactattaacatcgttgttattgttaataattatagaatgtactgtttactttttttaactttttaaaaaatcttgttttttatagcctcaaggaataggttctcctagtgtctatcatgcagttatcgtcatctttttggagttttttgcttggggactattgacagcacccaccttggtggtaagtaatcttttaaattatttaacactgactccaaaatctcttcttcttcagttttggaggaaaatgtgggccttttccctttgcacggttaattctcccaccagtattgttcagtattcaccagtattttactggttgtcttttccaactgttaactctcccttacctttttttgggaggggggtggcgtggaggtgtttgaatttggacttgtcactgggcatgttcaagcagaggctctgtaactactctgagtaaaatggaagagattcttaaaccgacaggtttagaaaagatgatgtctgtgacctgcatgactcggcataattactttgaggttcatttatgcagctgtattttccaaaaacaggtttctgttcatttgggctaagtacctagaagggctattctttaatagatctaagctgattttacccaaattctcccaggtttgaaactttagaaaagacctccctgcccgaccaaacaactcagaagatagccagttttcttatattggtgtagataaggggaatggaaggagggaaggactatctatggtaaatatctataccatcttgaaaggagtaattatgataaatgtacagtttaccaaatcctagaggaatagagttttaaagtaatatactatgttttcatgaaggtttttataaaaaagttatttaatagaaaaattatgtaagtagattgaactagcctaagaacatttacagtacatatttcttgatatatttattgacagctgtgtaattgttactatctatacataaaatattgatgtttagcagttgcttatgcctgtaatcccagcattttgggaggctgggtgggcagatcgcttgagctctggagttgagaccagcctgggcaacatggtaaaaccttgtctctacaaaaaatgcaaaaattagttgtgcatggtggcatatgtttgtagtcccagctactcgggaggctaaggcaggagaatcacttgagcccaggaggcagaggttgtagtgacccgatatcgtgccaccacactccagcctgggcgacgggagtgaaaccttgtctcaaaaaaaaaaaacaaaaaaaaa

SEQ ID NO: 12594 - DNA, 465 bp, Homo sapiens
aaactgctccattgtcatatgtgacactgtattctcttcactctcctgatattttcttactgttccttttatcttcctcttttctttatcaaagaagaaaaaccttcactattttcctgtgcctcctacttaaaatgttggcgcttcttggggttctgtctcagcccactgctgttttcacacttgacactcctgataatctcatctactctggtggtttcagatatcacatttgctgctaattgttttaatcagtgctcaaagacaatacaaatgtttcaagtaaagagggcagttttgtagataggacctgaagtaaatctgagcctcgtggggggaagtgctgggaagccaccagctttaactgctagacaaccaagctaaacacttggaagttgttcttgattctcccttccgctatttatcaagctcctcccaatttcaaatcctgaatccttaatccgt

SEQ ID NO: 12595 - DNA, 465 bp, Homo sapiens; identical to SEQ ID NO: 12594

SEQ ID NO: 12596 - DNA, 1999 bp, Homo sapiens
ccgccttaactttaaattcagatacttttaattctttggttatggtttgttggttgctaccactgtgggtcactgtcttatccttcccagtagggatagatgtggctgctcttctgattttcacctcctcttactaatttaccctgtggtgggaaacacatcaactgatagtgttatttcatgttaagtaaaggcaaatagccaccttcctcatttgactgaaactcaatgtgtcacattctacctcttttcttagtccttaaggatttctgtcatctgttagtctgcaggctcttaaggtcaggctctgtcttcccttcatctttgaagcttctactcttgtgcttccctcttgatgtaggccctgaatcactgttttgttgactaggagagcacatgaactgtttgtgcaacctctcaagctccgtttgaaatggaagatgatcatacatcttgtggcacccctttttcccagatcccaagcttccgggcaccctttctttcttcacctccacagatgctgccttcacccaccctttgatgaaccatcttgatcaactgccaagaatgtcaagggcatttctaacgccagggcaacagctatgagcacttatgagaccacatcaggtttgactcctgaacgaaggatgtccttatccatggtctctttttcctggcaggcatcttgctgttattttggaaattttctctgggccgtagaggtttgaaccagtcatgtctaggagcgtttgttttctcaggaaaagcaaccctgttaaagccattgttttaaaaagtcacttggagcattaaaaacctttgaccatccattcatagtgctaaaatttaggagtggggcttcaggcaagcaatattgaattaaatgtgtggagcactttaagacagcatttgattgtacatttaaaatagggaatgcaaattgaaattcctcctgggtgctttaaatcatgcattatatgtgcagtattttcaattagctgcagaaaaaaatatgttcggtgtggctgtatttttacagctgggaattgctcagagaacacaattgactatttcatccatgtgagatttatttaaatgactcgtggggcatttgcagtttagccaataattgaaaatattgttgcaatgtggcaggtaaaactaggaaatcatttcgcattcctgcagaggtgttccaagctcagcagcatattatattagttgaagaggggcaaacggagtgagatcagtgttgagtcctagtctttcacatttcattcctgggttttgccccaccatggaaatatatgggatggtgctttccagaaggacctgaaacgctaaggtgttatcttgtttctattctgtttttatatgccaaacacaaatgaatggtcagaccagatatggaaagacccatctatcccccaactctcttctgactcctatacctttctttctattcttcgtaccatttcacttcagacgtcacctggaatactgatgcaggaggctaagctgagtctctcagggtagacagttcaacctttccatggttgttcataaatattactagggatttggaatgcatgttcccactaaaatgatgtaaatgtggttaagtgataccatattaaaatgcatcattacttgtgtgattcagacaaagtatgggttaactaggcattttgaaggcagaattaaaatactaaccaccaccactttctctgtaatagtggttgccaaccaggggtgatccttcctctctccttcagggacatttgtcagtgtctccagacatttggttggtccatctgggtggggtgctattagcatctcttgagtaaaggccaggaatactgctaaacattctgcaatacacaggatagccccctacaatgaataattatccagacccacatggcaagagtgacaaggttgtgaaactttgctctagaaatgtgtacattctttttttttttttaaaaaaaaaaaaaaa

SEQ ID NO: 12597 - DNA, 1999 bp, Homo sapiens; identical to SEQ ID NO: 12596

SEQ ID NO: 12598 - DNA, 1919 bp, Homo sapiens
  SITE (735): n equals a,t,g, or c
tatccttcccagtagggatagatgtggctgctcttctgattttcacctcctcttactaatttaccctgtggtgggaaacacatcaactgatagtgttatttcatgttaagtaaaggcaaatagccaccttcctcatttgactgaaactcaatgtgtcacattctacctcttttcttagtccttaaggatttctgtcatctgttagtctgcaggctcttaaggtcaggctctgtcttcccttcatctttgaagcttctactcttgtgcttccctcttgatgtaggccctgaatcactgttttgttgactaggagagcacatgaactgtttgtgcaacctctcaagctccgtttgaaatggaagatgatcatacatcttgtggcacccctttttcccagatcccaagcttccgggcaccctttctttcttcacctccacagatgctgccttcacccaccctttgatgaaccatcttgatcaactgccaagaatgtcaagggcatttctaacgccagggcaacagctatgagcacttatgagaccacatcaggtttgactcctgaacgaaggatgtccttatccatggtctctttttcctggcaggcatcttgctgttattttggaaattttctctgggccgtagaggtttgaaccagtcatgtctaggagcgtttgttttctcaggaaaagcaaccctgttaaagcccatttgtttaaaagtcacttggagcattanaaacctttgaccatccattcatagtgctaaaatttaggagtggggctcaggcaagcaatattgaattaaatgtgtgagcactttaagacagcatttgattgtacatttaaaatagggaatgcaaattgaaattcctcctgggtgctttaaatcatgcattatatgtgcagtattttcaattagctgcagaaaaaaatatgttcggtgtggctgtatttttacagctgggaattgctcagagaacacaattgactatttcatccatgtgagatttatttaaatgactcgtggggcatttgcagtttagccaataattgaaaatattgttgcaatgtggcaggtaaaactaggaaatcatttcgcattcctgcagaggtgttccaagctcagcagcatattatattagttgaagaggggcaaacggagtgagatcagtgttgagtcctagtctttcacatttcattcctgggttttgccccaccatggaaatatatgggatggtgctttccagaaggacctgaaacgctaaggtgttatcttgtttctattctgtttttatatgccaaacacaaatgaatggtcagaccagatatggaaagacccatctatcccccaactctcttctgactcctatacctttctttctattcttcgtaccatttcacttcagacgtcacctggaatactgatgcaggaggctaagctgagtctctcagggtagacagttcaacctttccatggttgttcataaatattactagggatttggaatgcatgttcccactaaaatgatgtaaatgtggttaagtgataccatattaaaatgcatcattacttgtgtgattcagacaaagtatgggttaactaggcattttgaaggcagaattaaaatactaaccaccaccactttctctgtaatagtggttgccaaccaggggtgatccttcctctctccttcagggacatttgtcagtgtctccagacatttggttggtccatctgggtggggtgctattagcatctcttgagtaaaggccaggaatactgctaaacattctgcaatacacaggatagccccctacaatgaataattatccagacccacatggcaagagtgacaaggttgtgaaactttgctctagaaatgtgtacattctttttttttttttaaaaaaaaaaaaaaa

SEQ ID NO: 12599 - DNA, 1999 bp, Homo sapiens; identical to SEQ ID NO: 12596

SEQ ID NO: 12600 - DNA, 320 bp, Homo sapiens
acacctggctaattttttttttttttttttttttttgagaaggagtctcgctctgttgcccaggctggagtgcagtggtgtgatctcagctcactgcaagctccgcctcctgggttcatgccattctcctgtctcagcctcccaagtagctgggactacaggcgcccgccaccatgcccggctaattttttgtatttttagtagagacagggtttcaccgtgttagccaggatggtctcgatctcctaacctcatgatctgcccgcctcggcctcccaaagtgctgggattacaggcgtgagccaccacgcccagcctaa

SEQ ID NO: 12601 - DNA, 320 bp, Homo sapiens; identical to SEQ ID NO: 12600

SEQ ID NO: 12602 - DNA, 320 bp, Homo sapiens; identical to SEQ ID NO: 12600

SEQ ID NO: 12603 - DNA, 2024 bp, Homo sapiens
tttgtaataaaataccagtgaaggacatgtttggatatctgttaagcatttttccctgactaatgaattaggaaagaaaacataaaacataaatgaatagttatgtctcttctaataaacagtgtcattaatgctgcagttgtgggtcaaacttagggagccttatttctaaatagcaaaaattctgttttcacttcagcccttatttttttttgttagtttttctctgcactgtgatacagagctaataagaggaaatgtgacgtttcagagagagagcaagcaaattgggtatgacttttttaccctatgttccccaatactggggatgtttggctactttgaacagcagtttttagtgatctaaagtttagatcaatactcgtataagagaaaaatctaactctcagtgagctccatagggcagcacagctttccatcttctctttcgccttcttgcgtctgcccaccacagtcccgaagaatgcacacgcacatatgatctgtacccatcccgcccgaagagtcatagaatcctcttctttcacttgtttcttttttcttcgtttgtttgtttttgtttgtttgttttttaagctggggaccactgaagtaagctctgtatgcacccaaagttccccttggaaaaattttcaacacgcagtgcagaaggctccagtgcagctaaatgccacaccattggttctacctgggggaatagactgatttgccctaaaatgactccaacctgcatcattaaggtacagttggctccagtggattagtgctgaaatgatgggaagtctgacacttgttgacattgtcttcatctgtttggaagggttgaatctgttcctctcaacagtgatagttcttttcactgtatagtattgagtatgtctcagggattccttgtggaaattagggcagtttttaaaataagaaaatagttttaaaagaaactaaaggtgactcatcattgaagagagcggaagaaagaggaaacatttggttttgtagcccacagtgtcttgcataggactttttcctttctcctccaggctctcatctcagcttcagaatacagaatcctttcccatcacgcacagctttaaaacttttatttaaaaatttccttccccaatgagctttcagaatacttattgtagattttaagagaaaaggtatattaatttatgctattaacatcacctcataaattataagttttatactaaagctgtatcgagtgtaatgaattatgttgcctatgtgtttaatagctaaatatatatgagcttttttttttttttttttttttgacaaaacaaactagtgaagcacctttttacactggatctctgccgtgtcaaggtgtatagctatcctttgctaccttgcagatatataaaataaaaggatatcctggggcctcaaaatgtagaacacctttagaccatttataactgttcctagaactgttgagaatcatgttctttagtaaatgatctgtggtttacacttaagatggctagaagcttagttacagggtacatagaaatacatagatcaagtaaaactccaactactgtagctggaatttgtaaactaagtttgtaagacctcttttatttcctatggagttattctttaatttacagtttattctgtaagttgggaagtaaaatagagaaaataataaatctagatgttctcagtgtcttattcaggaactttttatccctcctcactaaggaattcccactgtgactttaaaatagaactaaattacttgtgtgcatgtatatgtctgtattttttacacacatgcaaaaatatacattgggggcacgtgtgtgagagatatgaatgtgtgcttatataaaaatagataaaggtaaccgaatgtattgtagaaacatgatttatttagttgagggtattggagttactttctcattgtctctgttgtataaatacaccaaattaatcattatgttatcttatgttaaaaggctagctct

SEQ ID NO: 12604 - DNA, 2024 bp, Homo sapiens
tttgtaataaaataccagtgaaggacatgtttggatatctgttaagcatttttccctgactaatgaattaggaaagaaaacataaaacataaatgaatagttatgtctcttctaataaacagtgtcattaatgctgcagttgtgggtcaaacttagggagccttatttctaaatagcaaaaattctgttttcacttcagcccttatttttttttgttagtttttctctgcactgtgatacagagctaataagaggaaatgtgacgtttcagagagagagcaagcaaattgggtatgacttttttaccctatgttccccaatactggggatgtttggctactttgaacagcagtttttagtgatctaaagtttagatcaatactcgtataagagaaaaatctaactctcagtgagctccatagggcagcacagctttccatcttctctttcgccttcttgcgtctgcccaccacagtcccgaagaatgcacacgcacatatgatctgtacccatcccgcccgaagagtcatagaatcctcttctttcacttgtttcttttttcttcgtttgtttgtttttgtttgtttgttttttaagctggggaccactgaagtaagctctatatgcacccaaagttccccttggaaaaattttcaacacgcagtgcagaaggctccagtgcagctaaatgccacaccattggttctacctgggggaatagactgatttgccctaaaatgactccaacctgcatcattaaggtacagttggctccagtggattagtgctgaaatgatgggaagtctgacacttgttgacattgtcttcatctgtttggaagggttgaatctgttcctctcaacagtgatagttcttttcactgtatagtattgagtatgtctcagggattccttgtggaaattagggcagtttttaaaataagaaaatagttttaaaagaaactaaaggtgactcatcattgaagagagcggaagaaagaggaaacatttggttttgtagcccacagtgtcttgcataggactttttcctttctcctccaggctctcatctcagcttcagaatacagaatcctttcccatcacgcacagctttaaaacttttatttaaaaatttccttccccaatgagctttcagaatacttattgtagattttaagagaaaaggtatattaatttatgctattaacatcacctcataaattataagttttatactaaagctgtatcgagtgtaatgaattatgttgcctatgtgtttaatagctaaatatatatgagcttttttttttttttttttttttgacaaaacaaactagtgaagcacctttttacactggatctctgccgtgtcaaggtgtatagctatcctttgctaccttgcagatatataaaataaaaggatatcctggggcctcaaaatgtagaacacctttagaccatttataactgttcctagaactgttgagaatcatgttctttagtaaatgatctgtggtttacacttaagatggctagaagcttagttacagggtacatagaaatacatagatcaagtaaaactccaactactgtagctggaatttgtaaactaagtttgtaagacctcttttatttcctatggagttattctttaatttacagtttattctgtaagttgggaagtaaaatagagaaaataataaatctagatgttctcagtgtcttattcaggaactttttatccctcctcactaaggaattcccactgtgactttaaaatagaactaaattacttgtgtgcatgtatatgtctgtattttttacacacatgcaaaaatatacattgggggcacgtgtgtgagagatatgaatgtgtgcttatataaaaatagataaaggtaaccgaatgtattgtagaaacatgatttatttagttgagggtattggagttactttctcattgtctctgttgtataaatacaccaaattaatcattatgttatcttatgttaaaaggctagctct

SEQ ID NO: 12605 - DNA, 3676 bp, Homo sapiens
atttcaaagctggggtgatttcatttatttccaaaatttttcaaaaaacttttactcagttctgctgttatttattaacttaagagtgctcccatccccatatttcagctataggaaaattgtgctacccctgattcatatggaattaaaaaaaaatacatccctttattttgagttttaagttgttattttgctatacatttattactggagtatctggtggtctgaaatagtcaaaagtagagttggtattaaatgttccaatgacatttatttttaatacttaaaaaatcatgtactttgaaatatgtcaaagcaacttctgataatatacctgaatttgtagttgtctcttgagcatcatttacttcatcttagatatagtgaagatctaggaaagctctatatgctgttcttttctacagttgtatttttgcagcatctcctggtttcattcactcttgttttgggatttttttttagatctgcatatttcttgtacatatgcatgcaaatgaaagaagggagtttgtactggtgccatttctcccttcagttgctggttaatgggatttgctagaaaaaattctcccggttgaagggtgaaaacagacccttatgtgtatatctgtacagagatgtgtatatgggatgtggtggcactttgctgaatgtgaacttgccttgtcaatggaaagattgaaaagtattatgtttatttatacatttgtataaatctatatatacacgtatgtatatgtgtgtgtatagataaagctatatacatatatttcccttaaaaatgtgtgtgtataataggtaaacagcctttgttaagcaagattaatgtctatggaaagttctggattattctgtaagccagaggaggtgacagtctagagtacatcatcagaacatactaaaatggaagtcctttggattatagttttgtttatggatattacacaatgaatgcttgtctgaacagttcttacttgccagttccactattcttcatcttcaccaccttctactggtcagtctttcatcacttaaaaaaaaaaaaaaaatcacacatcattgtggtttttttcccccttaattctgtctcttctagccagaagcatctggcttaagcatatttcatcaacttctctgttatttcttttaaagatctttatctctgaaattttcccagaagatacaagttttggtaatattatcaataggaattttgagacttgggcattcatctttgtctcaaaaacaaacagaaagccaaccttcaaataaaacaaatttgaaagttttagctcaataatttggggacattttacttaaattacaaaagaacataattatgattttatgatcgatattagtgttaggtttatttccacacttactgtcattaatttgtcatttacatatttttatttgctttgtagtttaatcataacttcaccatttacattttaatggaaagcatacaaggtcacatgttagcctcttgaattctgtaactaactcatttttctcatgatgaaactgctttgatgaattcctgtgtgatgaattctgctatatttccttttgacttttctcagtttgtgacattctgtattaactttgctgcagctctctagaaaacttgcatccctatatattgtgcctttaaagctcttatgcacacacagacaaaagtgtatatatacatgtcagagcatgtgtacatatgctttcgtatgtactcacacagtatgtctctagtatatattgtgggagtagatatatagatattcaaaggcaatgaaatattgctctccagatatatatgtatataaatagtgttgatataactgtatatacacatgtatatgtatgagttttaaatggcaatcttttacatttagcaaaatgctgcccctactggaatattgtcactgcagtggcagttgtatgtaatgatttaaaatacattatcaaaagttatttaaagaacatttaaagtctcatctaaagacatccacacactatttatttatcttccttttccttttattgttgtgtttttcttaactgaaagggagactgtcattttaaaaatgccatctgtcccatgagagtaagaaagagctggagattcacttgaggagctttgtgcatttttcctctctctgaagtggagatgttccacagaccagactgtttatttcacttataaagcaatcctaatatttccgttagtgtatgtcagccaccatctcctagatcaacttaattcaccaatttgcctcctcctttcattaataaataatgattattgagatcattttgcctgggggaagttaactactcccatgctgcagggaaatatatcacctaattgttattttgccttgttcaaaattcaaatttgaaagaaggcagctctctcatgaagctgtcttaagcacattttagttaagggccctcccaaactcttttttctttctttctttctttcttttttttttttttttgcgagttccaagttgcatgtgcttgaaatagatttaattcttattccccacagtttaggtatttttcattagtacatcaatttgacacactgaatgcaagactattaaggaagaacgattaaatattattttattttgtgaagagttggcagcagattacatctcaagaacttgcagagagaggaaggtagatggacaatcctaaattgtaagatgttacaaaaaacagtgaagtaagagtactcctgaagactaaaatagagaggctggggtttgagccattttactgagtagcttagctggaacctgatatcagaagtagcctttaacaaaaagcctcttggcaattgtatggtactaacaactagagtactgaagtgtaagttgaaaccaagttgcagtgggaaatcaaaggtgaggtagcttatttgaaaccagcaaatgagacaggttggacagttttaaaatctcttctaacaaagaaactgcacggtagcaaggactagcggttctcaaagcccttctttttcagtgttctcattcaccttggcacccaagtatgtttaacaggccatgcattaaaaataaatacaaaaatataaaagccgcttaaagggaacttacaaactgacaatctctcctctgtatttgtgttcatagtggctgggagtttaattatatgcacaaaagttaggagccacttgtttctgcacagactgtaggagcaagatgaggagatgggcaggttttggtaagagcccccagttctggtggacaggcatacttgtggcattgggtgcggcattgctgggaggaccacgtcttgggaggcgattgacttttggtttgtaatttccctttaaacaagaagagatggctcacattttccatatatatctcaatgaatgtactgtattactgttttaaaaatttgatgaaataataatgaattggtctccttttgttatctggtccttgtttaatttgtttaagggtttttgtatacaaaagtttacatttttatgtatatttttcttgtgtaaaaactgatgtaatatgtgtatgaaacactgtatgtattatctgtatatagtgtgacaaaatcatttttctttctttcttttggatgtattaataaatcttgctgtgaagta

SEQ ID NO: 12606 - DNA, 222 bp, Homo sapiens
tttgcagtaagttgcacattttattgtttgcaattttctgttttatgtgcatttaaaagcccttctctgctttctagtaaggaggcatgaaattatcaggaatgttgctagttacagcttcacaccaaaaactttgagtaaatacattttcgtttggatgcccatgatgaaagctgaggaaagtggttgaggaattatcaacaacaaacttttcctcttatt

SEQ ID NO: 12607 - DNA, 222 bp, Homo sapiens; identical to SEQ ID NO: 12606

SEQ ID NO: 12608 - DNA, 1536 bp, Homo sapiens
atttcaaagctggggtgatttcatttatttccaaaatttttcaaaaaacttttactcagttctgctgttatttattaacttaagagtgctcccatccccatatttcagctataggaaaattgtgctacccctgattcatatggaattaaaaaaaaatacatccctttattttgagttttaagttgttattttgctatacatttattactggagtatctggtggtctgaaatagtcaaaagtagagttggtattaaatgttccaatgacatttatttttaatacttaaaaaatcatgtactttgaaatatgtcaaagcaacttctgataatatacctgaatttgtagttgtctcttgagcatcatttacttcatcttagatatagtgaagatctaggaaagctctatatgctgttcttttctacagttgtatttttgcagcatctcctggtttcattcactcttgttttgggatttttttttagatctgcatatttcttgtacatatgcatgcaaatgaaagaagggagtttgtactggtgccatttctcccttcagttgctggttaatgggatttgctagaaaaaattctcccggttgaagggtgaaaacagacccttatgtgtatatctgtacagagatgtgtatatgggatgtggtggcactttgctgaatgtgaacttgccttgtcaatggaaagattgaaaagtattatgtttatttatacatttgtataaatctatatatacacgtatgtatatgtgtgtgtatagataaagctatatacatatatttcccttaaaaatgtgtgtgtataataggtaaacagcctttgttaagcaagattaatgtctatggaaagttctggattattctgtaagccagaggaggtgacagtctagagtacatcatcagaacatactaaaatggaagtcctttggattatagttttgtttatggatattacacaatgaatgcttgtctgaacagttcttacttgccagttccactattcttcatcttcaccaccttctactggtcagtctttcatcacttaaaaaaaaaaaatcacacatcattgtggtttttttcccccttaattctgtctcttctagccagaagcatctggcttaagcatatttcatcaacttctctgttatttcttttaaagatctttatctctgaaattttcccagaagatacaagttttggtaatattatcaataggaattttgagacttgggcattcatctttgtctcaaaaacaaacagaaagccaaccttcaaataaaacaaatttgaaagttttagctcaataatttggggacattttacttaaattacaaaagaacataattatgattttatgatcgatattagtgttaggtttatttccacacttactgtcattaatttgtcatttacatatttttatttgctttgtagtttaatcataacttcaccatttacattttaatggaaagcatacaaggtcacatgttagcctcttgaattctgtaactaactcatttttctca

SEQ ID NO: 12609 - DNA, 2200 bp, Homo sapiens
ggaccacttgaagtcattgaagggaactctctggagatagtggagttcttagtctctgccctttgttcttaaaatattcagctgcattttaggtaaggtagtgatctgccttcaattgcaaatagttgataatatcacttttaatgtagactaaagccaacatttttcatgtattgttctatttggagtaaataacacattttggcatggttcttcatgtcttagcatctgtcagttttcatgtgaggactcagtttacaggttatatacagcacatgttgagcgtggtcagtgggtatttgtacctgaagtacgtacttcccttctgttgctgatattgtcatgagcagttccaccctcagtgtttacctctatgctttgaaatcttctctcaaacgcatattcattcctattttttgtaccctttgggattcctcaatctcatatacatctttccatttctgacctaatcccagcactttgggaggctgagccgagcatagtggggtgtgcctatagtcccagctactcaggaggctgaggtgggaagatcacctgagcccgggagctggaggtttcagtgagctcagatgtgccactgcattccagcctgggctacagagcgaggccctgtctcaaaaaaaaaagtctcatgacttcgtctcctagatgagaccatctctagctgatgcctttgcttgcattctcatgtgcagggccagcagatactgatggagcagatgttctctgaggctgtaggtgctggggcacagatcttttcctcatcctactacctagtgaaggggagaaatgacaagcgaggcaactgcaggtgaaaagtgtttggagagaggtttctatagggctccagtctatgcactgagcccaggcatagacttcagagatgcttcctgaaaagaagttggcaagatatgagggaggagggcgcagctcctgattcctctgacctttctattgtgggtttgatgccccctccccacctgagtcctcatgggcagctgtgttttgtttttttttgttttgttttgttttgtttgagacagagtctcgcactgtcgcccaagctggagtgcagtggtgcgatctcagcagctgtgtttttaagaagtgtttctactcctttccttactcaatcctgaccctgtaaaattcccacttgctggctgccccctccccaaggaaaggccgcccctctgcccctccacagtgggtggtgcccagagtcaggggacaggtctgggctttcctattcttgctgacccagctatagagaccgtgctctttcccattcagagagtcatagctacttggtttttttttgtttgttttgttttgttttgttttgttttgtttgtgtgtgtgtcttttattttacgcttggggttgtctttttaaaactttcttttattcttttatcttgggataattacttattttaaagtaagccttgtttgtttttgtctgttaaaaatctttacagccatccagcttatatcaacttttttatttcctgccaggcaaaaagaattaatagaaaatggcagcccaagaggtaagatacgcagtctgtccacaccccaaacagggcaggataaatgcctttcttggttctaataagccctgaagagatactccctgtagcaccaagtcatttccctctgctgcccctttgaggtgactgtattcccaaaagtagtcagtgtagaggaatggatggcccgtttaggataggtagttgcacagattatctctgagggaggtgactaagaagctgaactccaaagacaagacaaaggaattgatgaacagtatcattctcttaactctgggatagggattctgtgaaggttaatgtatgctcttttttctagggagaagatccctttatatttgattgtcatggggatctgtggcccagagtaaaatcagcagtcccagctgtatagactttcaggttcattatggttgtgatctgaaaaccttggtcacctctgtggtatgtgtcattggattctagctacttgagtgaagtggctcctgtgcattcttagaagcgagtatgagagaggatggggtggagttccagttttactagagaaagctctcaaaagagaattttgatacccaacttgaaacctggaaaattaccaagtacagcttcgtgttaaaaaaaaaaaaa

SEQ ID NO: 12610 - DNA, 2200 bp, Homo sapiens
ggaccacttgaagtcattgaagggaactctctggagatagtggagttcttagtctctgccctttgttcttaaaatattcagctgcattttaggtaaggtagtgatctgccttcaattgcaaatagttgataatatcacttttaatgtagactaaagccaacatttttcatgtattgttctatttggagtaaataacacattttggcatggttcttcatgtcttagcatctgtcagttttcatgtgaggactcagtttacaggttatatacagcacatgttgagcgtggtcagtgggtatttgtacctgaagtacgtacttcccttctgttgctgatattgtcatgagcagttccaccctcagtgtttacctctatgctttgaaatcttctctcaaacgcatattcattcctattttttgtaccctttgggattcctcaatctcatatacatctttccatttctgacctaatcccagcactttgggaggctgagccgagcatagtggggtgtgcctatagtcccagctactcaggaggctgaggtgggaagatcacctgagcccgggagctggaggtttcagtgagctcagatgtgccactgcattccagcctgggctacagagcgaggccctgtctcaaaaaaaaaagtctcatgacttcgtctcctagatgagaccatctctagctgatgcctttgcttgcattctcatgtgcagggccagcagatactgatggagcagatgttctctgaggctgtaggtgctggggcacagatcttttcctcatcctactacctagtgaaggggagaaatgacaagcgaggcaactgcaggtgaaaagtgtttggagagaggtttctatagggctccagtctatgcactgagcccaggcatagacttcagagatgcttcctgaaaagaagttggcaagatatgagggaggagggcgcagctcctgattcctctgacctttctattgtgggtttgatgccccctccccacctgagtcctcatgggcagctgtgtgttgtgtttttttgtgttgtgttgttttgtgtgagacagagtctcgcactgtcgcccaagctggagtgcagtggtgcgatctcagcagctgtgtttttaagaagtgtgtctactcctttccttactcaatcctgaccctgtaaaattcccacttgctggctgccccctccccaaggaaaggccgcccctgtgcccctccacagtgggtggtgcccagagtcaggggacaggtctgggctttcctattcttgctgacccagctatagagaccgtgctctttcccattcagagagtcatagctacgtggtttttttttgtgtgttgtgttgtgttgtgttgtgttgtgtgtgtgtgtgtgtcttttattttacgcttggggttgtctttttaaaactttcttttattcttttatcttgggataattacttattttaaagtaagccttgtttgtttttgtctgttaaaaatctttacagccatccagcttatatcaacttttttatttcctgccaggcaaaaagaattaatagaaaatggcagcccaagaggtaagatacgcagtctgtccacaccccaaacagggcaggataaatgcctttcttggttctaataagccctgaagagatactccctgtagcaccaagtcatttccctctgctgcccctttgaggtgactgtattcccaaaagtagtcagtgtagaggaatggatggcccgtttaggataggtagttgcacagattatctctgagggaggtgactaagaagctgaactccaaagacaagacaaaggaattgatgaacagtatcattctcttaactctgggatagggattctgtgaaggttaatgtatgctcttttttctagggagaagatccctttatatttgattgtcatggggatctgtggcccagagtaaaatcagcagtcccagctgtatagactttcaggttcattatggttgtgatctgaaaaccttggtcacctctgtggtatgtgtcattggattctagctacttgagtgaagtggctcctgtgcattcttagaagcgagtatgagagaggatggggtggagttccagttttactagagaaagctctcaaaagagaattttgatacccaacttgaaacctggaaaattaccaagtacagcttcgtgttaaaaaaaaaaaaa

SEQ ID NO: 12611 - DNA, 4302 bp, Homo sapiens
catccacaccaaaaccccatctatacatcatcatcatcaaagaccaaaggtagatacagccacaaagatggggaaaaaacagagcagaaaagctgaaaattctacaaatcagagcgcctgtccccctctaaaggaatgcagctcctcgccagcaacggaacaaagctggacagagaatgacgactttgacgagttgagagatgaaggcttcagatgatcaaacttctctgagctaaaggaagaagtttgaacccatcgcaaagcagctaaaaaccttgaaaaaagattagacgaatggctaactagaataaccagtgtagagaagtccttaaatgacctgattgagctgaaaaccacggcacaagaactatgtgacaaatgcacaagcttcagaagcctatttgatcaactgaaagaaaaggtatcagagactggagatcaaatgaatgaaatgaagcaacaaaagaagtttagagaaaaaagagcaaaaagaagcaaacaaagcctccaagaaatatgggactatgtgaaaagaccaaatctacgtctgattggtgtacctgaaagtgacggggagaatggaaccaacctggaaaacactctgcggatattatccaggagaacttccccaacctagtgaggcagaccaacattcaaattcaggaaatagagaacgccacaaagatactcctcgagaagagcaactccaagacacataattgtcacattcaccaaggttgaaatggaggaaaaaatgttaagagcacccagagagaaaggtcgggttacccacaaagggaagcccatcagactaacagcggatctctcggcagacactccgcaagccagaagagagtgggggccgatattcaacattcttaaagaaaagaattttcaacccagaatttcatatccagccaaactacgcttcataagtgaaggagaaataaaatcctttacagacaagcaaatgctgagagattttgtcaccaccaggcctgccctaaaagagctcctgaaggaagcactaaacgcggaaaggaacaactggtagcagccactgcaaaaacatgccaaattgtaaagaccatcaatgctaggaagaaactgcattaactaacgagcaaaataaccagctaacatcataatgacaggatcaaattcacatataacaatattaaccttaaatgtaaatgggctaaatgctccaattaaaagacacagactggcaaattggataaacagtgaagatccatcagtgtgctgtattcaggagacccatctgatgtgcagagacacacataggctcaaaacaaagggatggaggaagatctaccaagcaaatggaaaacaaaacaaaacaaaaagcaggggttgcaatcctagtctctcatgaaacagactttaaaccaacaaagatgaaaagagacaaagttggccattacataatggtgaagggatcaattcaacaagaagagctaactaacctaaatatatatgcacccagtacaggagcacccagactcataaagcaagtccttagagacctacaaagagacttagactcccacacaataataatgggagactttaacaccccactgtcaacattagacagatcaacgagacagaaagttaaaaaggatatccaggaattgaactcagctctgcacctagaggacctaatagacatctacagaactctccacccaaaatcaacagaatatacattcttcccagcaccacttcgtacttactccaaaattgaccacatagttggaagtaaagcactcctcagcaaatgtataagaacagaaattataacaaactgtctctcagaccacagtgcactcaaactagaactcaggattaagaaactcactcaaaaccactcaactacatggaaactgcacaacgtgctcctgaatgactactgggtacataacgaaatgaaggctgaaataaagatgttctttgaaaccaacgagaacaaagacacaacatgccagaatctctgggacacattcaaagcagtgtgtagagggaaatttatcgcactaaatgcccacaagagaaagcaggaaagatctaaaattgacaccctaacatcacaattaaaagaactagataagcaagagcgaacacattcaaaagctagcagaaggcaagaaataactaagatcagagcagaactgaagaagacagagacacaaaaaacccttcaaaaaatcaatgaatccacgagctggttttttgaaaggatcaacaaattgatagaccactagcaagacctaataagaaaagagagaagaatcagatagacacaataaaaaatgataaaggggatatcaccaccggtcccacagaaatgcaaactaccatcagagaatactataaacacctctacgcaaataaactagaaaatctagaagaaatggataaattcctggacacatacacccttccaagactaaaccaggaagaagttgaatgcctgaatagaccaataacaggctctgaaattgaggcaataattaatagcctaccaaccaaagaaagtccatgaccagaaggattcacagctgaattctaccagaggtacaaggaggagctggtaccattccttctgaaactattccaatcaacagaaaaagagggaatcctccttaacttattttatgagaccagtatcatcctgataccaaagcctggcagagacacacaaaaaaagacaattttagaccaatatccctgatgaacattgattcaaaaatcctcagtaaaatactggcaaaccgaatgcagcagcccatcaaaaagcttatccaccatgatcaagtgggcttcatcccggggatgcaaggcaggttcaacatacgcaaatcaataaatgtaatccagcatataaacggaaccaaagacaaaaaccacatgattatcttaatagatgcagaaaagacctttgacaaaattcaacagcccttcatgctaaaaactctcaataaattaggtattgatgggacgtatctcaaaataataagagctatctatgacaaacccacagccaatatcatactgaatgggcaaaaactggaagcattccctttgaaaactcgcacaagacagggatgccctctctcaccactcctattcaacatagtgttggaagttctggccagggcagtcaggcaggagaaagaaataaagggtattcaattaggaaaagaggaagtcaaattgtccctgtttgcagatgacatgattgtatatttagaaaaccccatcgtctcaccccaaaatctccttaagctgataagcaacttcagcaaagtctcaagatacaaaatcaatgtgcaaaaatcacaagcattcttatacaccaataacagacaaacagagagccaaatcatgagtgaactcccattcacagttgcttcaaaaagaataaaatacctgggaatccaacttacaagggatgtgaaggacctcttcaaggagaactacaaaccactgctcaatgaaataaaagaggacacaaacaaatggaagaacattccatcctcgtggataggaagaatcaatattgggaaaatggccatactgcccaaggtaatttatagattcagtgccatccccatcaagctaccaatgactttcttcacagaattggaaaaaaattctttaaagttcctatggaaccaaaaaagagccacattgccaagacaatcttaagccaaaagaacaaagctggaagcatcacactatttgactttaaactatactacaaggctacagtaaccaaaacagcatggtactggtaccaaaacagagatacagaccaatggaacagaacagagccgtcagaaataataccacacatctacaaccatctgatctttggcaaacctgacaaaaacaagcaatggggaaaggattccctatttaataaatggtgctgggaaaactggctagccatatgtagaaagctgaaactggatcccttccttacaccttatacaccaattaattcaagatggattaaagacttaaatgttagacctaaacccataaaaaccctagaagaaaacataggcaatcccattcaggacataggcatgggcaaggactccatgtctaacacacccaaagcaatggcaacaaaagccaaaattgacaaatggggtctaattaaactaaagagcttgtgcacagcaaaagaaactaccatcagagtgaacaggcaacctacagaatgggagaacatttttgcaatctactcatctgaaaaagggataatatcca

SEQ ID NO: 12612 - DNA, 530 bp, Homo sapiens
gtacaatctgggatcaagtgttctcgctgctctcagggatcggcgcacagcctgtgtgctcccatgtggcctgacttggatttcagagtttatatgaggcacagctgagagtctggaaaaggcacagcatcttctccttcctgtccagatgagccaagtgagcaggaagggtctcagcatctattcctgaggccctatgagaggtttcttcattcctttataatgattaagccctacattgggaatgggtttgatttgtcattgtacaaacttcagaggctttaatggtaattttattaaccttgctggaccttatggaatgttgataaaagcaaccactctttgttatgaaagcaaaaagagacattgaaaagttagttcaagataattggcaaagccagctgccatgatgagattgttgaatagtgatggtggtaatggcagaaaaggtgaaggctctttcttgaaagacagcacaggaatcaccgctctaatgctatctttgtgatgttactgttgaatatatgtga

SEQ ID NO: 12613 - DNA, 5176 bp, Homo sapiens
catccacaccaaaaccccatctatacatcatcatcatcaaagaccaaaggtagatacagccacaaagatggggaaaaaacagagcagaaaagctgaaaattctacaaatcagagcgcctgtccccctctaaaggaatgcagctcctcgccagcaacggaacaaagctggacagagaatgacgactttgacgagttgagagatgaaggcttcagatgatcaaacttctctgagctaaaggaagaagtttgaacccatcgcaaagcagctaaaaaccttgaaaaaagattagacgaatggctaactagaataaccagtgtagagaagtccttaaatgacctgattgagctgaaaaccacggcacaagaactatgtgacaaatgcacaagcttcagaagcctatttgatcaactgaaagaaaaggtatcagagactggagatcaaatgaatgaaatgaagcaacaaaagaagtttagagaaaaaagagcaaaaagaagcaaacaaagcctccaagaaatatgggactatgtgaaaagaccaaatctacgtctgattggtgtacctgaaagtgacggggagaatggaaccaacctggaaaacactctgcggatattatccaggagaacttccccaacctagtgaggcagaccaacattcaaattcaggaaatagagaacgccacaaagatactcctcgagaagagcaactccaagacacataattgtcacattcaccaaggttgaaatggaggaaaaaatgttaagagcacccagagagaaaggtcgggttacccacaaagggaagcccatcagactaacagcggatctctcggcagacactccgcaagccagaagagagtgggggccgatattcaacattcttaaagaaaagaattttcaacccagaatttcatatccagccaaactacgcttcataagtgaaggagaaataaaatcctttacagacaagcaaatgctgagagattttgtcaccaccaggcctgccctaaaagagctcctgaaggaagcactaaacgcggaaaggaacaactggtagcagccactgcaaaaacatgccaaattgtaaagaccatcaatgctaggaagaaactgcattaactaacgagcaaaataaccagctaacatcataatgacaggatcaaattcacatataacaatattaaccttaaatgtaaatgggctaaatgctccaattaaaagacacagactggcaaattggataaacagtgaagatccatcagtgtgctgtattcaggagacccatctgatgtgcagagacacacataggctcaaaacaaagggatggaggaagatctaccaagcaaatggaaaacaaaacaaaacaaaaaggggttgcaatcctagtctctcatgaaacagactttaaaccaacaaagatgaaaagagacaaagttggccattacataatggtgaagggatcaattcaacaagaagagctaactaacctaaatatatatgcacccagtacaggagcacccagactcataaagcaagtccttagagacctacaaagagacttagactcccacacaataataatgggagactttaacaccccactgtcaacattagacagatcaacgagacagaaagttaaaaaggatatccaggaattgaactcagctctgcacctagaggacctaatagacatctacagaactctccacccaaaatcaacagaatatacattcttcccagcaccacttcgtacttactccaaaattgaccacatagttggaagtaaagcactcctcagcaaatgtataagaacagaaattataacaaactgtctctcagaccacagtgcactcaaactagaactcaggattaagaaactcactcaaaaccactcaactacatggaaactgcacaacgtgctcctgaatgactactgggtacataacgaaatgaaggctgaaataaagatgttctttgaaaccaacgagaacaaagacacaacatgccagaatctctgggacacattcaaagcagtgtgtagagggaaatttatcgcactaaatgcccacaagagaaagcaggaaagatctaaaattgacaccctaacatcacaattaaaagaactagataagcaagagcgaacacattcaaaagctagcagaaggcaagaaataactaagatcagagcagaactgaagaagacagagacacaaaaaacccttcaaaaaatcaatgaatccacgagctggttttttgaaaggatcaacaaattgatagaccactagcaagacctaataagaaaagagagaagaatcagatagacacaataaaaaatgataaaggggatatcaccaccggtcccacagaaatgcaaactaccatcagagaatactataaacacctctacgcaaataaactagaaaatctagaagaaatggataaattcctggacacatacacccttccaagactaaaccaggaagaagttgaatgcctgaatagaccaataacaggctctgaaattgaggcaataattaatagcctaccaaccaaagaaagtccatgaccagaaggattcacagctgaattctaccagaggtacaaggaggagctggtaccattccttctgaaactattccaatcaacagaaaaagagggaatcctccttaacttattttatgagaccagtatcatcctgataccaaagcctggcagagacacacaaaaaaagacaattttagaccaatatccctgatgaacattgattcaaaaatcctcagtaaaatactggcaaaccgaatgcagcagcccatcaaaaagcttatccaccatgatcaagtgggcttcatcccggggatgcaaggcaggttcaacatacgcaaatcaataaatgtaatccagcatataaacggaaccaaagacaaaaaccacatgattatcttaatagatgcagaaaagacctttgacaaaattcaacagcccttcatgctaaaaactctcaataaattaggtattgatgggacgtatctcaaaataataagagctatctatgacaaacccacagccaatatcatactgaatgggcaaaaactggaagcattccctttgaaaactcgcacaagacagggatgccctctctcaccactcctattcaacatagtgttggaagttctggccagggcagtcaggcaggagaaagaaataaagggtattcaattaggaaaagaggaagtcaaattgtccctgtttgcagatgacatgattgtatatttagaaaaccccatcgtctcaccccaaaatctccttaagctgataagcaacttcagcaaagtctcaagatacaaaatcaatgtgcaaaaatcacaagcattcttatacaccaataacagacaaacagagagccaaatcatgagtgaactcccattcacagttgcttcaaaaagaataaaatacctgggaatccaacttacaagggatgtgaaggacctcttcaaggagaactacaaaccactgctcaatgaaataaaagaggacacaaacaaatggaagaacattccatcctcgtggataggaagaatcaatattgggaaaatggccatactgcccaaggtaatttatagattcagtgccatccccatcaagctaccaatgactttcttcacagaattggaaaaaaattctttaaagttcctatggaaccaaaaaagagccacattgccaagacaatcttaagccaaaagaacaaagctggaagcatcacactatttgactttaaactatactacaaggctacagtaaccaaaacagcatggtactggtaccaaaacagagatacagaccaatggaacagaacagagccgtcagaaataataccacacatctacaaccatctgatctttggcaaacctgacaaaaacaagcaatggggaaaggattccctatttaataaatggtgctgggaaaactggctagccatatgtagaaagctgaaactggatcccttccttacaccttatacaccaattaattcaagatggattaaagacttaaatgttagacctaaaaccataaaaaccctagaagaaaacctaggcaataccattcaggacataggcatgggcaaggactccatgactaaaacacccaaagcaatggcaacaaaagccaaaattgacaaatggggtctaattaaactaaagagcttctgcacagcaaaagaaactaccatcagagtgaacaggcaacctacagaatgggagaacatttttgcaatctactcatctgaaaaagggctaatatccagaatctacaaagaactcaaacaaatttacaggaaaaaacaaccccatcaaaaagtgggcgaaggatatgaatagacactttgcaggggaagacatttatgcagtcaacagacacatgaaaaattgctcatcatcactggccatcagagaaatgcaaatcaaaaccacaatgagataccatgtcacaccagttagaatggcgatcattaaaaagtcaggaaacaacaggtgctggagaggatgtggagaaacaggaacacttttacagtgttggtgggactaaactggttcaaccattgtggaagacagtgtggcgattcctcaaggatctagaactagaaataccatttgacccagccatcccattactgggtatataccgaaaggattatgaatcatgctgctgtaaagacacatgcacatgtacgtttattgtggcactattcacagtagcaaagacttggaaccaacccaaatgtccaacaatgatagactggattaagaaaatgtggcacatatacaccatggaatactatgtagccataaaaaaggatgagttcatgtcctttgtagggacatgggtgaagctggaaaccatcattctcagcaaactatcgcaaggacaaaaaaccaaacaccacatgttctcactcataggtgagaattggaaaatgagaacacttggacacaggaaggggaacatcacataccagggcctgtgctagggtgcggggagaggggagggatagcattatgagatatacctaatgtaaatgacggtgaatgggtgcagcacaccaatgtggcacatgtatacatatgtaacaaacctgcacgttgtgtacgtgtaccctagaacttaaagtataataataaaa

SEQ ID NO: 12614 - DNA, 530 bp, Homo sapiens; identical to SEQ ID NO: 12612

SEQ ID NO: 12615 - DNA, 9732 bp, Homo sapiens
gattccatggcaatccctgagcctgcagatcctggtgacagccaccaggaacctcaggatggaccagtcagcttcaaacctggtgtgttgctttccggaaggggaaggcaggcaggctggtggggcccatgtagccagctggccctttttcctgtgatacagcagtgccatttcagggaaaccttgcctccagaatcagcaaggcctgctctgtggcctgtaccacctcccaccttgaaggccaggctcacagggcccccagcggcctactggccaagcacacacacccttttccttcaccccatcttctgggaaggactggttcatctggcactttccttgccccgctgaaccacacaagcccttgtgcctggaaaaagcattctcaccctttcccacagccctaaccagagccaggaagtcatgctgtccttggtcttggagtcagcacaggaaacccaccaagagacaccatttgcagcagggccctttaaggctgggcccaagattgagaaagtaaatgagtttcattatgtggtgaagtatttattgacaagggctgccaagaatgaagttgtgaggccatgtgcatgtgctgaggaggggagtgtaccatgattgattagtcatgtctgctgtaggtgtaggaggcagggtgagggctcacttgctatgcatttgccctccaggggtttaaggcttctaagctcctgctcagaggacatcagcagctaacttccctgctctcagccttcaactctccttctctgaaccttgtgatcttcccaggcctggtgagttagcccttgacatttatgtctgctgtgtatttaggccaccttgctgcagtgatcaatgaggttgaggtgcaacaggaacagcaggaacatctgctgggagatctccagaatgatgtgcaccgggtggcagacagcctgccaggcctgtggaaagccctgcctggtaacctcacagctgcagtgatggaagcaaatcaaacagggcacggtgagtggcaggctctaggggctgaggaagagcctggtcacattgaggggaggaggggaggaccccgctggtcccagcctgggaggagtgtctgctcctgcagggcttgtgtcacaccacatgtctgttgcagagttccctgatagatccttggagcaggtgctgctaccccacgtggacaccttcctacaagtgcatttcagccccatctggaggagctttaaccaaagcctgcacagccttacccaggccataagaaacctgtctcttgacgtggaggccaaccgccaggccatctccagagtccaggacagtgccgtggccagggctgacttccaggagcttggtgccaaatttgaggccaaggtccaggagaacactcagagagtgggtcagctgcgacaggacgtggaggaccgcctgcacgcccagcactttaccctgcaccgctcgatctcagagctccaagccgatgtggacaccaaattgaagaggctgcacaaggctcaggaggccccagggaccaatggcagtctggtgttggcaacgcctggggctggggcaaggcctgagccggacagcctgcaggccagggctgggccagctgcagaggaacctctcagagctgcacatgaccacggcccgcagggaggaggagttgcagtacaccctggaggacatgagggccaccctgacccggcacgtggatgagatcaaggaactgtactccgaatcggacgagactttcgatcagattagcaaggtggagcggcaggtggaggagctgcaggtgaaccacacggcgctccgtgagctgcgcgtgatcctgatggagaagtctctgatcatggaggagaacaaggaggaggtggagcggcagctcctggagctcaacctcacgctgcagcacctgcagggtggccatgccgacctcatcaagtacgtgaaggactgcaattgccagaagctctatttagacctggacgtcatccgggagggccagagggacgccacgcgtgccctggaggagacccaggtgagcctggacgagcggcggcagctggacggctcctccctgcaggccctgcagaacgccgtggacgccgtgtcgctggccgtggacgcgcacaaagcggagggcgagcgggcgcgggcggccacgtcgcggctccggagccaagtgcaggcgctggatgacgaggtgggcgcgctgaaggcggccgcggccgaggcccgccacgaggtgcgccagctgcacagcgccttcgccgccctgctggaggacgcgctgcggcacgaggcggtgctggccgcgctcttcggggaggaggtgctggaggagatgtctgagcagacgccgggaccgctgcccctgagctacgagcagatccgcgtggccctgcaggacgccgctagcgggctgcaggagcaggcgctcggctgggacgagctggccgcccgagtgacggccctggagcaggcctcggagcccccgcggccggcagagcacctggagcccagccacgacgcgggccgcgaggaggccgccaccaccgccctggccgggctggcgcgggagctccagagcctgagcaacgacgtcaagaatgtcgggcggtgctgcgaggccgaggccggggccggggccgcctccctcaacgcctcccttcacggcctccacaacgcactcttcgccactcagcgcagcttggagcagcaccagcggctcttccacagcctctttgggaacttccaagggctcatggaagccaacgtcagcctggacctggggaagctgcagaccatgctgagcaggaaagggaagaagcagcagaaagacctggaagctccccggaagagggacaagaaggaagcggagcctttggtggacatacgggtcacagggcctgtgccaggtgccttgggcgcggcgctctgggaggcaggtgagttcctgggctggggagactggacgagcctaggaggccagggccggctgccggcagctcttctgcctccaagagggccaggaagaaagagaacaggatggccatccgtcacccctactaggtccaccttccccttggcccacctgcttctcaggggtgtgggtctctcaagctacctggcttatggggagacagaagtcacaagaaccacctgctagtgccagagcccgtgagcggcatagcctggaggccacaggcacaatagtgccgcctactgctcctgctacagagagggcatcgcctcctgccctgccagggcagccttcaagtccccccatctcatctcttcacctcacccccttcattcccatgtgcgtttaagccactgtatctaggaagaatgtggatagggactgtggccacttgcagccccacttagttctgtttcattttccatgattttagttttttttttgttttttttttctttttcttttctttttttttttttttttaagatgggtctcactttgtcgtccaggcttgagtacagtggtgggatcatggctcactgcagcctagacctctccaggctcagctgatcctcccacttcagcctccagagtagctaggacttacaggcatgtgtcaccatgcctagctaatttttgtactttttgtagagacagggtcttgctatggtgcccaggctggtctcaaattcctgggatcaagtaatctgcccacctcagcctcctaaagtgttaggattacaggtgtgagccatgtgcccagccttgatttcagtttcttgcatcaaccacgatcagaaaataggtgagtacagtacaataagattttgagagagggagacaccacattcatataacttttattacagtatactgttataattgctttatattttattattattgtcaatctcttactgtgcctaatttacaagttaaactttggcataggtatgtacatagaggaaaataaatagtatatatagggtttggtactgtctgagatttcaggcacctgctaaggtcttggaacacacctcagtggactgtacagggaaagccgtgggccctgaaaggagctcattccctctgcaaatacagttaacctgtctcatcgctctgtgctagtccccttcctgggctttaccacaatggcccatcccaacaggtcaatgacacactcatcagcacttccatcttacctgaaactgaggcgcaaacacaagtttcctgcttgcacagctagtgagcagcagaggagcgctgtctttagggtgccggttcttcacctccagaaggccctccatggctggtccctgcagggccctgggcctgggagctggctttgaggctgaaggcatgtgcaaccaagcttcccatcccctccctgagtgtggtcccgggagggggacaactaggctctgtgtctcaagtgactctctctgccagaggctggccttggagctgtggcctctccccacccagacacagggctaagtacaaggccaccatcttggccatgtgcagcctggcgtgtggcaagtccaaggccttgttgaaggtcccgtcccaggcagcccctgccccagctgaccctccctatggcccaagaggcaatgtggagcagtgggaagcacccaggctctggcatcacttgtctgtttcttcctcagtaaaatggcagaatccctacccatgtcaaagttttgttatgaagactgctgcgtttaccaaatacctagcacgaggcttacctcatgtaggaacgcagtcaacgttttcccatttccccagcattttcagggttcaggttgtgtccaccgacactgacacttctctcttgtttcctctcgtgcgtggtgcaaggcttcaatatgctgatgactttcagaatttgccccacggtttggaaatgtgtttaccacgacgatatttatttcaaaaaaatgttgttcttaaaaacaaatttccaggccgggcgcagtggctcatgcctataatcccagcagtttgggaggccgaggcgggtggatcacttgaggtcaggagttcaagaccagcctggccaacatggtgaaaccccatctctactaaaaatacaaaattagccgggtgtggtggcgggcgcctaatcccagctactcgggaggctgagacaggagaatcacttgaacccgggaggcagaggctgcagtgagccgagattgcgccactgcactccagcctgggcaagaagagcgaaactgtcaaaaaaaaaaaaaaaattagcccggtgtggtggcaggcacctgtaatcccaactacctggaaggctgaggcaggagaatcgcttgaacctgggaggcagaggttgctgtgagccaagatagctccattgcactccagcctgggcggcagagtaggactctgtctcaaacacacacacacacacacacacacacaaacacacacacacacacacacacacacacacaccccaaatttccctttatttgtttgtaggaaggctgtagggcttgaatgtgtgccctgcagggaagcacactctgagtttgcacagcccttcccgcatcttagggcctgtcaggcgcaaggctgggttggggtgggggtctctctctgcggcggaactccctgcgcaggcgcccggacggaacggccggaacgagggcctagcaccggtagagggcgctgcgggccggccttccttcggctaggcaagagaaccacctgcagggtgttaggggaattgcagaggcagccgccggcctctgacttgggcacaatcttttttttttttttttttttttttttttttttgagacggagtctcgccctttcgctcaggggggagtgcaatggcacgatctcggctcactgcaacctccgccttccgggttcaaacgattctcctgcctcagcctcccgagtagctaggattacaggcgcctgccaccatgcccagctaatttttgtagttttagtagagacgggatttcaccatgttggccaggctggtctctatctcctgacctcgtgatccgcccacctcggccttccaaagtgctgggattacaggcgtgagccatttgcgcccggcatttttttttttttttttttttgacggagtttcactctcgttgcccaggctggagtgcaacggcgtgatctcggctcacggcaacctccgcctcccgggtgcaagcgattctcatgcctcagcctcccaagtagctgggattacaggtatgccccaccacgcctggctaattttgtatttttagtagagatgggatttctccatgttggtcacgctggtctcgaattcccgacttcaggtgatccgcccgccttggcctcccaaagtgctgggattacaggcgtgagccactgcgcccggctgatttgacacaatctgaacacaaatgagaaagctattctcagctgtctaattctcagaaaatcttccagaactagagaaaagcaacatttttttattcacaaaggcttgctggattgggagtcaaagagctgaggcttgagttccgggacccaagtcagtaattgctcagcaaactgctcctctgaaggctttggttttatcacctaagaaatggggaccttgttttaaacccctacagagggagcaagttgaggaaccccatggtggacatgacctcgttggtgccaaggccagtgtcacagccaggacccaagtaggacttacctttcctgtgccatctcatgaccctgtccccagctgcccaaccatgctgtccaggcagcaggactggcttcttcctggctgtttgtacaccctccacacatggcagcttcctctgcttctgtgcccgtgcatgggcctggcaccagtgttctgtcagtgttcctgtcctaaggctggccaaagtggtccctgcagagaaccagaagtctagagattcaaggtctgttcccaggaggcttggtaatttactagttgtgtggtctggagcaataagctttttctttctgggcctcaatttacccatatgtaagatgaccagcttggccagtaacagtggctcacacctgtaatcccagcactttgcggggttgaggtgggaggaccgcttgagctcaggagtttgagaccagcctgggcaacagagcaagactctgtctctacaaaaaataaaaaattagccaggcatgatggcgtatgcctgtagacccagctactcaggtggctgaggtgggaggattgcttgagcccaggaagttgaggctgcagtgagccatgatcgccaatgcactccagtctgggcaacaagagaccctttatcaactaaaaaaaagaagaccagcttgaaggggcttctcttccctggctccacctgctctttccttctttctccaaggttctgtcttcaacatccaggaggatccagccttcatggctctgcagataccttcccagtgttagcattattattaccttgaggatggatattttctccctctcccctgagtatctcaagattcctagcaagtggtggtcgtctgggagtcagagacccgtgttcctgtcccagcctgccatttacaaaccatgtagccttgggcagccggtgaaggattcaacctgttttgtcaatcagggatactgtctctcaaggaagttggaaggaaaagggatcaaacgagaaagtgctttgtggctgggcatggtggctcacctgcaagcccaacattttgggaagctgaggctggaggatcacttgagcccaggagctccagatcagcctgggcaacatagtaagactccatctctacgttaaaaaaaaaaaagggctgcagtgagtcatgaccactgctgcactccagcctgggagacagagtgagtccctgtctaaaaaaaaaatgaaagtattttgttaaaatgtacaccagctcagacaacagacttgcattttccttcctctctattagtgaaaaacagaattggccatctagcttttctcctgcaataacactgctgttgggaatatctaggttatctagaaatagtgacctatttccattgctaataaggtgaggacggtaggtctcagggtttaatttcccacccaatggtgtaagggatgaatcactaagcactgtcctgttatgtttcaggatcccctgtggccttctatgccagcttttcagaagggacggctgccctgcagacagtgaagttcaacaccacatacatcaacattggcagcagctacttccctgaacatggctacttccgagcccctgagcgtggtgtctacctgtttgcagtgagcgttgaatttggcccagggccaggcaccgggcagctggtgtttggaggtcaccatcggactccagtctgtaccactgggcaggggagtggaagcacagcaacggtctttgccatggctgagctgcagaagggtgagcgagtatggtttgagttaacccagggatcaataacaaagagaagcctgtcgggcactgcatttgggggcttcctgatgtttaagacctgaaccccagccccaatctgatcagacatcatggactcgcccagctctcctcggcctggggctctggccaaggatgggctggaggtcattcagttggtctgtctcttccctggaaaccttctgcaaagatggtgtggtgtacgtggcttccctgtaaccacatggggcttggccatttctccatgatgagaaggactggaatgcttctccgggcaggacatggtcctaggaagcctgaaccttggcttggcatgccttctcagacagcacggcctgggctccaactcttcaccacaccctgtattctacaacttctttggtgttttgctcctcctgtggttggaaacttctgtacaacactttaaacttttctcttgcttcctcttctcttctcccttatcgtatgatagaaagacattcttccccaggaggaatgtttaaaatggaggcaacattttggccaacattggaaagcactagagggcaatgggattaaaccaacctgcttggtctctattagtcagtaatgaagacgacagcctggccaaccaagggaaaggaaattagtatctttagtttcagtcattccttgtaggatatggtttagctgtgcccccacctaaaatatcatcttgaattgtaatccctataatccccacatcaagggagagatcaggtggaggtaattggatcttgggggcggttcccccatgctgttcttgtgatagttctcacgagatctgatgattttataagtttgatagttcctcctgtgttcattctccttcctgccaccttgtgaagatgccttggttcctcttcactgtctgccatgattgtaagtttcctgaggcctccccagccatgtggaacagtgagtcaattaaacctctttcctttataaattatccagtcttgggcaattcttgatagcagtgtgaaaatggactaatacacttgtgtttatctgtaatttaaatttcatgtctttttctccttgccttacatagggtaaagaccaagaaatgccaaacgtgaactaaaatatgtagggccttcaacttttttacttcctccagtatcttaggaccatcgtaattcttgttagcatctctaaccaggaggcagctgagggaggagggaaagaagactgtaaaaatccccctcactaatgatcaactttggaataaagtgatgcccttcaaa

SEQ ID NO: 12616 - DNA, 2195 bp, Homo sapiens
ttttttctttgttgactagaacctctcgtccctcttgactttcatgggcatccttctgatatttatcatttaatgtaatatttcccttaggctcctcatatgttatcaaataagatttttcctgtctatttccagttggtcaagagctttattttcgttgtcggttgctgtttgtttaccttaggtggaaattagattttcaagtactttggcctttgatactaggtatcaataaagatggtaatatatatgttctctatttatctgttaatgtggtaaatatgttaccttaataggtatctttaaatttacctgtcttacattcctggattaaatcttatttggtcatatttttaactattcagctggatttatcaagattttatttggaaaatttgtacctatatttataaataaggttctgtagttttttcctgatgtcttttttcattttttggtatcagagttattctgtccccatttttcctaaatataaagcttgatgttctactctttattgattttacattctctctgagtaatatctggtcttaccacttcaattatatgtctccttataccattttatcacctaatattctgtcagaggaccctatgtaggcagctatggttgatatttcaaatgttttcagaagacacagaagaaggagaaagaagaaatatgtggataaaaccagtgttttctattcataacttatgtaacatatatagctgactatgtttatggtgtctatcataaaaatgtataaagatagtcttttgatatattaagttgtatattctgagaaagtccttttttgtgtatgtgtatatttatgtatatatgtagtctgtatatgttttcaatacccatagcccttttcccactgaactggacggaaccttattgccattacaatgttttttcagagaagagtgttaatgcaataaagaaaagttaagtttcttttttctgagttctaagtaggctcctgaaacttctagttggcttaataatcttgacacacaagatagtgtatttcaagcagctgagctatatgaaatagaaaagggttttgagtttttaaaataaagctctgaagatatcagtgcataaatttatttttattttaacttttaacaacagattggaaagaaattagccaaagagtgagatgatctcatcacattattaaataagtgttgccttggttagaaggggagttgaaacaaggttcaggagacatggcagccctgtgttctgcctttctttcctctacagcctgagaccagggataatgatagaagctccctttagttgaagatttgagcattggagatttgtgcttcactctccaggtgaaagccaggggatggcaagcgttatctaaggcccctgtctgatgatagtgtgctggtggcagagttggaatggctgcacagcctgcttcttctggaattttgtgaagcaacaatgtcatgggtgtgtcccatattgaatgacatggtatcacttagatggagatggttaactatatgagagaagtctgtagataaagcaggtagaagatagttagcaggctcctatgggcccaggaaggcagttgagacttcatgcacttttgggcagaacaagggagctggatgcaagaccagtgctttaaaggacctcacagtaatgttgagaagaagccaggaatggtagtatggaatacatgattagagtctactaagactacagatagttcactgaaaacccgatcacacaaatgctgtgactagagacttgacaggtgccaaatcagagtgctacaggtccaatgcctctcaccgataccatgcggctgctgtgtgaacttccctcaccacgtaaccctcaccttagggaagagaaggatgagaagtcatgaattcttaagatgagcatatgcagaaattactgaggaaaatcagaatgatgtaagcttatctagaaatgactagattatgttttctgatacttggtgctacagaagcatgagagagaggaggtaagttctattgcagaaaacagtatgaccaggcacagtggctcatgcctataatctcagtactttagaaggttgaggcacaatgattactcaaggccaggagttttagatcagcctggtcaacacagtgataccccatctctatcaaaaaaaaaaaaaaaaaaa

SEQ ID NO: 12617 - DNA, 353 bp, Homo sapiens
ctgggcgtggtggcacgcgtctgtaatctcagctactcgagaggctgaggcaggagaatcgcttgaacccaggaggcggaggttgcggtgagcagagattgcgccactgcactccagcctgggtgacagagcaagactccgtctcaaaaataaataaataaataaataaaataaaaatgctcccctcattcattttgatttaatgggttggtatagaatgcaagatatttttcccagtgtacacgcaatagcgaattgagcaaaaaatgtattaagtaagctttttactttcacatcaaaatcaataccagcctgttgttgaaaattttaagattatgatttcttcatcaatt

SEQ ID NO: 12618 - DNA, 1839 bp, Homo sapiens
aatgtcagaggcattttaggttcttcatgtttctcccactttcagttgattaccattacaggatcttaggcttctttttatctttttgcagtgccttgcatccactggttgtttgttttttctgttgggcactacttatttccttacctctggtttcttctcctacagcttatgttctgaaatgtgtattcctaaaatactgttttcctcttgttacttttctgctcgaggacttccagtaacttaccattgtttataaggtgatgttcaaacccttcagtctggagactttctgccacctatctgactgtacctttatcttcaagcttatctctttccaaacaagaggctcatttagcagctttctctgattgccatgttcatcctacactcagcctcattcagtttacagcatggaaactgtataggacctctttcctatagaaattgaagacacttaaataggaagaaaattaaaatatacatttggatacatgagtattccagtcaaataatatctataaaataccagatagagtataaaagacaactgaaggacaacagagtgatgaaaggactttattaggcatttggatttggttatgatttaaatttcaatttaattagaacgtttccatggcaaggaaggaagcatggaggactgtggaaaagtcattcagtattgagttcatttgcattagaggaatttcatagtttaaaacttgtatatctttacctatccttcgtatgttttcttcttaagcatatttgactttttctacctcagcatctgtataagaaaatatttgtgagtcagatgtttgtgggttttccttacctattattattttcttccatgctttacaacacattttttaaactaccttgttcttaaataattacacggacctgcttctgtgtactttcacagaatctttgacagttaaaaattgtatgttatataaaaatttgacaagcttctacagttaggaaaagcctttagaaatctgccttccccaaaccgtatgttatcatagcactcatgtctccccatgtctaaaaggtaaatagatacagaaacctcaccaaaagttgaatcatctgtactaaaccactgcttttttatccagactttttatataaatcttttattttccaaaaaactgatcttttacctacccctcttagagttaaaaatattgcctgtcaggcaagagtatagtatgccaatataaataatatgctttatttggttagaaacagttggtttgggaagctagcaacatagcatattctttacaaatttaataaggtgtattttgatactgtgataacctgcattgtaaattaccaaatggttggaattgaccagtttatacttattaaaatttttgatgtgccaatggctatccaattcattgcatttgtgaattgtgcttttagaaaaattgtggacattttagttttatatacatatttatgagttatttgtgcatatgataaaattatatataataataaaagtatatatgtaacttacattgtgcccttgattattgaaaacttcctttttataacagattcactgtttggaagctaaagtaaaaatgagccatgttaccagaagtaataatttctatcttattactgatgtttttatactttgtggtaaaactatggaaagttaggttttcagatgctgtggtagctgaaagagtttgatgtacatgtggttaaagtgtgaagaaaatatgaaggaaaaagtatgaaaagtaccctagtcattacctaattgctattttgtttttaaggatctaagaagtgttattgcattgtaca

SEQ ID NO: 12619 - DNA, 1840 bp, Homo sapiens
aatgtcagaggcattttaggttcttcatgtttctcccactttcagttgattaccattacaggatcttaggcttctttttatctttttgcagtgccttgcatccactggttgtttgttttttctgttgggcactacttatttccttacctctggtttcttctcctacagcttatgttctgaaatgtgtattcctaaaatactgttttcctcttgttacttttctgctcgaggacttccagtaacttaccattgtttataaggtgatgttcaaacccttcagtctggagactttctgccacctatctgactgtacctttatcttcaagcttatctctttccaaacaagaggctcatttagcagctttctctgattgccatgttcatcctacactcagcctcattcagtttacagcatggaaactgtataggacctctttcctatagaaattgaagacacttaaataggaagaaaattaaaatatacatttggatacatgagtattccagtcaaataatatctataaaataccagatagagtataaaagacaactgaaggacaacagagtgatgaaaggactttattaggcatttggatttggttatgatttaaatttcaatttaattagaacgtttccatggcaaggaaggaagcatggaggactgtggaaaagtcattcagtattgagttcatttgcattagaggaatttcatagtttaaaacttgtatatctttacctatccttcgtatgttttcttcttaagcatatttgactttttctacctcagcatctgtataagaaaatatttgtgagtcagatgtttgtgggttttccttacctattattattttcttccatgctttacaacacattttttaaactaccttgttcttaaataattacacggacctgcttctgtgtactttcacagaatctttgacagttaaaaattatatgttatataaaaatttgacaagcttctacagttaggaaaagcctttagaaatctgccttccccaaaccgtatgttatcatagcactcatgtctccccatgtctaaaaggtaaatagatacagaaacctcaccaaaagttgaatcatctgtactaaaccactgcttttttatccagactttttatataaatcttttattttccaaaaaaactgatcttttacctacccctcttagagttaaaaatattgcctgtcaggcaagagtatagtatgccaatataaataatatgctttatttggttagaaacagttggtttgggaagctagcaacatagcatattctttacaaatttaataaggtgtattttgatactgtgataacctgcattgtaaattaccaaatggttggaattgaccagtttatacttattaaaatttttgatgtgccaatggctatccaattcattgcatttgtgaattgtgcttttagaaaaattgtggacattttagttttatatacatatttatgagttatttgtgcatatgataaaattatatataataataaaagtatatatgtaacttacattgtgcccttgattattgaaaacttcctttttataacagattcactgtttggaagctaaagtaaaaatgagccatgttaccagaagtaataatttctatcttattactgatgtttttatactttgtggtaaaactatggaaagttaggttttcagatgctgtggtagctgaaagagtttgatgtacatgtggttaaagtgtgaagaaaatatgaaggaaaaagtatgaaaagtaccctagtcattacctaattgctattttgtttttaaggatctaagaagtgttattgcattgtaca

SEQ ID NO: 12620 - DNA, 368 bp, Homo sapiens
taagacaaaaagatcgtttttattcacttttgattacaaaaaaaggttacatgaataaaataacaatttcctttaagagagggattcctgaatgattaaactgccaaggaaaaaagagtgaattcttccttttaataaaggtgacctaggtcctgaggaagttaggaaaaaagaaaaactcacattatacttgttaaatttgttttcaaatgtgattattaagttgttgtatttattttttgttatagacaaagcaaacccaaaaactagtctaaaaaagaattcctatgcattattaaaagagatagtaataaaatatgtattggtggtgaagaattccacaagcactcaagattgacataaccttt

SEQ ID NO: 12621 - DNA, 212 bp, Homo sapiens
ttgttgttgttttgaggcagagtcttgctctgtcgcccaggctggagtgcagtggcacgatctcggctcactgcaagctctgcctcccgggttcacgccattctcctgcctcagcctcccaagtagctgggactacaggtgcccgccaccacgcccggctaattttttttgtatttttagtagagacggggtttcaccatgttgggctcgat

SEQ ID NO: 12622 - DNA, 368 bp, Homo sapiens; identical to SEQ ID NO: 12620

SEQ ID NO: 12623 - DNA, 215 bp, Homo sapiens
ttgttgttgttgttttgaggcagagtcttgctctgtcgcccaggctggagtgcagtggcacgatctcggctcactgcaagctctgcctcccgggttcacgccattctcctgcctcagcctcccaagtagctgggactacaggtgcccgccaccacgcccggctaattttttttgtatttttagtagagacggggtttcaccatgttgggctcgat

SEQ ID NO: 12624 - DNA, 1969 bp, Homo sapiens
tcagattatgattaaattagatattaaacacttcaaccacataagaatattgaggactgttgaatgagtcctgtgctctggtggtcctggaacttaattttatttatgaattttcagtcattagagaagagtatggtgtggatatgggaggttggattagccgactaaactttgaagtttgcaactttagcagatgttgggatagaagttaacacagtagttcaaattgatttcgcacttcatggtttatagaaatgctttcacattcatatctgaatatttgaaacaacctagtgggtaggtaggtaagcaattttatctgtgtttcccatggaagaaactgaggctgggagatgttcattgtttgttatccaaggtcatatagctagtaagtagaagagtccagatgcaaacccaggccacctgaacaatgttcacatcattttaccatggagaagagattagtgcttttatttgtctaacactctggtcagtgaaattaaagtatctccgtgtgaaacagcatgcaaaaggctttgtttctaatatttttaacaaatccctttagatcgttgggaattaaacaaatacctagggcagtgtggacttacctgaagtcttttgacattttatgaagttctgttaaacctagaaataaagtcaaataaattttttattgctttagagacatagttattggaagttatttatagtttaaatatgtagccataataattattcgtgactatatttcaagatagtttattcagcaagcacttactgagaacctaccatgtactgggcactgtgttcttaaaaggactaattgatgagctcagtctagtgggggagatgagtaaaccagcaattataatacagagtactacttgagtagaggtacgcatagggaaaaccctgtaatagagggagcactgtctgtgttacctaatgcagacttgaggtaattcgaaaaggcatgttaagccatgtgatgcttgagtacaatcttgaaagcatgttaatacttaacttggtaagaacattttaagcgaataacagcctatgcaaatacacagaggcatttgagaatgcggcacttagagggagctacaaatagattgacatggcaagagtatgcactgactgttaagggatggaaggagttgagaccagagagagagagacatgattaggattgtgaagagccttagatgacatgcttttaaaaagttagtactttttcctaaagataattgggagtcattggtgaattttaatagggaaatgcttgctatccatttatgtttgcaaagattacataatagtgtggaggatggaattggtggtgcaggatatgagattggaagcaagaataccagttagttacgatagtaaccatgtcataaatgctccacgtccaaactggtactgacattagagagaaaagaaagaaatttgagaaataattagaaggttgagatttaactagtcttggtgagagagagagatagtcttcagatgtggtttggacaaatgggtggatggcgatgctggtcaaagccaatacatggttgaaaaagccggtttctgtggctagagggtgttgatgagctcagtttgagatattttgagttgaaggtacctgtgggaatttacggttagaaataactgttaggaggctgggcatggtgtctcacatctgtaatcccagcagtttggaggctgaggtgaacagattgcttgagatcaggaattttgagaccagcctggtcaaagtggtgaaaccccatgtctactaaaaattcaaaaattagctgacatggtggcgggcgcctgtaatcccagctgcttgggatgctggcttgaacctgggaggtggagtttgcactgagccaagatcacgtcactcactccagcctgggcgacagagcaagtctcaataaagaaaaaaagaaaaaaaaaaaaagaa

SEQ ID NO: 12625 - DNA, 1973 bp, Homo sapiens
  SITE (737): n equals a,t,g, or c
tcagattatgattaaattagatattaaacgcttcaaccacataagaatattgaggactgttgaatgagtcctgtgctctggtggtcctggaacttaattttatttatgaattttcagtcattagagaagagtatggtgtggatatgggaggttggattagccgactaaactttgaagtttgcaactttagcagatgttgggatagaagttaacacagtagttcaaattgatttcgcacttcatggtttatagaaatgctttcacattcatatctgaatatttgaaacaacctagtgggtaggtaggtaagcaattttatctgtgtttcccatggaagaaactgaggctgggagatgttcattgtttgttatccaaggtcatatagctagtaagtagaagagtccaaatgcaaacccaggccacctgaacaatgttcacatcattttaccatggagaagagattagtgcttttatgtgtctatcactctggtcagtggaattaaagtatctccgtgtgaaacagcatgcaaagggctttgtttctaatatttttaacacatccctttagatcgttgggaattaaacaaatacctagggcagtgtggacttacctgaagtcttttgacattttatgaagttctgttaagcctagaaataaagtcaaggaaattttttattgctttagagagatagttattggacaggaagttatagtttaaataaagaagccatattcntagtagagacctcttttcaagttgggttatacgaggttctcttaagaggtttctcttctatggtagtgagaggctgtgttcttaaaaggactaattgatgagctcagtctagtgggggagatgagtaaaccagcaattataatacagagtactacttgagtagaggtacgcatagggaaaaccctgtaatagagggagcactgtctgtgttacctaatgcagacttgaggtaattcgaaaaggcatgttaagccatgtgatgcttgagtacaatcttgaaagcatgttaatacttaacttggtaagaacattttaagcgaataacagcctatgcaaatacacagaggcatttgagaatgcggcacttagagggagctacaaatagattgacatggcaagagtatgcactgactgttaagggatggaaggagttgagaccagagagagagagacatgattaggattgtgaagagccttagatgacatgcttttaaaaagttagtactttttcctaaagataattgggagtcattggtgaattttaatagggaaatgcttgctatccatttatgtttgcaaagattacataatagtgtggaggatggaattggtggtgcaggatatgagattggaagcaagaataccagttagttacgatagtaaccatgtcataaatgctccacgtccaaactggtactgacattagagagaaaagaaagaaatttgagaaataattagaaggttgagatttaactagtcttggtgagagagagagatagtcttcagatgtggtttggacaaatgggtggatggcgatgctggtcaaagccaatacatggttgaaaaagccggtttctgtggctagagggtgttgatgagctcagtttgagatattttgagttgaaggtacctgtgggaatttacggttagaaataactgttaggaggctgggcatggtgtctcacatctgtaatcccagcagtttggaggctgaggtgaacagattgcttgagatcaggaattttgagaccagcctggtcaaagtggtgaaaccccatgtctactaaaaattcaaaaattagctgacatggtggcgggcgcctgtaatcccagctgcttgggatgctggcttgaacctgggaggtggagtttgcactgagccaagatcacgtcactcactccagcctgggcgacagagcaagtctcaataaagaaaaaaagaaaaaaaaaaaagaa

SEQ ID NO: 12626 - DNA, 219 bp, Homo sapiens
ctttcagtaacttgttggcagtccatcccagaaatataccccatttatgtgacttggaagtgtcattaggaagaccgccatagcctctgctccttctgcctatacattgttgtaggtgaagacattttttgaagccttgcatgggcagctaggcttaagtcagcagggaaacgtctgcttcttaaccagtggttttaaccaaacatttttttcagtgaa

SEQ ID NO: 12627 - DNA, 1611 bp, Homo sapiens
cctgtaatcccagcactttgggaggccaaggcgggcggatcacctcatgcctgtaatcccagcattgggatgggaggctgaggtgggtggattgcttgagaagttcaagaccagcctggccaacatggcaaaaccccgtctctactaaaaatagaaaacttagctgggcatggtggcacacgcctgtaatcccagctaccggggaggctgaggcacaagaattgcttgaacttgggaggcagagtttgtagtgagccaagatcacgccactgcattccagcctggccgacagtgtgagacggtctcagaaaaaaaaagaaagaaagaaagaaaaagaaaaaacttggggtaatttatgtccagcttaagtacctgaacagtttccggaaatgtatattttttttctgagaggcaaaggatgtaaacagcttctaagtagctttaatgtttctgtacagaaataagtttatccctgtaacattgtggtagagttttaatacagtatttagttttttattgggcttttttaaaaagttaacttttaacatagctgctcagggattaaatcagattggaaaacccattctgactccacatactgctacaaagaaatacatcgttgtttatattgagctgcaggagatagtacactttaaacttaagaaagttaaatgtttcacaataacattgcaatataatcttcagctactctctttccattggtaaaatctctgatggtgtgataactctttgccaacctacgaaacccatatctggaagaatcaccagctcccgtgagcagcttcatgtaaatagatgcactccaagcagattgcatgcctcaggtgtttgtcttctagtaatcatggagtgtgcaacacccagagtaacactacaaggggcaggactgcaaacagcaggtcctggctaaaaacccttaatgctgcattgctgccagttgtaaagagatgcctgaatggaggcaagttctgccctgtgggtgaaactgatgatgtactgtactgtcatatataaatccactaaatccagctaccaggaactgcctggaactgtggccatgcatttttttttttctttaaagaccagtgtgatagtaggccatgcatctgagatacgatattccttggtaactagagggagaaaaaaaaatcaagtaggttcaggcttatgttgtattttgagagtctggttttatttgaacagaaataactctacagaaagctcttgtaaataatgctcaaatttgcacccgacgatcaaatccattaaaaatgaatcttgtatatgatgtgtgtggcttgtttcttgcatctcttttccattattcatagaaaattatttagaaaatattaagtgttagtcttaccatgagttagtaagacataccttcttagtagcttatatgtcctgtatatcctgggaaggtaggattgttgatttttaataaatctgaaccctgtctttgggttatattaatttactggagaaactcacagaactcagggaaacacatttaccggtttcatacaaaagatatgaccaaggatacagataaggagatgagcagggtggggaatggggaagaagctc

SEQ ID NO: 12628 - DNA, 65854 bp, Homo sapiens
gggcggggcttccggcggcgcctcaggtcgcggggcgcctaggcctgggttgtcctttgcatctgcacgtgttcgcagtcgtttccgcgatgctgcctctgctgcgctgcgtgccccgtgtgctgggctcctccgtcgccggcctccgcgctgccgcgcccgcctcgcctttccggcagctcctgcagccggcaccccggctgtgcacccggcccttcgggctgctcagcgtgcgcgcaggttccgagcggcggccgggcctcctgcggcctcgcggaccctgcgcctgtggctgtggctgcggctcgctgcacaccgacggtgaggtttagcgggccgggggtgtggtttgcgttcaacagagggaaaacgtagaccaggaatagggcctgcaaccgacctctgaggtctgggacatttttccattgattggcaaccagcgggctaaacccacgtatgatcatatttcccccacctcccctatccagcagtttcgttttcttttggtagggggtgaataaaattaaatactagggtacctttttccttagtcttattctatcgaaagtggacctttgggaaggcccatggtcgtggttgaaaatagcatagttatatcgtttggcaagtggaagaggattggaaattctcctggtttatagcggaaagtggtaatgcgttcattgttggaaatcacttttccagaatcaggctcagcttcctactactattatggtatttttaccgataaggaaacaggcttctagagtaaccgtaatagcagagagattagaaacagtccaggtttctggctgcaataacctgggtaatagttttatgttttagactaactggctttcctttttatgtatctggatttcttttctaggagacaaagcttttgttgatttcctgagtgatgaaattaaggaggaaagaaaaattcagaagcataaaaccctccctaagatgtctggaggttgggagctggaactgaatgggacagaagcgaaattagtgcggaaagttgccggggaaaagtaagtactggtctggggatcccagggcagcaactcccttaaccttgcaggacccatcctgggtcatccccagaagagccttgagttcaggtgtggatactttgataaatgggtttcaagagagtgaaggattcatttggacaacttcgtaagccccaggcagtccattcaccgaacacaaatttgctgtgggctggttactaaggagacaaaaatgtagtgcaaaaaagtactggcagaatcagtttgatctctgatttacagccctgataaaataggacactgctctctaatgtttagtatgggtgaaaatgaaaaatatgtaacttctatgtaacaggatggggttacactgtagtaagggctgccatcagaggtggggagtttgtgacctaagtcagctcccccatcatctcctaaactgttaaagtgtttacacttttctgcattatagtcatccataatctcattacacagataaacatttggcatcttccaggtttttaaattgagcctgggcgcggtggctcacacccataatcccagcactttgggacgggcagatcatgaggtcaggagaaaatcctggctaacactaaaaccctggctctagtaaaaattaaccgggtatggtggcacgtgcctgtagtcccagctactcgggaggctgaggcaggggaatcgcttgaacctgggaggtggaggttgcagtgagtcgagatcgcgccaccgcgctccagcctgggcaacagagcaagacgccatctcaataataaataaataaattgaatttccttcataattgaccttatgatgtgtatgtaatttttttaaatcacagcttttatgagatttaattgagatggcatacgatttacccatttattgaagtttattaaattaagtggttcttagtcctcgcagaattatgcatcagttatcactacctaattctagaacactgttgtcatccccaaacaatacctattagcagtcactcattattcctccctgtagccaccccaggtaatcactaagctactttctctatgggattgcctcttttggacatttcatataaatggagtcatacaatttgtagcttccccccccaaccccacggagtcttgctctgtcacccaggatggagtgcagtggtgcgatcttggctcactgcaacctctgcctcccaggttctgacaattctcctgcctcagcctccttagctgggattacaggcgtgcgtccggttaatttttgtatttttagtagagacagggtttcaccgtgttggccaggctggtctcaaagtcctgacctcgtgatccgcccgccttggcctcccaaagtgctgggatttcaggtgtgagccaccctgcccaccctatttacctttttaattgttgggttgtaaaagttaagtttttctgggtacaactatcttatcaaattaatgatttgtaagtactgtttcccatcttgtgggtttccttttcactttcttggtaatgtcctctgacacaaaagtttttaattttgaggaagttcagtttacctatttttttggtcgcttgtgcttttttatttattttttactttgcttctaattcaccaagtgcaacttgtgcttttttagtgtcacgtctaagaaaccactgcctaacccaaggttgtgaagatgtatgccttaattttttcaaagttttctagttttagctcttagtttaggtctgtgattcattttgaatatggtgtgaagtagggtcctgattctcttgcctgttgcatagtgtgtttttgccctacacaggtcaattgtgtcttctgtaatctcacctaaacaccatttgcgcaaggttttcatagctatttgggggccattaaaaataatgctctgatgaacgtcattcaatttctgtgcccaggagctcagcttagtcagcacagttggaattagacagattttgtcaacctcagactgcctctgttgccatggaaaggtggcttcctggcagagcagctagttagcacaagtggagggcggcacttcatgtactcttttttttttttttttttttctgacagagtcttgctgtgtctccaggctggagagcagtggcgtgatctcggctcactgcaacctccacctcccaggttcaagcaattctcctgcctcagcctcctgagtagctgggattacaggcgcgtaccaccacgcccagctaattttttttttttttttttttttgtattttttagtagagatggagtttcatcgtgttggccaggatggtctcgatctcttgacctcgtgatctgcccacctcggcctcccaaagtgctgggattacaggcgtgagccactgcgcccagccttcatgtactcttgtgtggaatggtgcctgccagagttgcatagcccagcagttttggttctaaaccttatgtcccaagaattttgactcaaactttggaacatgatttgtcaggtgtggattcttgcaccttaaaattgtcactagttggtgtgtctggcctgctttgtgattatgaaacttcccacaagtactctaagggatgagtctctactacagcccttgttctttgtgaggcattcccttccccgttccagggctgctctcggtgtttagcagaggcaccctccatcgcttcttcctttccttgcagggcaaattttctgacggggaaagtctcttaaaggggcttctgttccatctcaccagcctctcaggtccttactttgaccaagggttccctggaaagaccagggtgggcagtgtcagctggctgtggccatgagatgcccagtcagcacatggcagtgagccctggggtactggccctgttgggagtaacccatgcatgacttgtttggctgagataaactgaggccagctttggcttccagcagctggtacatggtaggcacacttcagacctgctgagtcactcaggattggatgtaggcacccagcctagtttgaagttctgcatataattcagccagctaggacagagacattgtttcaatacgcctttttaactgtagcagatttccatgtttatgtgttaacctgctcggttaaaaccatgccttgtctgttttgccttgtctgttttcccttgccgttttagaatcacggtcactttcaacattaacaacagcatcccaccaacatttgatggtgaggaggaaccctcgcaagggcagaaggttgaagaacaggaggtaagctaatactataatcagcttttacctcagttctgacaggctgtgcctggggcttagaggaggagcgtttttctttggtctttcaaaaaaaaaaaattcctctaagtccagtcgcatggctcacgcctataatcccagcactttgggaggccgagacgggcagatcacgaggtcaagagatcgagaccatcctggccaacatggtgaaaccccgtctctactaaaaatacaaaaattagctgggcatggtggcaggtccctgtaatcccagctactcgggaggctgaggcaggagaatcgcttgaacccgggaggcagaggttgcggtgagccaagatcacaccactgcactccagcctggcgacagagcaagactctgtctcaaaaaaaaaaaaaaaaaaaaaagagagagagaatggcaggggcataagagactttaactggatcatgcctactcttcaaacatttcaggaagtgctgtgcccagcctagtaaccagccagtatgagggccacagagtccctagacattctgcccaagagccatcagtacagtgttgggtcatgacctggtgtggacggcgcagctctctggtgtgctgctttcccagccaccccaactagcatctccctgacgttggacccagtctgctcccagagctccgcatcagaggaaaagctgctgctgttattcagccataaggatggccaggttccccagcctttgaccctggtcccttatgaagactcctggaacagtcaagctggaaagagatcttgaaactttaggaaagctttgcagtgtacgggtggaggaaaaggcttggaatgttaagggactgatataaactcagttaattggcacatagctgaggctggtatccacatttcttaactgaaaacccagtgtgttatttaaccaagcagggtgccaacagaagtgagatcaagctcttcatttgggaatagtatggcataagactattcaaatggctacataatatcctaatagtggtggccatcagacactctgaacagagatccttgatccagccatccatctccttccagcagcagcatgtattgacttcttgtttccccagcctgaactgacatcaactcccaatttcgtggttgaagttataaagaatgatgatggcaagaaggcccttgtgttggactgtcattatccagaggatgaggtatgcaggatggagtgctagcctcttggcacccctggggaacagtgtgtcccttgggaacttcctgtccctattttagcagaaatttaaacacttttctagcttagaccagcccagcagggggagagaggtggggagtgagggaagagggttaaaacctgatgagtttcatgctgtcagtggccccctttcttcccctgagtctagcttgtcctggagaacccttcagtttcccaatattgtttcttctcaggttggacaagaagacgaggctgagagtgacatcttctctatcagggaagttagctttcagtccactggcgagtctgaatggaaggatactaattatacactcaacacagattccttggactgggtgagtgcttgataaggtgggggaaccttttgggccttggaaggaagggtcctagttcaaggggagaaaaaagcattttaatgttcattacagatttttttttaactagtaaatattgttctttgcaggccttatatgaccacctaatggatttccttgccgaccgaggggtggacaacacttttgcagatgagctggtggagctcagcacagccctggagcaccaggagtacattacttttcttgaagacctcaagagttttgtcaagagccagtagagcagacagatgctgaaagccatagtttcatggcaggctttggccagtgaacaaatcctactctgaagctagacatgtgctttgaaatgattatcatcctaatatcatgggggaaaaaataccaaatttaaattatatgttttgtgttctcatttattatcatttttttctgtacaaatctattatttctagatttttgtataacatgatagacataaaattggtttatctcctccaaggcagtttgtctttttctattcctcccccttcaacctgcgtcacaaaagaccaagaacagatgtcggaaaagtttttttttcttcagtattgtttaaaagtttcaatacaaaataagttataaataaaaggcttgtatgtacaaggctcctcagagggaatgagttgtcttcaaccccatagaatgatgtgagtccaagctggctctagaggatcacagcccaagtatcacaggcctaggtttaaacaggaaaataattagcttaaattgtattctagtcatgaaagatatctgataaaagttgtaatcaatgagaattctacacattagatgaggtctcctgagtccagtttcaattagttcagtagtgtagtttgtcatgatgaccgcccctctttggcattgctggacctctgtcctgcagccttcaaacaactgccctgggaaccatcagcatcaatagtcttcaagctaagatcaaatcctgtagatgaactaatcaaacatcctcaccatcaggaaaccactgaccagaaagattgtattcaaactcttgatagcctggagcttttagagcccagcaggaagatgagactccaaatctacacaagattgaagcaggtatgtatcataggggaggtgcaaaccatgcatgatcagtacgggcagaaaacatgtaaagacatgatcagtaagcacctgagtgtaaaactgcctcccgactcctgggtggctcagcctctccactatgctaaggaatccagtctgtccttaacccatttatgccagaggttgcaaatttttttgtgtgaaaaatcagaccttggcgatgaccttgagcagtaggggatcaataactcccacaggcttagcgttccaataattaaacagtaggcataagtgggttactcttgtttcttaccacttccacaggtaatatgtttggctttctctaaaagacactgtaactctgctaataggcggtttggcatattccatcccaggaccaccacttgagcaccgccacatccgaaacattcctcgtcttgtgatagagtgcaatcttctgtaacccacccctatctttcaacacatcctcagccatctgtcctgagcgtccctacgtcctgacctcactggattctaacacaatggtccttgattcccccttaagtgaaaaccaaaggtctagtggaactagagcattccaaatgtctacctttccaaatgttgaactcaagacctacagaatacaattttgtctttccccctcctcttttttttttttttttaaggcacaatctcgctgtcacccagcctggagcgcaatggcgccctctcagctcactgcaacctctgcctcctgagctcaagccatcctcccacttcagccttccgagtagctgggagtacaggtgcgagccaccacacccagctaatttctgtatttttagtagagacagggtttcaccatgttgcccaggctggtcttgaattcctggcctcaagtgatcctcccacctcagccttcctaaatgctggggttacaggtgtgaaccacagtgcctggctgtgtttctcatatttgctgtgacccccacctcccctcacttacccaacaatggtcttcctgcccaccccagagccggcactgtcaactatgatctccaagactgctgcacagcactcaccttccaaacctcacctcctacttagcttcactgctgctctgagccacagggcactgacggttaggtgagtggataactggggtccataacaattatatgctgagctgaagctgtacacttggcaattaggccatcttccacttaccttttaattccccttctcttcccccgaccagcattttgtctttcacactcaaggggactttcatactcaaggagctgtagactccagctctgctaccattataatctgtgtggatgactcactgttcaccttactaagaagacagaagccaaagccagctgacctgtgcctcaactctcctccctccaccttaactcatttgtacaaacatcttaagcacctctttattaatatatgccaagcactggaaataaaaataaatatgggccttgccctcaaggacaaagacataagcaggtaactacaacactgttacaggtgacatggcatgaggtacggtgaaagcccaaggagagactggccagttcccctctgccagccctcattaggtttattgagaatggtaacacagactccaaaggaatggacttcccaggctggccaattctttttttgtttgttttgctttttttgagatggagtttcactcttgttgcccaggctggagagcagtggcgtaatctctgctcaccgcaacctccgcttcctgggttcaagtgattctcctgcctcagcctcgcgagtagctgggattacaggtgtgtgccaccatgcctgactaatttttttgtatttttagtagagacagggtttcatcatattggccaggctggtcttgaactcctgacctcagatgatccgaccgcctcagcctcccaaagtgtggggattacaggcgtgagccaccgcactcagccaccaattctgtttttgagacagaatctcaccctgttgcccaggctggaatccagcagcacgatctcagctcactgcaacctccgcctcccgggttcaagcgattctcctgccccagcctcccgagtagctgagattacaggcacccaccaccatgtccagctaagttttgtatttttagtaaagatggggtttcaccatgttggccaggctggtcttaaactcctgacctcaggtgatctgcccacctcggcctcccaaagtgctgggattacaggcgtgagccaccgtggccagctgagactggccaattccttgtgaggaatcaggctgaatgaagtacacggcatattgtagtgcttggtaaatatttgtgcaaatgatccttaaatgtagtgggaggagtcaaagtcattcagacagaacagcctaaacaacagcacagaggcctgaaagcactgcatatttgagcatctgctaccagtgctggatagctggaacagaagggaacatatgcttgtagtcaacaggaagtagtgaggggttttatttaaactttcacctgctatgtctctttccatacaagctgatggaaaatggcatccttccaccaaggcctgagcctggagcaggaaacagcaggggcactggaaccacaaagacctggggtctaacaccagctctatcgcttattagtagtaaaattttggccagattacatcacttctctgaatctgtttcctattcctaacaggaactatcctctccctcatgaacctaatgctccagctaagtagaacaagatgctctttgtatatactccagtttcctgcttctctgccttgttcttctatgtggggatcttccacttaagctctacccccacaactcaccagatctccatgtctgtccagatcgattccatgcttcaaggccaagttaaatgcctcctccaggaaggtgtcaccataaaggagatcaccctcctctgaactcccataagccctccttgtacagctctccagggtactgcctgtttattctgttctcttattaccaacccaaggcttgagctctgtgagagatgtgtatttctcaatgttaatgagtcctcaattcattttttttttaatgaatgagtagaatacctatggaagaaacttgataaaggtgaaatggctgttaccaggcaatgctgcttataataaaaatgacctctgtaggttaactgcatttggaatgacagggccatgaaggaattctaaattcccagtagaaagccatggctatgaacttcctgaagtacagtgtgctcctaatcccaaggctccccctgcctgggatctaaaagcaataataatacgtatcatattggttttatgtgtgtttgtgtgatatatatacacatgtacatacatacatacacatatatggaaaggacatggattataagagatattggttcctatagcacgcttctaagacaggtggttcccttacccacttgtgttcctggccctcacacctcagttgtcactcaggttagcgaatagcccttggacctctgtaaaaactccactgacagacaaacctaatgctgccctgctatgcttctgccctgtttccttccgcaaaagtggtgccagcatggcctatctgggtcttatgactatgaaatgaccagctgaatccaaaaccactactactgatcaaagaagagcaggtgtggagccaggcgtcctaactcccagaccaatcctcttgccgtgatcccatgctgcctcttcccttctttctgactggcctttgagtctaaatgacttgttaccttcacttttctatgcaggtaaattcctcagataataaactgcattaaacatttacctgtttataggtcattatttctatcaaggtgggaataaaaccaaccacaggtccctcttaccacagagtgggtcccaggagacgcttaccagacagctcatgagaagactggacttttcttctgttcctccagtgactgaaaattcaggtgtgtggggacaatgtgcactgtgctcatttatactaccctctaaacaggcacgaagcttctgctctgtcaactcagaagactacaaaataaaaaagttcaacctcctctcagtgacttgatagccaacagatggaaaatcctcattcctcatgccaaccaatataaccgtggctcactgtgatggcttgactccttggagccttaaagacactcgggcccatgactgtaccaagatctcttaacccatctccatttaactgcctctccagattaaccaacgccctctactcctgctgtcaaacacactgatggccactcatggcaggaagaacgctcagagattgtaggctactttccagcctccctctgcctctgcccccaccagctgagtgcatccttaccaacaactagcagtatatgctcccgggtctgcttgggttacttgaacttcctactgtaactcagtaatgctaattacttattatgtaaataataagttttatttttatagtgataagtagaatgtttaggaaacaaacagatgagctgcttaaaaaaaaaagaaagaaagaaaaagagctatagaattaggtaaaagatggggaggaaaaattcctaagttgtatactcagtttcttgatccactttatggaattaaaaccggaaactctggactatgtattatagaagttgtttatgtaaaaaaggtgactcagcgaggcacagtggctcacgcttgtaatcccaacactttgggaggccaaggtgggcagatcacctgaagtcaggagttcgagaccagcgtgaccaacatggtgaaaccccgtctctactaaaaatacaaaaattagccaggcatggtggcacgtgcctgtaatcccagctactcaagaggctgaggcaggagattcgcttgaactcgggaggtggaggttgcagtgagcagagatcacaccactgcactccagcctgggtgacagagtgagactctgtctcaaataaaataaaaaataaaacaggtgactcagctctccaatcagcagggccccactcaaaggctggcaaataaatttatgtgtttgaaacttaccataaaacattttatttttataatttgcctctttaaccaatcgctcaattaactggcaaacttgcagtccccatcatgccagataaaagggctttttctgtattttaagattactgaaggccgggcgtggtggctcacacctgtaatcccagcactttggaaggctgaagtgggtggatcacgaagtcaggagttcgagaccagcctggccaagatggtgaaaacccatctctactaaaaataaaaaaaaaattagccgggcgtggtggcaggcacctgtaatcccagctacttgggaggctgaggcaggagaatgacttgaacccgcaaggcagaggttgcagtgagcctaaatcacgccactgtactccagcctgggcaacagagtgagactccgtctcaaaaaaaaaaaaaaaaaaattactgaagcttaaattctgaattaggtatgtcttcatatatagaaaatttttatgaaacgtcagatacaggcgttaccaatcccaagctgaggtctccataaaaacgttaagcggtgatggctctccagggccctaaaggctctgatgtgtactgtttgccaattttcatgccatagatattctcaccatggctgatttgaagctaccaatgtgacaccactgaacataaaactgggaagaaatatgcacaatgggctccaagtcagcactggaggatcttcaagaaagtagatccatgtgggaagaagtatcatgaaatctgtgtgtggaacactcacatgagatgggatggacaggccacactgacacaccaccacaccgcttgtgattctcaggttgtacctagaagcagaattaggatcccagagcatcatggccaccagacctggatctccaaaccttgaatttcaggcaacaaatctggggggagattccactcaccttggagtggggaatgggaacgaataatgctgaaaaggttttaaaaactcttactttgtacatacaggacagatgagtgggtttgcctcccactcagccagcatgatgctgagacacttttcatcaaactgcaagctcttctcatactcgctgatgatggactgctctgcaaggcaaaggcagttggagggcttcaccatgcttcagctggccctgtatttaattctaaacttcactgtcaaaggcttccttcacacgagggaaagatttgggcaagaccacaataccaatgactggtttttatgctctctcaggctggcttcatcttgctggattcctctccctcctctctgtcccctttttgtgagcacaagaggtgaagtaggctaagggccgaggagacaattttcacacacatctccagaggccataggagcacagatacagaatgtcagggtcccacaggcaactaaataaagttgacaaagagaactgattgctggccgggcacggtgactcacacctgtaatcccaacactttgggaggctgaggcaggcagatcactcgaggtcaggagttcgaaaccagcctggccaacatggtgaaacccatctctactaacaaacacaaaaaattagccaggcatgtggcgcacgtctataatcccagctactcgggaggctgaggcagaagaatcacttgaacccaggaggcggaggttgcagtgatccgagattgcgccactgcactccagcctgagtgacagagcgagactctgtgtcaaaaaaaaaaaaaagagagaactgatttctgatgccaggacgaccctgctgattccacatacttggaatctgtgttgttcagaatctgtgtgctcattcattcagcaaacatacaacagtacctagtatctgctagtcacaggggcacaaagatgaaaaagactgtcattgttgagctcacagtctagacattagggaaggggtcaaaaaactacagtcacgcttatttgtttatgtagtgtctataactgcttttccactagaactgcagagctgagaaattgtgccagagaccacatggtctgtgaagtctaaagtatttgctatctggctcttcacaaaaagtctgccaacttctgctttagaatgttccttatggctgagtacagcacaacacagtaaatccttgtcacttcagacttattagttaagtatgccccaaaataaaacatttggtcaggcttatgtttcaccactaagataggttttgtaggtgggggaagggaaaatcaataaaaaaagatgataacttaaggaatttacagtctaaccagagtcgacagcaacagtcattaacaactaacacttgcatggcacttatgtgtcaaatgctattttaaattccttacatatattaacttcttcactattattatccttatttcaaaggtgaagaaactgaggcacggggaaattaagtgctttggtcggtgccacacaaattaaagtagtaaagccaagtgaatgttagaggtatgactcaagagcttgtgctcttgcctcaccataataatagctgttgattattgaaagctctctatatgccagacaatgcactaagtcttctacacacgttatttaagccttacaacaaatttatagggtattctctccattttataggtcataaaaatgaagcctaaggctgggggccatgcctcatgtctgtaatcccaacactttgggaggctgaagtaggaggatggtttgagtccagctgtttgagaccagcctaggcaacatagtgagaccctgcctctacaaaaaaatttaaaaaattaggctaggcattttggctcatgcctgtaatctcaaaactttaggaggctgaggtggggggatcacttgagaccagggaggagttcgagaccagcctgggcaacacagtgagaccctgtctctacaaaaaaataaaaaaattagctcggtatggtggtgcacacttgcggtcccagctactcgggaggctgagatgagaggattggttgagcctaggaggatgaagccacagtgagccatgattacatcactgcactccagcctgggcaacagagcaagaacctatctcaaaaaaaaaaaaaatacataaataaaataattttttgtcttgtttttatcatctttagctaaaaaaaaaaaattaataaaaaaaaattagccaggggtggtggcacacgcctatgatcccagctattcagaaggctgaggtgggaagatcgcttaagcccaggaggtcaaggctgcagtgggccgtgatcacgccactgcattccagcctgggcagagaccctgtctcaaaaaaaacaaaaacaaaaaccaaacaaggcctaatcaaatcagggctacatggaataaatgacttaactatataaggtacaaaattatgctctctacaccatgctatggacacctccctcaaggagtggatgctcacaggccctggggagttaatagagaatgtggcacttaaaatgaatagggcaagggatcagaccatgcactatcactgtatcctgtaaaatggcaggtttacttttttttattttattttttaaagtgacagggtctccctctgtcagccaggctggagtgaggtggtaaaattatagctcactgtaaccttaaactcttgggttcaagtgatcctcctgcctaagccttctggctgagggaggctacaagtatttgctaccacacccagataatttttttttttttttttttacttctgtagagacaggatcttgttatgttgcccatgctggtcttgaactggcctcaagcaatactcctgcctcagcctctcaaaatgctgggattacaggcataagccaccaccctcagtgaactattaacccattaatagagaggcaggatggtagaagaaacatgggaactggattcatacaactgattttgcttcccatctcctccacttactagctgtatgacctgcacgagaacaccaaccaccttctgttctaatactactatcttacagggcagtcacatggagaaaacagcatcattaaatgagaagttcttagcacaaggtctagcaccctggagacccttattattgagaagctagacagccaagatgtcagagtacaaaaggagtcttttggacacttgactgatggaggtagacaaaggggacttataaactaatcctgattggaggaaaggtcacagtattccagtagctaaatacaggtaaggaaggactaccactaggggttaccttggttgatcagctcctgttgaatttcctccagcacagccatgtctatcagctcctccagctggaagagaaaggagcggcatcagaagtttgaagtattaatcaccaaccaagccccacagtgattcatacttggaggctggcttgaagaacccagatttattggacaaaatcagtccagtcctcctgcagaatatgctgacagtggggtaatgctgtcatgctgacaagccatcaacaaatgatccaactatccagtgacaaaataatggtacccaattttggagagacgatatagggtagcagttaggtacatattcttccaaggctacgtaaccacatgaaaagttcctaatctctgcaaatctcagttttggcctctgtaaagtgggaataaaatctatctaagagggttactgtgagtactagttgtggtgatataaggcaaacattggtgtactgcaggacacacaaaagccactgaataatgcatcattattacacagggtgttgatggtttcaaacagttgcccacattttcttacacagtccttacaatgctgaaaacattatcttctcattttataaatgtgaaaactaaacctcaaagaggcaaactgaagttaacagtcaatagccaaaccaggatttgaattctggaactcctgacttcgaatccagtgttcttcctgatacactataaatggttttcccttccacacatggctgccaacgttggctgagattagaatcggaaagtttctggagacctttttagaaagagattcctgacgtgggcagatcactagaggtcaggcgttcaagaccagcctggccaacatggtgaaaccccatccctgctaaaacagaaacaaaattagccgggcatggtggcacacatctgtaatcccagctacttgggaggctgagacaggagaatcgtttgaacccaggaggtggaggttgcagtgagccgagatcttgccactgcactccagcctgggcgacagagcaagacagaaaaaaaaaaagagcgagagagagggagagaaagagattcctagcctatgcctactgaatcataatttccaagggtggaggcaagaaatgaaatttctttctttttagtttcataaatgatgatgttgcagtgatgagcaggtctacggtctggtatttcagaccatttcatctagacaagtctaacattaagtgtagaaaagcctgggttaaaggctgttgaattctaaatggggttaggggaatggtgggtttagaggactcaagtaaacaaataaaagaggacacgagccgttcttggtggtgcagtccccctccctgaaaacacatagcccagcctgacctgagccaagtcttctggacaattctccactgactgcaaagcattccactcttcttccatcacctcttgaactagaaagctgttctgagaattccctggcccactgcttccagcctggcggtacctgtttaggagcctgtcccggctgtttctcattctctccaggcatctctgggaaaaaagagcaagattgggggggaaaaaaaaagcatttctatttttaaaaaacactcttacattagttgagaaaacattaaagaaagtttatagacacaaaatttcaatgataatactaactagtgttacttttgcatattcctctgtagagatacataaaattacaatgctttgtacacgtatttacaaagaaccatattttttattctagcttgccagtttccttaatggttgtgtgcataatatctcagcatccaatgtcctattacagaacatttatattccttccaaattcttgctactctagatatggctgggtaacggccttcctgcacagcagcgtttctgaactcagggaggttttgtcccccaaggaacatttggcaatgcttggagacatttctggttgtcacaattctagttataggactattagcatctagtgggtggaggcccgagacgtggcttaaacaaccctccacaacatataaatatctccctcaaaatgtccattgtcaaggctgagaaactctgctgtatctgctatctttcttgcgtcgggttactttcttggacattacttactaataaccacactgtgttcagaagaggccagaactgaggtggagccctcttctaagcctcattttactactctctagaatagaaatcatctctatctcacaagacgaacgtagacaaagtgcctctctcggtggccacctccgcagcaacagtaggtagtgttattgcagaggtgcaaacggtgatgtcctgaccacaatttaaattcaaaacaaaatcgaatccaaaaacaaggctttctaggacttgaccgacccgggctaatcccacactctacagtcagcaggcctgggtttgaccagaccaggcgcgctgcggcacctgctccacggagcagggctaaggcgaaggcagggaagacggcggtcaccgggacgatctagggtagaccactgcacaaaccccatacccacctgccggaaagcctctttccaaggcggcgagcccaccagtttgtacagggagcggcgcggagacctcaacgactccgccatctcctcttcgcgggagacaaagccacaagacccgttccctggaggcgcgcacagacccctgggaggtgtactttccgggtgcagaccgcgaatggatcgcagcgtattctgggaagtgttgttttatcgaccggccccacgtggagacagatttaggcatccaagcgaaatgcgtgaggccagcccgacctgcactgagggaggtaagtcttgagggaaagttctggatgcctgggtttacccagatggaggtgtccaataggcaattagatacacaagtctcaggctctccccaggtgctagatttccagcagcaccaccattatgttgacttctcgtcccgcccccttgggcttcagaaataatggtgattggctttcccttggtgacgcccctgcttggtgggctggcctcgccttcgccccccgacctggcacgagcctctcgagcttccgggccgtctgctcggtgattggccgaaacagtgagtggacggccgcggattggctgtgctcagcggcgggctgagcaactggagtgaggggagcagttgggccaagatggcggccgccgagggaccggtgggcgacggcgagctgtggcagacctggcttcctaaccacgtcgtgttcttgcggctccgggagggactgaaaaaccagagtccaaccgaagctgagaaaccagcttcttcgtcgttgccttcgtcgccgccgccgcagttgctgacgagaaacgtggtctttggcctcggcggagagcttttcctgtgggacggagaagacagctccttcttagtcgttcgccttcggggccccagcggcggcggcgaagagcccgccctgtcccagtaccaggtaatgccaggccgatcttggaagtgaccctcaccgggatcggaaccagtcttttttgttccttgctcctcttggctgtttttcatcttgtggcaggcgttccagcggattgactccgacgctgccatacgcggtcgcggggactcaggctctctcgatgcttacggcctggaggcctgggaggaaggaaagggtcattgaatattcaataaaaatactagtgacggatgagtgctctggagaaaaacaaagcgggctaaaggggttgagaacgagtgggcggagttgctatttttagtttcgtcgagagaaacctgtttcctgatgtgacgcttataataggttagatcgtaactttctcttgcgttgtgcacagcaagtcaggttgcaggtttcaaagcaccacgcttcatgcttgacatggaggaggaagtctctgttaattcttacccccgtaacgcccgctttagaaaataaagccatacccaaaatggggatttttgtttttgattagccgacagcatgtgaaaatgggtgtgatccagaaagtattacacacttgccgtggtcaaatattggtttatggaaatgtttatttgtaatacacagattctcttaaagatgaaaaagagcttggtactcattctaaggtatgacatctgttgtgtgcccggtccaattcttgttaccgagaagtgatttaattttaataagacgctagcaatgcttctgcagttttgaaaatagggcaggagtctacagtctacttatttacccaatttcagttaaaaagaattatgaaggccgggcgcggtggctcacgcctgcagtcccaacactgggaggcagaggcaggtggatcacctgaagtcaggaattcgagaccagcctggccaacatggtgaaaccccgtctctactaaaaatacaaaaattagccaggtgtagtggcgcgcccttgtaatcccagctactcaggtgcctgaggcaggagaatcgcttgaacctgggaggaggaggttgcagtgagctgagatcacgcccctgcactacagcctgggcaacagagcaagactgtgtctcaaaaaataataataattaccaaatgtgcagcacgcagtattctaataacattctatactgctgtgtagcatttgacataatcataacttaattatttataattattttgtgtcttttttttttttttgagatggagtttcgctcttgttgcccaggctggagtgcaatggcgccatctcggctcaccgcaacctccaccttccagtttcaagcgattcttctgcctcagccccccccgcgagtagctgggattacaggtatctgccaccacgcccgactaatttttgtgtttttagtagagacggggtttcgccatgttggccaggctggtcttgaactcctgacctcgtgatctgctggctttggcctcccaaagtgttgggattacaggcgtgagccactgcgcccggctgtttttgttttgttttgttttgaggcaggatctcgctctgttgcccaggctggagtgcagtggtgcaatctcagctaactgcaacctccacctcatggattcaagcgattctcctgcctcagcctcttgagtagttgggattacaggcccactccaccgtacccggctactttttgtatttttagtggagacggggtttcaccatgttaaccaggctgatctggaactcctggcctcaggtgatccacccgtcttggcctcccaaagtgctggcatttcagccgtgagccatggcactctgcctctgtcttcttttctagactgtaagctccaaggcaggggctgggtctgcccttgtcattttttaaaaacgtattttattttttatttttgaaatggggtctttctctgttgcccaggctggagtgcagtggtgtgatcacggctcattggagcctctactgtcaggggtcgagtgatcctcccacctcagcgcctggaagtagctgggactacaggcatgtgccaccacgcctggctatttacttatttttgtatgtccagcatacagaaatgctggagtgcccagaatttataagctttcagtaaatattggtgactatctcaataaccttcactcctccaaaatctcaaaaccttagagatggggaagaaagcagcttatcatgagttgtaactttggatgttaaaagcaagcatgagtaagctgggtgtggtagctgtagcctataatcagcactttaggaggccaaggtggaggcaggtggatcttgtgagcacgggaacaggtgttcagaccagcctgggcaacatgacgaaacccccatctctacaaaaaaaacctttttaattagctgggagtgatggtgcacacctgtagtcccagctcctctggaagctgaggtggggaggacacttgaacccccatagtaaagtctgcagtgggctgccactgcactccagcctgggtgacagcaagactctgtctcaaaaaaaaaaaaaaaaatttgtgagttaatggtacaagtgtgagtacttatccagagttttattatcctataattgtagtaaactaagtattactgtgatttcaagtaactgccacctatatttaaattaaaattaactatgttgactggtttgctctaattttcagagattgctttgcataaatccacccctgtttgaaatctatcaagtcttgttaagcccaacacaacatcatgtagcacttataggaataaaaggacttatggtattagaattacctaaaagatgggggaagaattctgaatttgaaggtggaaaatcaacagtgaattgtaggtaagttgtatactatttatctgtataatttattatatatacagaaaattgttcaagactagtggttcttaagcatgtttagtatactactcttaaaacattaaaacactcctcgtggtctgcagactggcttctgtgttatcaatgttcatagtatatgtgtaattgattgtactttattctgcctgaagtaccacgttgctgtctcatttgaggctaggccattctttcgattaggtagaagtaagattttgtaaaaccagttatctgtcagccagaagtttgccagaagtgtaagtattttatgtgtgtgtgtgtgtgtgtatgtgtgtatatatatatatacttttttttttttttttttttttgagatggagtcttgctctgtcacccaggctggagtgcagtggcacaatctcggctcactgcaagctccgcctcctggattcaagcgattcttctgcctcagcctcccgagtaactgggattacaggcaagcgctaccatgcccagctaatttttgtatttttagtagagacggggtttcaccatgttgaccaagctggtcttgaactcctgacctcaagtgatccacccaccttagcctcccaaagtgccggggttataggtgtgagccaccgcacctggcctatttttatataatttctttttcaacaaatccagaaaagtgaatctgaaagatctactgaaaagagtacagatgcttttcaacttacgattgggttatgtcccgataaacccagtgtaagttgaaaatggatttattgctgacaacacagcagaggatccccgatttaggatggttcaacgtaggatttttcaacattatgatgggtaaccccatcataagtcgtaaggagctcctcagtttatgttggcttatgtactggtaaacccattgtaaagttggggatcatctgtataaggtagaaactgcttttagctccgcaacttataagttgagtccccttaaactgtttaccttctaaatctgtttcctcattttaaaaataggattgataatatctgcccttgtaatttccttacagggttagtaaaaagatcaaatgagatactatatctgaaaacacttgtactgtataaatatgtatcaatcctaagtcaaaccatcctaaaatgtatatatacgtatgaaatatgctataatttggagccaggcacgatggctcacacctgtaatcccagcactttgggaggccgaggcaggtggatcacctgagctcaggagcttgagaccaccctgggcaacatggtgaaacctcatttctactaaaatacaaaaaataagtggggtgtggtggcacacgcctgtagtcccagctactcaggaggttaaggcacaagtattgattaaatccaggaggcggaggttgcagtgagcaaagatcacgccactgcactccagcttgggccacagagtgagacttcatctcaaataaataaacaaataaaatttaaataaataatttaaattattaaaataaataaattatttatttattttgagacagagtctggctctgtagcccaagctggagtgcagtggcgtgatctcagctcactgcaacctcctcagcccgggctggagtgcagtggcacaagctcagctcactgcagcctccacctcctgggttccagcgattcttctgcctcagcctcacgggtaacgggttacaggcatgtgccaccacacttgcctaattcttgtatttttagtggagacggggttttaccatgttggccaggctggtctcaaactcctgacctcaggtgatccacctgccttggcctcccaaagtgctaagataggcgtgagccattgcgcccagccagtgtgctataatttagaagatatttttatttcaattctttgatattgattgaatagatgccttgaatgtcctctcagcatgatttcagggaaataaatctgaaggaaagagaatcaaagagtgttaaaatagaaatttcttcagggcctggcgtggtggctcatgcctgtaatcccagcactttgcgaggccgaggtgggcagatcacctgaggtcgggagtttgagaccagcctgaccaacatggagaaaccccctctctactgaaaatacaaagttcgctgggcgaggtggcaggtgcctgtaatcccagctacttgaaagactgaggcaggagaatcacttgaacctgggaggcggaggttgcagtgagccgagattgtgccgttacactccagcctgggcaacaagagagaaactccatctgcaaaaaaaagaagttcctttagaagattttcatccaagttgtacaaaatgttttggaaaattattatctttattttagtaccactccagttgcggagagatttttcaccagttccacctctctgactctaaagcatgctgcatggtatccaagtgaaatcctggatccccacgtagtgctgttaacatcagacaacgtaatcaggtaaattttatttctctctcttgaagccttgcgagtgggaaagctctgtttctgtttgccaattaacagctcaacatagaacgaagtgagtcattgaatgagtcagtgcttttattggatggctgttgtaacccattctcaatcataagaattgcctaactgctctaacttaccactattccttctcaactagtcttcctgcctccaggtatctcctctcctaatctgacaccttagaataatctttccaaaactctttcatcattgtcacccttttggtaataatgtagcataaaggaaagagaatgtaagtgtaaatttagagatttgaattattgtcccacctccttttctgttatctttgagatcttgagctttttaggggttggggggctcagtttccaatcttttaaattgagcaggtttgattcaatagtttctaacgccccttccaagctttgcactctatgattaaatgccctaatgctacgtagatttctactctattatcagctaactttctggatcggccttatgtaaaaagttattggggggactcagcagaggtacagataccttcagttttatttttcgtaatcactgcttttaactgtgctctactaaatcttccttcactgctgaatgactcaccccttaatgatgtcttatacagatccccatagctttctcgttacttctagttatgaaaacagtgtgtccagtttaaaactcatcttggctggttgcagtggctcacacctgtaatcccagcactttgggaggccgaggtgggaggatcatttgagcccctgagttcgagaccaatgtgggcaatacagtgagatcctgtctctgcaaaaaaaattagctgggcataatggcatgtgccggtagtcccagctactcaggagactgaggtaggaagattgcagcctgggtgacagagtaaaaccctgtctaaagaaaataagaatgtcgaaagctatttgatctcaaatctttcacaactatgtcctggcccttttgtaggtcagacctgtgttttgtgggatcagaagtgattggagagtgtgcggtctgctctttcactcttcctgttatcccagcactttggaacatagggtgaagtgtaaggaatgggctgccccctccttcctccaaatctaactccttcagtgtggggtaggggagtgggacaggtgaggtagagatcttaccgaactggtagcctgtgagtgatggggaagtatgcctgatcttgtttgaatctcgttccatctgtcactagtgaactctgttgatgtggtagtctctgcatagatggtgtgtttgtgtgtgtgtatgtgggggggtggggtggtgttggagggcagtgttgaacttccagctccccccatcactgaggagctctggctcccattggctcctgtcagttctctatgccctgaatcttctctcaagatggggtacagtatactttatctgcagggtgtgtgttccaagaccccccagtgaatgcctgaaactgtagatagtactgaacgtgatacgtgtgtattgctatgttttttcgatcttataactgagacagctactaagtgactaaggggcattcagctaggaaatgcaccagtctcccttattacaggtacctccacatctggctgtttcctagagccttccctgcccacccatttggctttagagttcagggcagagaaagaggagagggaaaatcttcccattacaaacattatactgtactcctaaggaatctttgacatcctctcttcttagtcttccttttatatgctatgatggaaaaggagatggtgggaagatagcataggtacagttcttaagccccaaaggaagtatctggccccaaatattgaaggttcttttttaaaatatgtggtatttaacacttctgttttcctaagctttggagattttgggcagtttcagagcaaaaggaaattttcaccgaatgccctgttgcaccttctttttctttcactgttccccagtacaacattattgcctagtatttatgtgtattttgaagttagtaacgcttgtaggaacctaggaagactgtaataaatgtgtattcaaatggatcaagttatcattaaaaatttattaaatacttaatgtggcattttattgatattggaagaaaccaagttaaaaaattcttagtggcgtcagacaaaataagtgattataagggacactggatttctaaaatgacattactggccttttgaaaattccctttttcacaatagccttatatgctgtgaaatgtaggttactttaaattaaaataattttggttaaaaaaattcagtattatactttcccttgaaaatagagatgatacgatactgggtttgtttgtttggtttttttttttttttttgaaatggagtctcgctctgtcgcccaggctggagtgcagtggcgtgatcttggctcactccagcctccagctcaccgcaacctccacctcccaggttcaagtgattctcctgcctcagcctcccgagtagctgggattacaggtgtgtgccaccacacccaaataatttttgtatttttagtagagacggggtttcatcatgttggccaggctggtcacgaactcctgacctcaagtgatctgctcacctcggcctcccaaagtgctaggattacaggtgtgagccaccgtgcttggccaatattgggtttttatataacaaacacataagtagatttgcaggctaaatatcactcactctgtcagccagttggcatataaagaataagatacagttctttctctggtgggatttggtgtccaataggcagagatagatgtgtgtagttgaaggaaaactggcaagcttaggggcaatagtgagatgactggacaaggcgagtatagctaagggctcaggacggaagtgacagaggtgcgatgttatggaataggctgttaaagggtattggtaaggatagagaacatttcttcaggccccaatgaaactcccttatgtagttaaagaataaatgaactagactactttgcaacagcaagatttttgcaaagaaatagttgtgataagtgttagaaaattctcaagaactgactagatggagaggaaagtgcagttttgggaaatgaaaacagaattttaagtgctggttttcttctcttttggttgctagaatttactcactacgtgagccgcagacacccactaacgtgataatactttcagaagccgaagaggaaagtctagtactcaataaagggtaagtttttatttgagtcttgaaatggttttttaattagcttattgggattataaatgcaattttaacaggttgcaaggtttttcagaggtgactagcatgcttttggtaatgtgagaagtaagtgtatttttagtagaacagggattcgtcgtgttggccaggctggtctggaactcctaggctcaagtgatcctgctcgtctcagcctccccaaagtgctggaattacaggcctgagccaccattcatttctttatcacctttctatgtgataaagaaactaagataatatcttgcattgatgtttgctctctcaactatatgaaattgtgatttcattttaaccatatttgttaactttgtattgaactagaatcttcctgaataactacagtaaattttaaatataaaaacagcatggttttatgatttgccttcttgatatacatgtaatgtatatttgctgtagaaaattgagaaaaatagatcaaagtattaggaagaaaatgaaaatctttgtaatctcctatagctatagcctgtttcaatacagcacccaaagtttaatcacatcattctactttaatctaagtttaatcagatcagtttaatcagatcattctacttccctgctctccataccccattgatttcccagagtctttacctataaagggtccacaggtatgccacctgattgcctttccagcttcattcctccctctgtgccctggctctctgggctccaggcaccttggcctccttgccattccacagacattaagcacttctaccttagagcatttgctctccacctcaactgctccttccctagttaaccacagacttgctctcttacttccttcagatctttgctcaaatatcttatcagagtctttcctataccaagtagtctaaagtagcacctccatcaataccctcttaccctactttatttttcatgatattttctgagtttatgttccatctttatttcttctctttttgtggtatttctctctctagagggcaggacatttgtttaattcactgacatattcccagaccctagaaaagtacctggcacagagtaggtgctttgcgagtatttgtagaacttacggatcctgctgctcagagacaactgttgatgttttcatgtgttttcctgtttcctttttgcatttatgtgtgtgtatataataaatttttgctatttgtatatctgtgtatttaaactatttaagatgagagtagaaccaaataattttatggccagcttttttcacttaatttcatgagaattttttttttttttttttttttgagacggagtttcgctcttgtcgcccaggctggagtgcaatggcacaatctcggctcactgcaacctccgcctcccaggttcaagcaattctcctgccttagcctcccaagtagctgggactacaggcacctgccaccacgcccaactaatttttgtatttttagtagaaacggggtttcaccatgttggccaggctggtctcgaactcctgacctcaggtgatccacccacctcggcctcccaaattgctgggattacaggcatgagccactgcacccagctgagaatttttaaatgttaacattcttcataatcattttttgtcttttcagtccattgcctacaaattccatacatacccacctcctgttattagacattttgtgtttttgttttgttttgtttttctttttactttttgttgtttttgtttttaacaagttggtttttacatctctttccagaagggcgtataccgcatctctaggagagacagcagttgcatttgactttgggccattggcagcagtcccaaagactctatttggacaaaacggcaaagatgaagtagtggcatacccactgtacatcttatatgaaaatggagagactttcctgacatacatcagtctgttacacaggtaagttgaggtggtcacccacctgaaatgaaaactcagtttgggctccagtagatatcattgaggctggacttgggagccatgtttttgagtctgtggaaatgttgcagccttcacatgcttggcttgcatatttttgagaaagagttagtacaggtcatttggcctttcatttcttcatattatttgggtaagttctatagaattcttggataatcacttatgataggcctggatttgtgttcacaaattctagttatccgaacaagtgcttattgtttatcttatatgaacaagacaccacgtaggcgtggtaatctggtatcttatgtcccagttgtggggagaaagatacatacacatgaaaaaatactatccataccacagtattggtacacagacagtaagaaccccgaggaaggagagatcattctgactgggaggttaaggaaattttcgtagagaaggagtggtgtcatgtgtgacttaaaggtctcattcaggattaaatgaagtatcaaggaagagtgagaccatttctgtcaagggcagcataaagtagcgtctgaaaataagcaagtgcaagtgtcattcaagcttaatttattagacattctgggctagagctgaggattcatgtagggagcattaagtgataaagctggagtatctgtcccgagaaaatttgctggaattaaaaatacctcgttaaaagagtgagtgtgggttttttttctgtaggaatagggtagtaggaagccagtgatggtttctgaacagaaggacaaaacaattggttagggaggggactgggacagagacttttaaagaagcttttgcaaaattgagcttgtcatttatgagagtttgaacttgggtggtaatagaacagagggaaaaatgaaacacagtagataacaacaaaggaaggataaataagacttagttactgtttggataagggagtatgccatgaacagaaacaggtcagtaaaggctgctaattgggggagaagatttatttctaagtaaatcagtgtaagatagtattggaccaataaaatggaaatattccatggacagttggaaatacaggatgatgacagacaagaagaattaaaatagaggtatgagaatcatctttcatggtgagagagtctatacaggataagaatttgagggaaaactgcagaggcataaggctaagggctgagcattagagtttattcgcttgtaaatcgacttaacagatacttattcaggacccactctggcagaagatggaaatacaagattgaaggcaaggttcctgccatgtggttccttaactaccagaagggcatacaactaaaccagtaactatagtacagtgtcatgtgctcagggcatcaccgggttcttcaggagtgtgatggagtaaatgagtaggcctgctcatcttggaagactttaaggaaatgctattacaaaagcttgaacttgaaggattcactagacagaatcagaagtgggtacaggagagagaagagagtacgcaaaaccataaagattagaaagatgaaagagctcggtaggttacagaatggtgaggattcactgttgagtgcattctccttggcagaaatgttctctgcctttcacacatgatctcaggaggattttgtggtaactttagtaccttcccttaccctttctcctcttgctgctgagccctcatttgtccaaaccatgatctgcctagtaacgttagcccaaaacccaaaagttttcttcatccttacatttcatcagtcccaaatttctattgattttgtgatttaaatttttcgaaagtatacaccaagcttgtccaacccacgggctgcgcgcagcccaggacagccttgaatgcagcccaacgcaaatttgtaaactttcttagaacattatgatatttgtttgcgattttcttttcttttcttttttttttaaagctcatcacgtattgttagtgtattttctgtgtggcccaaaacaattgttccagtgtggcccagggaagccaaaagattggacacccctgattatacacccttctctgcattcctctgtccctgcttcagaactgcatcatctgcctacttcaccatctgcctggcttattttcttaaatagtttccccaaatcccattttggacccttccatgtcttcctccctaataccagactgatttgtaaagtgaggctccatcgcttgatttaaacctctagtgatatactgttacccggcagatagatttcaaatagtttaacatagcacacaagactgtgtacttcataagccagtcctggatgtctgtctagctattttgccgttgccttccaccttgtactttgcctcccatcatactaaataagttttcttgttcttagttctttgtctttcatgtttccaggactttgcataaactgatctctagcttggaatgctcaacaatccccttcccagaaatcattctttctcatttttctcatttattttttatagctttcttcattatctttgtatctttttgtcattcctttgtacaccataaatccttctgttgttgcacttatcacatggtatagtaattctggttaaatgtctgcctcatcaactaaaccatcattcactgggagtatcatctagcactcaataataagtatttgtcaaatcaaatttaatatggggatccaaagccttgaagagaagctacattttagaagaaaggatttggtagtctttgaatatagatggtagttaaaacgaggcatagtttaacaggctctcatttaagtgtgtattttgaaaaaagtcaaagcatacaacagaatcctggagaacaccaatatttaagagacagaaattagaaaaggacgttagaaaattgtgtttaaagaggtaggaagagagaactacaagaaagaattgttacagctgttgagtagcagtagtcgttaaccagtgataaatgcagcagaaggttaagtgcattttggatttagcaaatctcacaggtgacctttgccacagtagcttcagtggagtggtgaaagcataaaccatagtaaatttagggcaagggttttcaacctttgtactattgacattttggtctgaattattgtttgttttagaggtgctgtgctgtgcgggaatgtttagcggcttctgtctagcctctaaccactagatgctaatacctccccccacattgtgacaaccagttgtgacaagccaaaatgtcttcagacattgccactgtccgctagggcaaaattatctctggttgagaaacacagagtggtgggatctgagtgggaaagcgagaagatggagtattgggaatacactacatttataatgaaggtatgatagctggaggaaaacaaagtcaaagaatggttttatgggatgagcatgcatactgtcaacatttcccaaatatgtttttactccttctttagccctggaaatattggaaagctgttgggtccattgcccatgcatcctgcggctgaagataactatggttatgatgcgtgtgctgtactctgcttaccctgtgtccccaatatcttagtgatcgctactgaatcaggaatgctgtatcactgtgtcgtgctagaaggggaagaagaagatgaccacacggtaagtgcaggctgctgtggttgtttgtatcttcaacacctggcatagttcctgacccaatatgaatgcttaatatatgagaaggaattttaacttacttatggaacttctgatattttggaaattaaacagttaaaaaagtagctgaagcacacttagcagtctaagtggaaagaagttagaaggttgcccaacttacttggtccaccagtctgcatgttactttctggtctctatattgcaatcttcagggacagatacaaagagccttggaatcactgaattggcttttttcacaaacatcttcctaaaggaagagagacgttttgtcttcagaataacagtgcactgttaggatagaggtggaattaagaatttgaaagtactgtttgacccagcttttttttcaatttttttatttattttttattattattttttggagacagagtttcgctcttggtgcccaggctggagtgcaatggtgtgatctcggctcactgcaacctctgcctcctgagttcaagcgattctcttgcgtcagcctccccagtagctgggattacaggcacccaccaccacgcccggctgatttcttgtacttttagtagagacagggtttcagtatgttggccaggctggtctcgaactcctgacctcagatgatccacctgcctcggcctcccaaagtgctgggattacaggcaagaacagccgcacccggccctgacccagctttttgcctgtttttaattgtgtacattttcaaattaacatgcaagatcaaaattacaacacttttttttacagtcagaaaagtcctgggattccaggattgacctcattccttctctgtatgtgtttgaatgtgttgagttggagcttgctttgaaactggcatctggagaggatgacccttttgattctgacttttcttgtccagtcaaacttcatagaggtaagctcttcaataaatgtagtgcttttttcccatgatttttatactaagactatcatagactgttcctatgtaatgtatttgttctgtggttccagcctttaaaaagttgactgggttttttttagctttttagtcactatagtacactttttgtctaaggcagactgagcaaatttcccaagttttaaaatagtggtctttggtccagatcaccagattcctaatagtgaatttttcctggtcctttcaaaagtagaactaccatgttattcagtagttccactactgggtatgtcaaaaggaaaggaaataataggttgaagggatacctacactcccatgcccattgcagtgttattcacaacagctaagatgctgaatcaacctgtgtccatcgacagaccaaatggattttgttgttgttgttgttgttgttgagatggtgtctggctctgtcacccaggctggagtctaatggcgcaatctcgactcactgcaacctccatctcccaggttcaagcgattattttgcctcagcctcccaagtagctggattgcaggtacccaccaccatgcctggctaatttttatatttttatttcatttattcatttattttgagatggagtctcgctctgttgcccaggctgaagtgcagtggcaccatctcagctcactgcaacctccgcctcctgggttcaagcaattcttctgcctcagcctccctagtagctgggactacaggcatgtgccaccacgccctgctaatttttgtatttttagtagagacgggggtctcaccatattggccaggctggtatcgaactcctgaccttgtgatccgcccacctcgacctcacaaagtgctgggattccaggcgtgagccactacgcctggcaatttttgtatttttagtagaggtgggatttcaccatgttggccaggctggtctcaaactcctggcctcaagcagtccacctgcctcggccttccagaagtactgggataacagatgtgagccaccgcgcacctggccccaaatggatttttaaaatgtggcattgtatacacagtggaataccatttggcttttgtgtgtgtgtgtgtgatatgatctcactgtgtcatctaggctggagtacagtggcgtgatcttggctcactgctttgcctcccaggctcaagcaatcctctcacctcagcctctggagtagctgggactacaggtgtgcaccaccacgcctaatttttgtatttttggtagatacgggattttgccatgtcgtccaagctgaaagtcctgagctccagtgatccttctgcctcagcctctcaaagtgctggtccacaggtgtgaaccaccatgcccagccctatttggctttaaaaaagaatgaaatcgtgtcattcactgcaacataggaggatttcaatcttgtagcagtttgacctactctccttacagttcttgttagccagtttgcctagttctggtaataacggcctcaactctgtactaaagtataggcaaaacatttaagggggcagaattccttacataacaaaccagcaaagagtgtacattgggtttgtctaattaaggtattttgagatttatattgtctaagaattttatagatgaggaaacagaccaaatgaagtaaagtgacataaactaattggtttcctcatatagatacgtatatctttgggaaatcttaagtgtagacgtggacgttttgttcttgggttttgttttttgtattttgttttttgtttttttttttgagatggagttttgctcctgttgcccaagctggagtgcaatggcacgatcttggctcacttcaacctccgccccctgggttcaagcgattctcctgcctcagcctcccaaatagctgggattatagtcatgcgccaccaggcctggctaatttttgtatttttagtacagatggggtttcaccatgttggtcaggctggtctcgaactccttatctgtccaccttggcctcccacagtgctgggattttaggcataaaccaccatgcccagccttttcttggttcttctaatgagagtaacattttcatatgtgaaactaagaaatttttgacttgttcctaattgtgctgaacaaggcatattataatcactgaggcacaccagatttcttagtgacaaagtgaaatggctacagtatagcatagggtggtatctaacaaatttcctgttaagtaaatgttggctctttttagtaatcaatttgttttacaccccagtgttaagacttttctgttgatgttagcactacaggttttgaaaagccattttaacaatgttagatttaatgagatgatttgagccttaagtcttaaaacatacgcaaatgaaaagaaaattttcaatattttaattatgcaaacagatgattcccatagatgagggttttttaaactttttatagcagaatgctgttttctaagatgttttatggaacctcaatatataagacagaaaaataatatatcagctttagaatattaatttatgataaagtcactaaccacaaagtgagactgttagattaaaggaaaatttaatttaggggttttatgggttattgttgccattttatcagctttaatatataccttatctctgtattttgttttagtttaataacattattattttgtgtttttttttgagacggagtttcgctcttgttgcccaggctggagtgcagtggtacaactcggctcaccgcaacctccacctcccaggttcgagcgattcttctgcctcagcctcccgagtagctgggattgcaggcatgtgccgccacgcctggctaattttgtatttttagtagagacggggtttctccatgttggtcaggttggtcttgaactcctggcctgaggtgatccgcccaccttggcctcccaaagggctgggattacaggcgtgagccaccacacccggccaataagattattattaatattaataataaaaatattgagttacagagataaatatttatacataataataggtattcagtagtttatcttttagtctcaggattgtcttactgatactggggctcaaaggaggtacagaaatttttgtttcaaaatcagttaattaaaattgtataacaactactcatacttcttagttataaatgattgtcaaacaaaaagagcatccaaaactgaaaataacctttgaaactatctgtaagtcaacattatgaagacatacgaaacttcacttctcatttcacaccttactacactgatagaactgttccctgagccgttgtgttaaagtcttttgtgataactatgctgtagaagtgcatttgcttcaacaattttatttaagtcgatgtatgcaagcataagcataggttttctacagagctgctattttaaccaccattttcttttgaagaactaaataaatgcacagagaaaagcataaatgagttacttgccagcaagtatttatgttttggtgaacctcattgtgttcatatttagaaaataacatttggattgagttttttttttttttttttttttttgagacggagtttcactctcgcccacgctggattgcagtggcgcaatctcggctcactgcaacctccacctcccgggttcaagtgattctcctgcctcagcctcccgagtagctgggatcacaggtgcatgccaccacggccagctaatttttgtattttagtagagacgggttttcaccatgttgatcaggctggtctcgaactcctgaccttgtgatcctcccacctcggcctcccaaagtgctgggattacagacgtgagccaccacacccagccattttttatactttttaaaacataggcatacctcctcattttattgtggttcacagtgctttttttttttttttttaacaaatgaaagatgtggcaaccctgcatcaagcaagtctatcggcaccatttttcaaacagcacgtgctgtctctgtgtcagcattttttagcaataaaaaatggttaaggtatgtacatattttttgacgtaacactattgcgtacctactagtataaacataactttctgcatagtgtaaacataacgttcttatgtactgggagaccaaaagatttgtgtgactcactttatttctgtattcgctttattgcaatggtctggaaccaaacccacagtatctctgaggtatatctgtacttaaaatatatttgaaatttgaattcaaattttaaaatttcaaaacccctaacaatatgaaagtcttttataaaaccttccatcaacaaatgcgtttgtaggctaatgtggagtagccaacaaatttgaggtaaatttttttagttatccactggctacctttgtatcattaatcattccatttgcagatcccaagtgtccttcaagatatcactgtactcatgaagctggtgtacatagtgttgggctaacttggattcataaacttcacaaatttcttggatcaggtgagtttactaactctctgcacttttaatagatttcagaggaaaaatagatttaatagatttcagaaaagtagtttggaatagaaaaatgatagagaaaatcagtgaaaccgaaaggttctttgaaaagatcaaccacatttcacaagcctttagctagactaactataatcaagaataaaagcagggatattactattgaccttacagaaataaaagattataaaggaatattatgaacaaatgtatgccatttacataatctagatggaatggacaaattccaagaaaaaaaaaaactaccaaaactgactcaatcagggtctgggataatttgctttaaaaaaaaaaaaaaaaaaaaggccgggtgcggtggctcacgcctgtagtcgcagcactttgggaggccgaggtgggtggatcacaaaatcaggagattgagaccatcctggctaacatggtgaaaccccatctctactaaaaatacaaaaataaattctccgggcgtggtggcgggcgcctgtagtcccagctactcgggagactgaggcaggagaatggtgtgaacctgggaggcggagcttgcagtgagccaagatcacgccactgcactccagcctgggcaacagagcgagactccgtctcaaaaaaaaaaaaaaaaggctgggtgcagtggctcatgcctttaatcccagcactttgggaggccaaggcgggcggatcatgaggtcaagagattgagaccatcctggccaaccaacatggtgaaaccctgtctctacttaaaatacaaaaattagctgggtgtggtggcacacacctgtagtcccagctactcggaaggctgaggtaggagagtcgcttgaaccagggatggaggttgcagtgagccgaggtcatgccactgcactccagcccaggcgacagagcgagactctgtctcaaaaaaaaaaaaaagttaggccaggcacagtggctcacgcctgtaatcccagcactttgggaggccaaggcttgtggatcacccgaggtcaggggagtttgcgaacagtctagtcaacatggcgaaaccccgtctctactaaaaatacaaaaattagccaggcatggtggtgtgcgcctataatccctgctactctggaggctgaggcaggagaatcgcttgaacccaggaggcggagttgcagtgagccgatatcgtgccacagcactccagcctgggtgacagagcaagactccgtctcaaaacaaacaaacaaaaactgacacaaagagattgattagtaatcaaaactatccaaaaagaaaagctgaggaccacatggattcacatttaaagaattaataccggtcaggtgcagtggcctacgcctataatcccagcactttggaggccgaggcacttgaggttaggacttcaagaccaacctggtcaaaatggtgaaaccctgtctctactaaaaaaaaaaatacaaaaattagccaggcatagtggcggatgcctgtaatcccagctactcgggaggctgagacaggagaatcgcttgaacctgggaggtagagactgctgtattcgagtcgagatcacaccactgcactccagcctgggtgacagagcaagactccatctcaaaaatgaaaataaaaaataaattaaaaaaaagaattaataccaattattcacagagtgagagcagttaaaaaaaatctagcagcctttcatgttaaaaatactcaacaaacttaatagaaaggaacttcctcaaactagtgaggaaacttttcatctacaaaaaacttggaaccaacacaatgcttaatggtaaaaagactgaatccgttattggctttctactgctactgttgtaaatcatcacagacttagtggcttaaaacatgacaaatttgttatcttatagttttgtaggttagaagtcctgcatggttctcactgggcttaagttggcacagcagttttcctttctgaaagctctagggtagaatgcatttcctaccctttttcagctcctgccacattccttggcttgtagtctcttcctctatcttcaaaggcagccagcaacagtgggctgggttgagtcctcatgttgtatcactctgtttcacttttaaagaaacttgtggtaacattaagtctgcccggataatccaaggtaatgtccctatttaaaaaaaaaaaattcttttaagagacagagggtctcactctgttgtctgggtgggagtgcagtggtgcagtcattggttgctgcagtctcgaactcctgggctcaagcagtgctcctgcctcagcccccaaagtatctgggactacaggagtgagccaccatgcccagctaatttttgtgttttttgtagagatggggttttaccgtgttgcccaggctggtctcaaactcgtgggctcaaatgatccacccacctcagcctcccaaagtgctaggattacaggtgtgatccaccgcacctggccatcaaaatttaaatcttttttcttcaagaatactattacaaaagggaaaacagcccacaaaatgagagaaaatatttgtgtgataatggactcgtatggagaacaatataaagaacccttagcatttgatacagttgggcaaatagcatatatataaaaagatgtacaacattattagtcattatggaaataagataccacaaaaccacaatgaggtatcacgtcatatccactagtatagctaaaatgaaaaagatggacattaacaagtgttgaggatgtgggaaaaaatggggacttttatacagtgcttatagaaatgtaaaatggtacagtctttggaaaacaatctggcagttcctcaaatgattattcatagagttaccatgtacctgatagtccagtcctgagtatatttccaagagaaatgaagacctgtatccacacaaatactggtacatgagtgttcacagcagcattattcatcatagcccagaagccacatacccaagtgtccataagctgatgaatggatagataaaatgtggtgtgtctatacaacagagtattattcaacaatgaaaaggaatgaagtactgatacatgctccaatatggatgaactgtgaacagatgctaagtgaaagaagccagttacaaacaactgtatggctgtttatatgagatgtccagaatagacaaatgtacagagacagaaagtagattagttgcctaggtctgggaagtttggtagaaactgaggagtgattgctaatggttatgtgggtttcttttggggaaatgaaaatattccaaattgttaatgataggtatacaattttttttttagacggagtttcactcttgttgcccaggctggggtgcaatggcatgatcttggctcaccacaacctccacctcctgggttcaagcgattcacctgcctcagcctctcgagtagctgggattacaggtgcccaccaccacgtccagctaatttttgtgtttttagtagagacggcgtctcgctatgttggccaggctggtcttgaactcctgacctcgggtgatccacccaccttggcctccgaaagtgctgggaattacaggcatgagccaccgcaccctgccaggtatacaattcttacactaaaaacttactgaattgtatactttaatgggtatactttaaatggatgacttgtatggtactgtgaattacgtttcaaaaagctgttacaggccaggcgtggtggttcacacctgtaatcccagcactttgggaggctgaggcaggtagatcacctgagttcaggagttcgagaccagtctggccaataccgtgaaaccctgtctactactaaaacctgggcgtggtggcgtccacctgtagtcccagctactcaggaggctgacgcaggagaatcacttaaacccagaagccggaggttgcattgagcagagattgggccactgcgctccagcctgggcaacagagggagactccatccaaaaaaaaataaagctgttataaattgagtatccctactctgaaaaatttgaaatccaaaacttttcttttttccatccttgaacctgagtgagctacaaaagtttttgagtgctgtcatgacaacagaaatgctcattggagcatttaggattttagattttcagataagagatgttcaactactaagtataatgcacatattccaaaatccaaaaaaaaaatgtgaaatccaaaacacttctgatcccaagcattttggataaaggatactcaacctttatgaaaataaaatcagtgtgggtaagcagcaccctagaagagaatgatttcactgttcttagtgaaacatttttgcattcagagacattacgaaggaaaatcctacttcttggggcggaaatctagaccccctgggaaagcgtatgcctatgtcagaaaagcatagtacttgagaagcaatgttttcagacaagaacctcactgcatttaacccaatatcattagcattttaatttggagacttgtctaagcatcatttcatttatgtaatgtcttccatggtagatgaagaagataaggatagtttacaggaactctctacagaacagaaatgctttgttgaacacatcctttgtacgaagccattgccctgcaggtaaggactctccctcccttgtatatcagaaaacaattgttcatttcagcagttcagatacgtttgtatccgttacactcacatccacagtattcactgctgagtcatttgaaagttgcagacgtgatacttctcccctaagagtgtcctgctcatcagaagctttctcctctccagggccactcgacatactgtttcctgactggaaggtccttccccagccccagccccagccccagcttgctgtcttctcttggctaactcctacccttctttctgatcttaatgtcacttcttcacagagaacacccttgactccccagtctaacttggggctctcctattctcttatccattgtagcacatattacactatttatatttgcatttttttaatgtctgtcgccactaccggaatgtatatgtttcatgagagcagagactgtgtctgcccttcactgcattgctgtgtttatttgatgtggttgcccatgtctcctctttgaaacacattctccttggcatccttgacgtctgtccctccaggttctccttcagtcccgccagcagcccttttctcaagtttccttcttgggcgggttcctctgcctctactcactgcttataagtaatgctcacaactctttccttgggtcttctctattctttctaggtcctttcctgagtaacttctgccgtaatcatggcttcagtgctgacagttcccgcatccatatcgccctagcccagaccactctgaactccagattcacatacccagctgcctactgggctcctccacttggatatcctataggaacataaaactccagatgtccccttaactcatcttctgtctttccaaatctgctctctctcctgtgtcccatttttctgaagggtgccatatcaccccagttatccccagtagaaacctggaaggtattctagatacctccctttattctgttcatcaattactagatatctcataagcactctgttagacatggagtatacacagacatgagacaaatagcatacactaagaaatagacataatctaggtttggcaatacagaggaccacagggaaaacgcttggtggggaatgagaaggatagcaaactgtaccagcttgaaaagtgaacagtgaaaccaggcactgtggcttacgcctataatcccagcattttgggagatcgaggtgggtggatcacacggtcaggagtgcaagaccagcctggccaagatggtgaaaccccatctctgctaaaaactacaaaaattagccaggcatggtggcagacacctgcaatcccagctactcgggaggctgaggcaggagaattgcttgaacccgggcagcacaggttgcagtgagctgagatcatgccactgcactccagtctgggtgacagagtgagactccatctcaaaaaaaaaaaaaaaaaaagaaaagtgaacaaggaaaatacataataaaatcccatgtaggctgggcatggtggcttacacctataatcccagcactttgtcaggtgaggcaggaggatcacttgaggccaggagtttgagaccagcctgggcaacatagtgagaccctttacaaaaaaatttaaaaattagctaggtgaggccaggcgtggtggctcacgcctgtaatcccagcactttgggaggctgaggcaggcgaattactaggtcaggagttcgagaccagcctggccaacgtggtgaaaccccgtctctactaaaatacaaaaaaaaaattagctgggtgtagtggcgggcacctgtaatcccagctactcaggaggctgaggcaggagaatcgtatgaccctgggaggtggaggctgcagtgagccaagatcatgtcactgcactccagcctgggcaacagagtgagactccgtctcaaacaaaaaaaaaaattagccactgtggtagcatgtacctgtggtcccagctactcaggaggctgagaaggaaggattgtttgagcccacgaggtcaaggctgcagtgagtcgtgatcgcactattgcactccagcctcggcaacagagtgagaccctatctcaaaaaaaccccaaaatcccatttatatcaatttcagaaacaggtaaaattaaacagtcttgcctaggagtgaatacatagataggaaaactataaagcaaagcaaagacatgatattatgaatgtcagagtagcggctacttctctggggagtgaaaggctatgaccagggaaggtcgcatgggaaccctgaggccccctgcagtgtcctgattcttgacctggatactggttacatagtgtatagcccagtagtgtgtagatttcacactgataataaaaagttaaagtttacaaccttccagatatcgtctccatgtcttgtccaaaaaggtaaatgggagctatggaaggggaactagtgttttcaactgctgtttaaagactgctggttctaaagggatggcgagaaagaataggttaaggggaactggacattatattgaaatgagagtattttaaatggaagagacatgagtttgcaagctgaggggaagtagataatagggagattttgaaacgacacagttgatggtacaattttcagaaggtgtgagaggaggcggcatccacattcgggggcagatgtgtgttgtaggcatgcaggtgggatgggcatgggagccgctaggagagcatgttggcagaatgacagttcccatctgaggtctcagtttccagtgtcttcactgaagtgggaaggaagactgagagagatacacgctgtgcgtgccaagtgatttcctgtgacattgacattgggcctcattgagagagactcggtagttctgttcattcaacagtttctaagcacttaatttgttagcactgggctaggcaaacaaagatagctggggcttatgtgcaagttggagagatcttcagtgtaacgtgtaacttttgagattacagtcagcagcacgctacagttagggattcctgagtgacttagtcacatgggctctagactttagtgtggagctgcattaaaggtttccaagccaccacttttgaggttatggtactgataggatgtcccaagcaacttcagcccaggcctgagaaggccgcggacctgtcatgtctttgctcttggttccattgcatttgctgctttgtaatttaactatgactgtgtttttccaggcagccagctccaattcgaggattttggattgtacctgacattctgggacccacgatgatctgcatcaccagtacctatgaatgcctcatatggccgttattgtacgtcccattttatattctccacacagctcttgttaattctgcaatatctaagttgggaaaatgcactcagtaaccaacttgaagctatacatgtgtggtttatactttggcttctgacttgagggttggaaggatggatatttctgttcctgccatcatctctataaggtttcattgtaggtatagtttctggcatcccctgcacctagctgagagtcaggagcttttcttcagagtgtggagaaaaaatactaaaattgaataccaaattccattatcgatatgagtaataattatcaagctgtgaccatacgccaagctcagaagtaagccacgtacccgcactgcctcctggaatcatcagggcagccctgtaaggaaggcactgtcatttccattttataaaagtggaaacggggatcgagaggttagtaaatgctgaagtcacaggtaacaaatagagctgggatacagatgcaggtctcattgactcagaagtccatactcatactctttaatttctccatctctgccagcctgagggacactgtagactatgtaaactggaataaagctgaactcaggctgggtgcagtggtggttcatgcctgtaatcccaatgctttgggaggcccagagttcgagatcagcctgggcaaaacagtgagacccccatctctacaaaaaacaaaaaaattagccaggcatggtggtacacatctgtagtcctagctgctcaggtgagaggattgcttaagcccaggagttttaggctgcagtgaaccatgatcatgccactgcactacagcctgggtaacagagcaagaccctgtgtcttttaaaaaaaaaaacaaaaaagctgaactcttagtctttgctcctttaaggaactcagataattaagctgtaatcactatgttccttttccaacagccctggaagatcattctgagttacataaatgtaggaatatgagtaccaaaaacaaaagtcactggagcttcaaacactagacaacacccccaccccttgtccgttcaaagcttgcacctctggatgctgacataaattcctaatactggcagtagtttactgtccttagaggatcttccatagtctttgaagcttgattaagttgtactatctggatgtaaaaataaatataaattttgtgttatttacactgaaggcactaaaagctagcaagaccaaacaaaaataataaaatcactggagaaaaaattacctgtaagttacctcagcatactttttaaacacccacagtacatttagtaaaataaaacctagtcacactagcttacttcagaataaatatgaatcccaaaggggaaaaataaacattaattgtctggatattttttttttttttttttgagacggagtttgctgtgttgcccaagctggagggcagtggcacgatctcagctcactgcaacctctgcctcccgggttcaagtgattctcctgcctcagcctccctagtagctgggattacaggcgcacaccacatgcccagctaatttttatatttttagtagagatgaggttttgccatgttggccaggctggtcctgaactcctgacctcaggtgatccacccacctcggcctcccaaagtgctgggattacaggcatgagccaccgtgccaggccaattatctggatactttcagatcatatttctgccaactccctgaaatacaagttgtctataaagttatgctatttcatgaactttcacttttttttttttttttttttgagacagagtcttgctctgtcacccaggctggagtgcagtggtgtgatctcagctcactgcaacctccgcctcctgggttcaggcgattctcatgcctcagccacccaagtagctgggattacagatgtgtgccaccacacccagctgatttttatatttttagtagagacagttttaccacgttggccaggcttgtcttgaacgcctgacctcaagtgatccacctgcctcggcctcccaaagtgctgggattacaggcgtgagccaccacgcccaaccaaacattcacgttagaattgttgccttcagagtaagtcacttgccatgctgccgaagtctgtgagatcttttaagctctttttgaagtttgagtatttgcacttgactgaatagtttttagaaatgaaattatatagaaccaatatggtatatacagcagtttcttggcttaatattggttttgatcaactctaaacctaacaaataagtaatttatgtttgtggctccggcttataaactggctttcaagtcctttgccaagaatccatgctaggtgtttgtgctgccttgatcttttagaaaagaactggaaatggcagtcagaaatgctttcacaaatcaggggcattggaataataagggtgtagcttcccaaagtgaccttttcaaggtggaaaacatgcattcttgcacttttacaaaagttacactttattttatattctgaaagttctggattaatgtggtttctgctttcctgtaatacagtaaatcactccatggtagaattcaatttacttacttattttgcagaagtacagtccatccagcgtctcctcccctgctttgtactcgagaagatgttgaagtggcagagtctcccctccgtgttctggctgaaaccccagattcctttgaaaagcatattagaagcattttgcaacgtagtgttgccaatccagcatttttgaagtatgcaaccttgggcatagcggttttatgaatgggttctcttctgtcttcagaattactgtgcatcctttctgtcctcatctgtttcatatactttttactgtgataaatttggaagaaactggatatatttgatcagctagtgaatggggagcaggagggaagtggcacctgagaatgataaacaggaagtgtttaaaaagaagttaggctaggccgggcgtggtggctcacacctgtaatctcagcactttgggagaccaagacgggtgaatcgcgaggtcaggagatcgagaccatcctggctaacacagcaaaaccccatctctactaaaaatacaaaaaaaaattagctgggtgtggtggcagatgcctgtaatcccagctacttgggaggctgaggcaggagaaccgcttgaacctgggaggcagaggttgcagtgagctgagatcccaccactgcactccagcctgggcgacagtgagactcgtctcaagttaggctgggcacggtggcttacagctgtaatcccagcactttgggaggcccaggcaggcggatcacctaaggtcaggagttcaaaaccagcccggccaacatggtgaaaccctgtctctactaaaaatgcaataattagccaggcgtggtggtgggcacctgtaatcccagctactcgagaggctgaggcagaagaattgctcgaacctgggaggtggaggttgcagtgagccgagatagcaccaatgcactccagcctgggtgacagagcgagactgcatctcaaataaataaattaaaaatataaaaagtttaaaaagcacctgtgacttgagtctatttattttcagttgttttactcagctaaggaaaataaaggtagaaactttgtttttaagagcttctgaaaaggacatagcccctcctcctgaagaatgccttcagctcctcagcagagccacccaggtgttcagagagcagtacattctcaaacaggacttggcaaaggaggagattcagcggaggtatgatgtcctgtgttcacaaaccatcgatccctggctggtagctgatgctgtatggtagcctagacctggcttctgaataaactctatttctttttgtttttaaagggtcaaattattatgtgaccaaaaaaagaaacaactagaagatctcagttattgtcgagaagagaggtaagtgtcaaaaataagaagaatacaataggtcagtaagactggaaccatattctcaccctaagatgctgagccacattaggtggtttcagcatcaaggggtggacctcaagagtctcttgtgtcttacatcattaggaaaagtctgcgggaaatggctgagcgtttagctgacaaatatgaggaagctaaagaaaaacaagaggatatcatgaacaggtcagtgggctgtataacatttagttacctagtcaggtactaacaacgatatttaagaaaatgggcattggcaggtgcttacatacctacggaactgaactgatccccctgcctctcctctgaagtatatgttggggaaaacatgaggctctcccctaacccttcctatggggcctacttcagaaacaccagattcatgaattatgagcttgtgattatgtttctcctaattagtagagaccttaaattgagatgtttgcttgccttttctaaaggatgaaaaaactacttcacagttttcactctgagctcccagttctctctgatagtgagcgagacatgaagaaagaattacagctgatacctgatcaacttcgacatttgggcaatgccatcaaacaggtaggaatagatccaaactagctaaatttggtaatttttcttaaagcacttattctacagaaaattttacaaaaatgtaaaaagaacagattcaaatagatactgtgaaaatgtgtggcaaaccactgccaaaatatctattattttaatacttaaggttactatgaaaaaggattatcaacagcaaaagatggagaaggtgttgagtcttccaaaacccaccattattctcagtgcctaccagcgaaagtgcattcagtccatcctgaaagaggagtaagtaaatacttccaatcagctattatcgtgagatagtttttcctttacagtatgccagaatcaacctgtcttaatagaaacctgaatcttggtatttgcatgtcaagtaattactgggatgagagccacatgatacatagggacttaagaaatgactatggtgggaggattgaaagggatgaccttctagtaacatgattttgttgtgtggccaaaggtattttacagtaattatgttcaaaaatatttccagtacttgcaccgtttgccaccttaaatgaatagtgaacactattgctatccacctgaaaccttcagctgttaattttagcaaagcagttcttagatgtttcaacattaccagtttaaattcttaagaatccatataaatggtttattataattccaaaagtgagtgactttacaattttacaggggtgaacatataagggaaatggtgaagcaaatcaatgatatccgcaatcatgtaaacttctgacaccaccaggagctgactcacacctgaactgaacaccattgaaggcttaaacccatattgtaaaacaggtagaattatctaatttataaaaaggtgttttgatgacctttggtgtggttcatctttttaaatatgttgttttataataattgagtaaatgcttttatttaaaatttggaatgtgctttataactcaagcctacagttgtgttcagcaaggactcaggattatttcacactgcacactgccagaacctccctgaaccctattgagttttctccatatttgagcaagttagttattcttgtgagctgtgttttaaagtagcagcaccagaaacatgactctgaagagggatagaaccctaggattcaaaggagaagaccacacagtgtacttggcagcagcttttttaatttgaacactttcttcttgaggacacaccttcagtacagttaacaaatggttacacctgaaatctgctgagagcagagctcaagatccacaattgcaaaggccactgctggctcacttcctcacaagctgtattacctttcagagctgagtgaggctgtgctctacgtcccaatacttgttactgagtggacatgaggtgcaagtttagcaccttaaagggagaaaaaaataggttagtatgcagaatgtgattttgtcctcacttcaccttaagtcatctttttacacttgccaatgtgagttctgaaaggtactactatatctgcttagaaatggctgagtgactgtcaattaaaagccacatgataaggtaggttacaggtaagaggtaaatcaggttagacatgcatgagaacatgtaggcacagactgaatataagcacaggaacactcgtgaaacccaactgagcttttcttttgcctagaagggctaaatcctgccttctacatcagttcccatttatgctgaaaacccagttgaaagaattgtttcctacctggacagtgacacagtagtttgtttcataccagaaacacattgctaaacaaaacttaagagtctcagtttgggtttttctacaataaagtgaattccaacagttggcatttgccacagtagagaccactaaccattccctaattgtgatgattttattacccagcaccatcttctggagaaaaatatctgtaaggtgctcagtctcagcagaacacttcactgcaagctctagttcagtcagttcagaaaggctgtgaattgcccaccctgatttacagcactaattttaataatctgaagacaaattcgcttggggcttatccaagggactagtcttaaacctacgtaatttaaattgattgcattttataattaataaaatcccctgtaactcaatagttatatgtttcctttatctaaaccatgtagcactctttataaagggactttaaaccaattaaaataatgtttcatgtgcggcaagcctttagtactatttccataattggtatttatttttaaattcataaccatgaatgcaagactacaataataacccaagagatgaggtatgtagtacttatcatttgtcctatggaagacagaagtacagaagatctttagggtaagtccatagtgacctcatttataacaaagacaattcactttaagttgatggtggcgttatgtgaacaaaacaatctacctagttcactaactcccagaaggctctttcaggtaccctgctgttatgcaaccagtctcaaaaatgatttgaaaaccatcttacttttgaacctcctggatgatgaatccatccactggatattcctgggacagtactctcagcaggtattgatgaacatgaatcaattctttgtgctttctgtagcacttcataaagttatggcaaagacctgtttcactgaggctttcttcacacaggaaaggaatctaatgcttgtaaaatgacaagacagatttccaattctaactaactggctttccataagcattgtcacttacttacattccaggtctgaattcaaaagaaaaatacaaagtatctgtcaacctagttaccatttttgtatttgacacatttgaaacaagtagtacgtaagcctaatgatccaagttgaaaaattagcctatttaaaaacgtatactaatgtttttcactgatccaataactagactaaaacacttcaaaagagtagatggtaccagttcggctttatcctggtaccctgtgggcccatgaagatcatctaagtatgcagaaaaagtgcttccaaagtttcttgtgcttttcctttaaccttcaacttccagtatatatagccccagccaagttttcagatcctcatcattaattcacttcatgaattggttttgtttgccacagtcctatggttctcaggtaagtttcagtagcatttaaggtcctccaaagcaagataagataaaatggtaaaaggaaaacaaaatacagtcagtagccaatggcctgctctcaaaccttcatattttaatataaaatattcatacagcatactacacttctgtctgctaactgaatactgttactgatgagctctagacaacagataaagcaaattctctcttccaatatctatgaacagaaaattccaaacactactgggatgtcgctttagggtagggaaatgtgttccgaaaatctgtcttggagaaagcaggcaaggaaacagcgctttttccatcaccaaatctgatcccacgcctgttggaatcaagcctggagtttatagtgttcgcatttgaaggtctctgggctgcagatcaccccgctgtttgctgtttcctgtgccgcacagtcttctccctctagaagtaagcatttctccagtcttccttttgttgtgacttctctttcttcagttaagagttaaataataattactgttgctctaaagatgagttaaaaacccaaagtgcaggctagaatcctgccatgagggtgtcatgtctcaggaagctggttaatgtctgtcagtttagtatcattcagaattgcccggattctctccaaggagtcagcttgccggatccgctctaactgcacctggagaaacaatggtgagataactacaggtggctcctgcctagattttctgaactttgactggtttagctgagatgtagcagattaactcaccagagtactagtcacttcaaagggagacagcaagaacaattaaaaattttaaaaataattccccaaagctaccgtgtaacggactgggatttttttttgggggggagagttttgctcatcatccaggccagcccaggccagagtgcaatggtgtgatctcggctcactgtagtctccacctcccgggttcaagtgattctcctgtctcagcctcccgagtagctgagattacaggtgcctgccatcacacctggcttgcttgctttttcttttcctccagatggagtattgctccgtcacccaggctggagtgcagtggcatgatcttggctcactgcaacctccacttcccgggttcaagcaattctcctgtctcagcctcccaagtagctgggattataagcacacgccaccatgcccggctaatttttgtattttaagtagagacggggtttcaccatattgttggtcaatctggtctcaaactcctgacctcaggtaatccatccatgtcagcctcccatactgctgggattataggcgtgagccaccatgcctggcccagactaggattttaaagtgtaatgtgttgggattatggagacaaatgagacctgactcccaatcctgaagaatccacagttccagtccgggcacggtggctcacgcctgtaatcccagcaatttgggaggctgaggcaggtggatcacctgaggtcaggagtttgagaccagcctgaccaacatggtgaaaccctgtctctactaaaaatacaaaaattagctgggcttggtggtgtgtacttgtaatcccagctacccaggaggatgaggcaggagaatcgctggaatccaggaggcacaggctgcagtgagccaagatcacaccactgcactctagcctgggcaacagagcatgactccgtctccaaaaaaaaaaaaaaatccgaagttccattgggaaaaaaacttagttttagcacaatattctaaatgtcattgtgtcattacaggcattcatagagtgcccgagggagcatggcagagggaggggcactttagcccagctcagggacctagaagagctccacagaggggacagacctacgctgagccttgaaagaaaggagtcaggaggggatgagatgaggatgcttaccagacagaacaccacgctgtgggcgaggaaccacaagcagttaaacatgtaaaacaaggcagagagatgagcaaaatacaggggtgggcctggttgggaagagtcttacatggtatgctaaggagtcagtactttactcataaggaggcaaaattggcaaggcatacagaaaaagaaaaatgggccaagtgtgaagaacacaccaggtttctggcttgaatgatgagtcagacatttggggtggaggtaggagcagccagtctctaaacctctagctactgccagtggtcaagtcagggatcggcaaggttctgtcccccaaaactgccttcgtgctctgtatgtggttccccaaatgcctcacctgaagggtctgtgaaagctttacaaaatccctctggacttgctcactgacatctaattctgtctgtaatctctgagctttattcttctcttcaaacattagttgttcaacggtagcctaaaaaatacaagttttgaatgaagattaatgccaaagggccgaattacttaggaaatccagtaacttgtagttacctactactagggcagaaaggtgggtggatatccgtcgcactcctatacacgaccaatctctttatctatagggcaagcgtgcaggccatctagactacttgctctaagtcctgagatgaactgggtatgaaaagccaaaggaagaaatggattaaagtgctgccctcccccacccccagcagctggtgacagtgacgataatcaccaaaacagctgctaagatcggtgtctgtcacaccaacagggatacatacaggacttcctctgacaacctccacagtcaagcatccaccaggaaacttagtgaatacgccccagctatccccagtctctcttacagaaaaccagcaggatgtgtgggagcctttccaaaaacaagcagttcagcaacactgtctgcactttcaggtctgaccactcagctcactaagaccatttctaggaaactacccccacaacatgcacgtttattctaacggaactcatcaaaatttaggcagcaaacctggtttgatgcaatctctcttaggatttgatacatcagtcaaatggaatgacattttcaaagcagtgcttctaactgggcagtgcccaggcttggtcaatggccctgactgcctactatctgaagctagcctatgacgcaggcctccagacctggcagaaaagatttaacccagctggaatagatcaattcgtttaagttttttcttttcacaagctgtcagttttgccaactttttaaaaggtgacacttcaaagcaccaatatttttttttcaacaagcaagatgtgatcctgcattcttagccctgctttttaaaattaaatgactaatgaaaacactaccttagcagcagtctctttctttaactgctcttccaaactgatctttatttcctgaagactctcaagctgttgagacttctctcttaatgtggactccaactgtgaaaaaggaaaaagctgaaactcacagaaactccctctgggccccagtgcactacctaaaagagcctagagcctggagaattacaccaagacactcgggctacactgggaatactcctctcaccctttcagctctgtggatcccctctgtattcttcctgaactattctttcattaaccattattaggtgcctactatattctaaggcctcaaaatggagaaatcagggtaaacagacatgtaaaggatgaagaaagaagcatttaattctgccagaaaagttacaaaggacttcctagaggagatgacatttgactcctacatttttacagggcaaagacaagggtgacaaggggagaagatggagagatactccaataagagggaatggatggcacgcactaaaaacacatgcagcaacagtggcatgttcggctggcctacagcacagcacgttgggagccacaggcactgaggcagagaggtgtgaggcaggagagctctggctgggctaaggatatggacttgatcctgtaaaataaagggaactacgggagggctttccactagactgggacgcgaacaagtttctaatgtttaaatatcaccttgatttcaatatggagatgatttagggacaaattttggaggcagggaaagttaggctgttacaataagccaggtgagagtgaagtctgaactcaaagagtggcagctagaatggaaaggatgagatgttatttcgagcgctggtaatttctgctggtgcaatatcagtagcaaagtggaggcaggaggcagactgcagcaggtggagggatgcctgggaagtcaggcagtgatgatgatcaagactgtggcaacagagggaggaagaaagagtggtagctcgggagaggagtgcaatccaaagacagactttttccttctgaatatgagacacctgagcctgttcatgcataatggaaaagatcagtcaagaggcagaagttcaaggcccggcactgcgcggggacatctggaaaagtcggagatactcagtcaaagcacctatgcaatgacactgtggtcagaagcaggtcatgatattctctgaagaaaaagaaaagactgggaataaaaggaaaacctgtaattgaggagcccagtagctgaaggtggccctgcctgatgcctgaggagtgaggccagcatctgctgagagtgagggggctgaggtgaggtgactctgaaactgccactgtgaggaatggaagagacgcaacttaggacacatgaaaggctgcatgaggaacactggaggcccatctggcagcttgagcatgcagtgtcaccaagtctcgtggcatcagcagctggggacagcaagactagtccaaggttgggcagtggtcaggtgagggcagcagcaggacaaggagtcaaagaccatagggacaggtgtggtgggagatgaagggaagaggcaggccagtaagatgcaacctaggggaaagaaagcaagccatgaagctgctgaaaccagaatgaaaggggaagttcagagaactggaggtctgaatgaggtactccgatggaagagctggaaggatggcagattgtggtcaaggaacttaaggctgcagtgagatgtcacagttgggcaaaatgcagcccagtgtgtggaaggggagagcagggtggaggtgaaaatctctaaatcaaggaacagtgaggtcaggaagttgaatggggttactatgaaaggaactaatgatgtctaagaggactaagccagctagaaaatgtcatctcttgtttgtaatgttttttatacatatttctactgtacctctaagcatataacatgttatgaccatgccttgcctatcttctcactacactggaaactccaggccacagtcacatcttagccttacctcctccagtttaacgtagcctgacacacagggcactctcaataaatcaccagcacacccttaccccgtggttttcttcccacaagacaaaagttccttaaggcagggcccatgccttaactattttttattcgttgggtgcagcatagtaggagtcagtaaataaccactggttgctgatagaattaatttgaaactcacgacttacctgtcctttttccacttttattctttctaattcagcttttaggctagaaatagaagctagaaggaaaaaaatgagatgtattagcattcatctattattgtgcatgaacatttttttctttaaaattttagagcaccccccaaaggattcaaatgtatgctgaacatgggttccgggggctgtctcaaaattaccaccaagcaatcagcatatttaggctcagggaaaagcaggatccatgcaaatggacactgtgtcataaactacctctagatcatgtatcacatctctgcagggaaatgccacccattgaatcacgttcccctggttctgggttcaagtactgagaatcctatctatgaataattgccaaagaggccacagaactcctaaaaagacgagttttcggccaggcgcgttggcttacaactgtaatcccagcatttgcaaggccgaggcaggcagatcacctgaggtcaggagttcgagaccagcttgaccaacatggagaaacccgtctctactaaaaatacaaaattagctgggtgtgctggcacacatgcctgtaatcccagctactcgggaggctgaggcagcagaattgcctgaacctgggaggcagaggttgcggtgagccaagatcgcgccattgcactccagcctgggcaacaagaatgaaactccgtctcaaaaaaaaaaaaaaaaaaaaaaattttttaaataaccagaatttctgattatttgactatatcagaatatatattcagaatctgaatatatcagaatatctacaaaaaatggactgagtccttactaaattctttcctaagcttttctgtgttccagactccatggccatgtattgcttcttttactaaagttttatttagtgactctaattctaaactacatcacttttatcttcacctatttcctccttgcagttttctatttctagttgcagagtttcttcaagattttcttttaaacactgttctgcttggatctgctcttttaggaaaagtatctcagccttcagcttttcttctacgtggtctgctgctgtccgcacattaatgatgtcctcacggtattttaataccaactcccgcagtgcctggattcaagaaacaaatgattattgggtttgtgagagtgaaaggaaataaagaagctaaagattttctgtaaccagaatctcagatgttgttttaatggttcaaaaattaagactttgaccattaagccacttagagcttcagggcaggtgccatgtcaggttaacattcagtatgttatagaaaagacatttctggccaagtcgtatcttgtaagccacatactcttccctcaaaactgtttcataagcagaaaaataaaaagattaagtgacttacaatatgccattcaatagaaataataccttagaatcctctactattacttgcagaaatttgggaggagttaggaaatgaagacaaaactgagtagcaagttcacactcagtagcaagtgtgaactaagaggataacatttatttacttactcacttattcattcattcaaacatttactaaacatctaccagaggcaaagtactaccttaggccagaggtaaataatggcaaaggtggctttctaaggtggtaagctgtttttctgtaataaattcagtatagaatttatttttcttcctaaattttagttctgtcttcttttagaaatccttccaattatatcctaaagcaactctaaagtaaaaacgagattctcaaataacaatatatataaaacaacagtttttaaaatttcctaagatttattgctgaagcaggtccaagaatcaaggattacacactgactacattcttcaaggattcttggaactttttttttctttttcttgagacaggatcttcctctgtcacccagactggagtatggagtgcaatggcataatcatatctcaccacagactcaaactcctgggctcaagcaaaactcccacttcaacctcccaatgtgctgggattacaggcaagtgccactgtgcccggcctggattcttggaacattttaagatctaggactaggcaggcgcggtggctaaagcctgtaatcccagcacttttgggaagccgaggaaggcggattccttgaggtcgagaattcgagaccagcctggccaacatggtagccagacatggtggcacacacctgtagtcccagctactcaggaggcagaggcaggagaattgcttgaacccagaaggcggaggttgcaataagctgagattacaccactgcactccagcctgggtgacagagcaagactctgtctcaaaataaataaataaataaataaataaaatgaaataaaatctaggaataaagtctctaaagaacatggaagacaggattctttcctgacaaaagagaaaaatctaacaggtggaaggtggtaaacagtgattttaagctgatagcaaaagtagacaggttcccaaaacctttttttttttaattgagacagggtcctcactctgtctcccaggctggagggcagtggcgcgatctcagctcactgcagctttgacctcctgggctcaggcgacccctcccacctcagcctcccaagtagttgtagctgggactactacaagtgtgtgccaccatccttggctaattttttttgtttgtttcagtagcatcggggttttgccatgttgtccaggctggtgttgaactcctgacctcaagcaatctgcctgccttggcctcccaaagtgctaggattgcaggcctcagccaccataccctgcccccgataccttcttttgatgacagcagtcaccaattcagaaaggaaagaaggctctgccaagagtgcctgtaacatgagctgagacgataagaagttggggaaaggtgggagacagcaaagagctaatggcaagataggcaactggttttttgtaaatgatgaaataaacataaaaaataacagtcatgttaatacatatataggaaaaaagaatgaggtccaaattatagagattgaatctgtagggtataattaggggaaacttctacttactaagatttccttaaaaaggaaaaaaaaaaaaaaaaagaaacaggtataaagattggataggacaggcacggtgtctcatgcctgcaatcccagcactttgggaggccgaagcaggctaatcacctgagatcaggagttcgagaccagcctggccaacatggcgaaaccgcatctctactaaaaatacaaaaaaaggccaggtgcggtggctgatgcctgtaatccccgcactttgggaggccaaggcgggcggatcacgaggtcaggagttggagaccagcctagccaatgtggtgaaaccccatctctactaaaaaatattttaaaaaatttgccaggcacagtggcacgcgcctgttgtcccagtactcaggaagctgaggcaggagaatcacttgaacctgggagacagaggttgcagtaagcctaggttgcgccactgcactccagcctgggtgacagagcaagactccatctcaaaaaataaaaataaaataaaaaataataaaaaaaataaaaatacagaaacaaattagcccagcgtgctggcgcacgcctgtaatcccagctactcgggaggctgaggcaggagaatcacttgaacccaggaggcggaggttgcagtgagccaagatcacaccactgcactccagcctaggggacagaatgaaactgtgtctcaaaaaataaaaattaaaaattaagcttggataaagttaaggagagaattatgaatgtctctgggaaaccagttttgtagcccaggtttacccaaccacagaagaatgtaagtgaccaaaagtgccatctttggctgggcatggtggctcacgtgaggtcaggagctcaagaccagcctggcaaacatggtgaaaccccatctatactataaatgcaaaaaattagctgggcatggtggcaggcgcttgtaatcccagctactggggaggctgaggcaggagaatcgtttaaacctgtgaggcggaggttgcagtgagcagagatgatgccattgcactccagcctgggtgacagatattatctgtctcaaaaagaaacaaaagtgtcatctttatggacagcatgatggtgagtgtgttataacttttcaagtactagatacaaaaacaaacgtcataagcagccagcatggtaaccccttcaaacatttaatttctggcacactctcaatctgggccgacaaaaataacatagatcttcaaaacattaaggctacgtgaaagaacatggacacaaaagaccacatatcgtatgattctattcataggaaagtccagaatagggaaatctatagaggcagaaaggttagtagttgcttaaggctaggggaggagggggaataaggatggtagctaaagggcgaagtgttactttttcgtgtgtgtgtgtgtgtgtgtgtgtgtgtgtgtgtgtgtgtgtgtgtgtttagctggtgtagtcgggtcacagggagttactacttgaggtgatgaaaatgttgtaaaattgattgtgatgatggttgcacacatctgtgagtacagcaaaaaccactgaatggtacattttaaatggttgaattggcacgtgaattatatctgaataaaactgtttacataaagaacatacggccatttcagaaaacgtacttgttgacatttttgatcatgtggaaagtaagttacctctgtagtgtctgggaggatgaagtcttctgcttgctgtaatgacacatgcaggctgtgctttccctggagactgtcattatctttctgtaacctcaccagctcttctgaaacctgttcccgtgactgcatcagcaccgcc

SEQ ID NO: 12629 - DNA, 979 bp, Homo sapiens
gagaggggtacctagaacccagagaacattggcttatgccagataccacaccacatctgggcttacattcttgtatcttttttggtgtgtgggcggggggggtggggggcagttcagtgaagtctagaagacctgctggacaaattctaaaagagctagagctgtaacacttattcttgcatcttattaattttctatgatattttttccttcttcgtagggacttgggacaatctggctttgctgctttctaactgctaggcacctctctctaaccctcattgtcagagggaattggaggatatccacagtctgttcctgttctgatattctgagcagagaaaaggcactaacggttcctcttagctatttaattatcagaagcaagtaatctttccccagataatattttgccctagaagaagccgtgatttagctcttttattgtgcttacttggtccaaatacatctgtggggtgttttgtcatttcttaatgaatgaatcatagttataaccaggggccaagctgcccaagaggctcttcagagatcatggatgctctctttctggaagctgtggcctgatggagcagccccattccagggtcccatctgtccggagttgtgtatgtcaagtccggctcagtctttatttccaacactagccgtggtcctgtgcagtcaagctctcagctagtgtttagggctgtctgtcagaaatggttatacgtgggcaaaagaagatctgacagctcctatataccttatcttactgaattcttaaactttgaaccagttcttccacttactgacttgttaccactgctgactttctgaaaagttttccagtttttgttttttgttttttgttttccagtaggggattagaatgtttagtcctacttagtaagaaaaatattgtatttttaatcattcatagtgctggtaaaaaaaaaaaaaaaaaaaaaaaaattggggg

SEQ ID NO: 12630 - DNA, 91 bp, Homo sapiens; identical to SEQ ID NO: 9289

SEQ ID NO: 12631 - DNA, 1429 bp, Homo sapiens
cagtacctaaaatagtggctggcccctatgtattgggtcatagcaggtactacattcacctctctactatgtttaatacagtttatttcccttgtgtgtgccttgctaaaatatttatgtttaaatttctgtatttgatacacattgtgaaaggacattttcaagtctaagtcccatgacttgagtttgcctgtgtctcccattaaaagctctcaattacaccattgtgtgcccagtacctcgcattgtgcctggccagtgttggacagtaaataaaaattcagtgtcttattcactgaggtatagtgcctaaaacagaagacattccataaatatgtgtggaatgaatgacttaaatatttgattaatgaagtttaagttgagcaaagaaaggagaactagtagcttagatttactaagaatactatgccacatttatttgtttatttttagagacagtcttactctgttgcccatgctggagtacagttgtatgatcatagctcactatggactcaacctcctgggctcaagcaatcctcccatctcagcctcccaagtagctgggactacaggaatgcaccctcttccctggctaatttttaaatttcctgtagagatggggtcttgctatgttgcccaggctgtcctcaaactcctggcctgaagtaatcctcccatctcagcctcccaaagtgctgggagtacagatgtgagccaccgctcgtggcctatgctacatttattttaacatctttatcgttcacaagtaatttcacaggtatccccttacttgagtcttgcaacaactctatgaggtttattttgccagatttatagctgaggaataagactcagaggagtcagagggcttctctaagattatttagcttgcagattggaacttgaacccaagccttgactcctaattttatatttgtatgaattcatacaaatgtcataggaaattatccacattttataactagaattatagaattagaagtggcctcacacatcacaaatcctgaacccctcactcatttttcaaaagaggaaaataagaattggaaagtttatatatgtatccaaaggtacacatccagtttaggaatttcaaaaagctggctaggcacagtggcacatacctgtaattccagcagtttgggagcccgaggtgggtggatcacctgaggtcaggagttcgagaccagcctgaccaacatggcgaaaccccatctctactaaaaatacaaaactagccaggtgtggtggtgcacacctgtaagtaatcccagctacttgggaggcggaggcaggagaatagcttgaacctgggaggcggagattgcagtgagctgagattgcaccactgcactccagcctggacgacagagggagactccgtctcaaaaaaaaaaaaaaaaaa

SEQ ID NO: 12632 - DNA, 1444 bp, Homo sapiens
cagtacctaaaatagtggctggcccctatgtattgggtcatagcaggtactacattcacctctctactatgtttaatacagtttatttcccttgtgtgtgccttgctaaaatatttatgtttaaatttctgtatttgatacacattgtgaaaggacattttcaagtctaagtcccatgacttgagtttgcctgtgtctcccattaaaagctctcaattacaccattgtgtgcccagtacctcgcattgtgcctggccagtgttggacagtaaataaaaattcagtgtcttattcactgaggtatagtgcctaaaacagaagacattccataaatatgtgtggaatgaatgacttaaatatttgattaatgaagtttaagttgagcaaagaaaggagaactagtagcttagatttactaagaatactatgccacatttatttgtttatttttagagacagtcttactctgttgcccatgctggagtacagttgtatgatcatagctcactatggactcaacctcctgggctcaagcaatcctcccatctcagcctcccaagtagctgggactacaggaatgcaccctcttccctggctaatttttaaatttcctgtagagatggggtcttgctatgttgcccaggctgtcctcaaactcctggcctgaagtaatcctcccatctcagcctcccaaagtgctgggagtacagatgtgagccaccgctcgtggcctatgctacatttattttaacatctttatcgttcacaagtaatttcacaggtatccccttacttgagtcttgcaacaactctatgaggtttattttgccagatttatagctgaggaataagactcagaggagtcagagggcttctctaagattatttagcttgcagattggaacttgaacccaagccttgactcctaattttatatttgtatgaattcatacaaatgtcataggaaattatccacattttataactagaattatagaattagaagtggcctcacacatcacaaatcctgaacccctcactcatttttcaaaagaggaaaataagaattggaaagtttatatatgtatccaaaggtacacatccagtttaggaatttcaaaaagctggctaggcacagtggcacatacctgtaattccagcagtttgggagcccgaggtgggtggatcacctgaggtcaggagttcgagaccagcctgaccaacatggcgaaaccccatctctactaaaaatacaaaactagccaggtgtggtggtgcacacctgtaagtaatcccagctacttgggaggcggaggcaggagaatagcttgaacctgggaggcggagattgcagtgagctgagattgcaccactgcactccagcctggacgacagagggagactccgtctcaaaaaaaaaaaaaaaaaaaaaaaaaaaaaaaaa

SEQ ID NO: 12633 - DNA, 200 bp, Homo sapiens
tactaaagaatctgcagttgttggatacactgctgaatgcatatgtgagcaatagttagaggttagatggaggctagtgatccattattggctgcaggagtcctcgtgctgtgtgagacacagatagattcaaaggaccctagaaaagggtagagctcaatcatacatttgcagaatatatgaatggtgtttgaaaatct

SEQ ID NO: 12634 - DNA, 532 bp, Homo sapiens
aatgaaaattcagttgaaactacgtgtctgccttaccaaattcttcctcagggtcttagactaccaagtccttcatgaagctttcctggcaagtgagagaatgtatgtaaaatgtcttgcagtgtggccagcacaaaacagtctcacaagagctgcatctttctctcctgcggttactctagccagaagtgatgtctttctccttgtagctcctatatgtcatttaatcaaatggcatcaactcatactgtctaatactagagtttgcatttctcttaagttttcaatgtgaatgtaaatgccaggtagcaaggaccttgcacagtgcatcatactaaagaatctgcagttgttggatacactgctgaatgcatatgtgagcaatagttagaggttagatggaggctagtgatccattattggctgcaggagtcctcgtgctgtgtgagacacagatagattcaaaggaccctagaaaagggtagagctcaatcatacatttgcagaatatatgaatggtgtttgaaaatct

SEQ ID NO: 12635 - DNA, 12280 bp, Homo sapiens; identical to SEQ ID NO: 12260

SEQ ID NO: 12636 - DNA, 109 bp, Homo sapiens; identical to SEQ ID NO: 8402

SEQ ID NO: 12637 - DNA, 319 bp, Homo sapiens; identical to SEQ ID NO: 5402

SEQ ID NO: 12638 - DNA, 1052 bp, Homo sapiens; identical to SEQ ID NO: 8920

SEQ ID NO: 12639 - DNA, 300 bp, Homo sapiens; identical to SEQ ID NO: 5417

SEQ ID NO: 12640 - DNA, 184 bp, Homo sapiens; identical to SEQ ID NO: 5421

SEQ ID NO: 12641 - DNA, 147 bp, Homo sapiens; identical to SEQ ID NO: 5241

SEQ ID NO: 12642 - DNA, 143 bp, Homo sapiens; identical to SEQ ID NO: 5446

SEQ ID NO: 12643 - DNA, 1791 bp, Homo sapiens
ctgagagggccatggagaatctgtggccagccctccctggccccctgacctggcagaggaaggaaagggcattggagtaggcttctgtcttcaggccagagggggaggtggttcaggggcaggcttggtgcaccccttggctgcaagctatcacctccctatctgcttcctcttttctgcctcccctggtgcatctggtcacttcttgctgcccttcctgtgaaatcgtggcaccttggaccaagtcctgaagcacttgggcagaaggcgggagaggttgggtttctaggatccttgtttcccagggcctggctctggcctgggctcagaccactctggtctaggcaggctgctggggaaaggctggagctgcttctgctttctgctcctgttgccacctctgctaatgatggggaaaacctgcagagggctgtggttggagctgggctgaaggccggcaggggtgggtctctccatggcagtagcacacaggcaggcaggaagtggccctgtgcaaaagcgggaagtggcagttgtcaaacaggaaggggggggctgggctgtgggaggggcggggatgagcctggtagaaaggtgcgtggaggagggtccaccttggaaggtctgagcctctccctagtggttactggaaggaggggtgtctcaaggggagacacctttgcagcaccttgagatgccgagccagggccctcccactgtggaccaagcccattcagtggcctcgccctttttggggttggagatgctgcgtccagctgggatgcccttgcttttgggaaagatgctctagaaaccactactccatcctggaacccctctgctgccactgctgctgggatggaccctctgcttttttgcagccgtgggccagccctggatgtgactacaggacaggaagtgtcaggggaagagacaggagacaacagctggagaggctgggtggtggccgggcagtatgtggcagcaggaacggggagagcggggcaggtagaaactgctctgttcattgaggagagcttgtggatggcagggtgccacggctgcgaggaagaggagggaagcggacagtggcacttcctgcggcgttcccctctctctgaggagcccctgttgctgcccatcacctgcagactgtagacacaggtgggccccgccaaaacagggagggacactccacctccaggactgcaatggaggaccatgtggggagcccagaagccaggcaggagggcttagttgctgtgttgcagaccctgcatctgcctgggctgaggggacagtgggtcccattcacagtgtctctggtgatagctgtggccacaagcccagcccaggagaccctgtcaagcttctcactgggcccttggaaaggagctatatgccagaccttatgcaaaactcttgacctgtaccacctcagttaaacctcagatcttgctgtctctattttagaagtgaggaacctcttggccgggtgccgtggctcacgcctgtaatcccagcactttgggaggccgaggcaggaggatcataaggtcaggagatcgagaccatcctggctaacacagtgaaaccccgtctctactgaaaaatacaaaaaaattagccgggcatggtgatgggcgcctgcagtcccagctactcgggaggctgaggcaggagaagggcgtgaacctgggaggcggagcttgcagtgagccgagatcatgccactgcactccagcctgggcaacagagtaagactccatctcaaaaaaaagcaaaaaaaac

SEQ ID NO: 12644 - DNA, 108 bp, Homo sapiens; identical to SEQ ID NO: 9293

SEQ ID NO: 12645 - DNA, 105 bp, Homo sapiens; identical to SEQ ID NO: 5457

SEQ ID NO: 12646 - DNA, 162 bp, Homo sapiens; identical to SEQ ID NO: 5244

SEQ ID NO: 12647 - DNA, 301 bp, Homo sapiens; identical to SEQ ID NO: 5486
  SITE (98): n equals a,t,g, or c

SEQ ID NO: 12648 - DNA, 193 bp, Homo sapiens; identical to SEQ ID NO: 5245

SEQ ID NO: 12649 - DNA, 1791 bp, Homo sapiens; identical to SEQ ID NO: 12643

SEQ ID NO: 12650 - DNA, 285 bp, Homo sapiens
tggtcacacctgtaatcccagcactttgggaagccaaggcaggcggatcatgaggtcaggagatcgagaccatcctggctaacacggtgaaaccccgtctctactaaaaaatacaaaaaattagccgggcatggtggtgggtgcctgtagtcccagctacttgggaggctgaggcaggagaatggcgtgaacctgggaggcggagcttgcagtgagccaagatcatgccactgcactccagcccgagcgacagagcaagactccgtctcaaaaaaaataagaaaa

SEQ ID NO: 12651 - DNA, 98 bp, Homo sapiens; identical to SEQ ID NO: 9152

SEQ ID NO: 12652 - DNA, 153 bp, Homo sapiens; identical to SEQ ID NO: 5246

SEQ ID NO: 12653 - DNA, 203 bp, Homo sapiens; identical to SEQ ID NO: 5247

SEQ ID NO: 12654 - DNA, 166 bp, Homo sapiens; identical to SEQ ID NO: 5519

SEQ ID NO: 12655 - DNA, 136 bp, Homo sapiens; identical to SEQ ID NO: 5560

SEQ ID NO: 12656 - DNA, 300 bp, Homo sapiens; identical to SEQ ID NO: 5574

SEQ ID NO: 12657 - DNA, 150 bp, Homo sapiens; identical to SEQ ID NO: 5248

SEQ ID NO: 12658 - DNA, 266 bp, Homo sapiens; identical to SEQ ID NO: 5581

SEQ ID NO: 12659 - DNA, 142 bp, Homo sapiens; identical to SEQ ID NO: 5249

SEQ ID NO: 12660 - DNA, 166 bp, Homo sapiens; identical to SEQ ID NO: 5608

SEQ ID NO: 12661 - DNA, 268 bp, Homo sapiens; identical to SEQ ID NO: 5616

SEQ ID NO: 12662 - DNA, 160 bp, Homo sapiens; identical to SEQ ID NO: 5619

SEQ ID NO: 12663 - DNA, 368 bp, Homo sapiens; identical to SEQ ID NO: 5252

SEQ ID NO: 12664 - DNA, 4704 bp, Homo sapiens; identical to SEQ ID NO: 5253

SEQ ID NO: 12665 - DNA, 144 bp, Homo sapiens
caggcacataccaccacgcctggctaatttttgtatttttagtagagacagggtttcaccatgttggccaggctgatcttgaactcctgacctcaggtgatccacccgcctaggcctcccaaagtgctgggattacaggcgtga

SEQ ID NO: 12666 - DNA, 1419 bp, Homo sapiens
cagggtttcaccatgttggccaggctggtcttgaactactgacctcaggtgatccacccgcctcagtctcccaaagtgctgggattacaggcgtgagccaacacgcctggctgctgaatattattttattgtgtagagtaatgtattcattcgttggttgataaggcatttgggttattttcaccttttggctgttgttccagataatgctgctatgagcatatttgtacaggtttttgtgtggaaatatgtttttgtttctcttcggtatataggaaaagaattacagaatcaactctgtgcttaaccatttgaagaactggttttcttttccaaaatggctgcaccatttacagccctgccagcaggttataaaagttccagcttctctgcatccttggcaacatttgttattatttttttattatagccactcaggtgggtctgaagtattttgtcgtgttttttatttgtgtttccttgttactgatatcgttcagcatatttccatgtgcttattgctcatatgcatatgttctttggagaactgtctgagattctttgctcatttttaactgggttatttctctttttattgttgaatttcaatggttctttatatattccagatacaagtccttatcagttacatgatttacaaaaattttctaccattcccattccttgagttgtcttttcactttcttgatggtgccctttgaagcacaacatttgtgtgtgtgtgtgtgtgtatttttagtagagatggggttttgccatgttggtcgggcgggtcttaaactcctgatctcaggtgatccacccaccttgccggtgaaccaccacagcacccggcccgtttttggtttttttgtttgtttgttttttgagccagagtattgctctgttgccctggctggagtgccgtagtgccatcttggttcacggcaacatctggctcccgggttcaagtgattcttctgcctcagcctcccgagtagctgggattacaggtacacaccaccacaccctgctaatttttatatttttggtagagacagagttttgccatgttcctcaggctggtctcaaactcctgaattcaagtgatccacccgcctcagcctcccaaagtgctgggattacaggcgtgagccaccactcccggccagaagcacaatttttaatttttatgatgttcagtttatatttgtttttccctttgttgcttgtatttttgtgtgtcttaatatgtcttctaagtctgttttaatggatggattctccccttcctgcctctcatttatctgttgaagaattttgcctatttgacctgtagagtttcctatggtctggatttttctaattatgttcccatggtacagttcagcttctctctgtctctgtatttcctgcaaa

SEQ ID NO: 12667 - DNA, 122 bp, Homo sapiens
ttttttttttgtttttagtagagatggggtttcaccatgttggccaggctggtctagaactcctgacctcaggtgatccacccgcctcagcctcccaaagtgctgggattacaggtgtgagc

SEQ ID NO: 12668 - DNA, 131 bp, Homo sapiens
ttttttttttgagacggagtctcactctgtcgcccaggctggagtgcagtggcgcaatctcggctcactgcaagctccgcctcctgggttcatgccattctcctgcctcagcctcccgagtagctggaact

SEQ ID NO: 12669 - DNA, 426 bp, Homo sapiens
cctcagcctccccaagtattgggattgcaggtgtgagccaggacgcctacccgcaaacagaaactctttacccattaaacaataactctgtagtattccttccttcctgcccctggtaaccactatagtactttctgtctaatatgaatttgcctgttcgaggtgcctcatataggtggaattgcatatttgtgcctggcatatttcatttagcacattttttcaaggctcatccatatagcacgtatcagtacttcatttcttttagttgctgaatattattattattattatttttgagacagagtctcactctgtctcttaggctagagtgcagtagcatgatctcggctcactgcaacctccgcctcccgggttcaagcgattcttgtgtctcagcttcccgagtagctgagattacaggcg

SEQ ID NO: 12670 - DNA, 2173 bp, Homo sapiens
tagcattcagtaaatttcacaacacctttctgcctccctcttccctctcccctctccccttctccccacctcaccccacctcaccccctccctcttccttcctcttttccttccctcctcctttcttttttaccctctcctgcccctgacccggtacctataccacttggattatttacagcaaatcttacagatgtcagtattgtcttgttctgaagctaaaaaggacaatgagttcccgctgacctcggtacaatggatctcgctggagcacaatatgtattttatacaggcagtgaaaagcctacaagtaattgagagagagagaaatgtcactgtagcatttctgttgacactgcactctgcgtgtggagggaagcccggggcctggcggcagaggagcagccgcagccgcgctgtgcacccaggaacctgtccttcaggaaggaggcggcggtagaaattaatctgctcagattttccaactaatgaagtattcccaggaccgaaggggccacacagagacgtctgcggcgctgcttcccattcgcgcagatgcacacggattccgggcccagcgctaactcggatgtgttttccagctccgtttattgtcttccataatgcttaacgtactgtttgtatatgttgtccttgcactatattttgatatgctctcatatattttattcatctctggctttctacgaaggcaagctcgcagcaacactgagaataattattctccgccatcaatcaagagtctccgtggttggctcctcatgggatggccttgattttaagcatgaaatgtaactcttgctctttggggccatttcattctttgttcctggggcctgcctgtgggctcgtcgggacactagagagcaggcattcccgtggccgcgggagagccgcgttcctggctggccattcccgggccctctagaagggagcggctgagagctctttagccctacttggggtttaaaagtgaaaaaggagcagctcttcctggtggaaattgcgagcagaggctgcgtgagttccgtaactcgcacacagcctccatttggagccagaatgagcacgtgagggaccccgggcagaggggccagtgctgacattatgctccatgcaacctcccatcctgttgtgggagatggtgcagaccaggggagggagtcagtgtgtgaggggatgaggctccagtcctttcctgggcaccaaagccaaatcccccctgagcacaaggatcttccctgggtgactgcagaagcaaggagacctggcccaccgtccctgctggcttcctactgcccagccgcgtctctgcctccctaccccaaagcctgcagctcctaagtgcactatttgggctgtcttgtttgcagcggatgtttgaaagacagaccctcttctctagtgctggccttgagtcctcagagagctgctgtttcctgggtttctagctccatggaggcagaaagagaccccagggtggcctttggaggaagatgagccccctgggttaaccgagcttctgcagtggtgctcctgggtcatcactgttgccactggtcagagccagagtgtgtctgcctgtgctctcctgaacacagtggagctatttccaagttcaggtgaaggggacatggaggttaagcaaggccagaaagacagagacgtcctcttcccctggtagcaggtatttagcagatgggaaaatattagcagatgggaaatcagcagatacactcagctcaagatgcaaatttaaaagccgccagcccctgtactaaatatttacactgaacatctctactccatcatccgtcttttatttttgtgagcccgtacaactgctcttattacaaagtcatgtaaaagttgaggaaagaaaatttcacccttggaaacaaattcatgatgaattaaatttcagcatgaaaatagaaaaaaaaaattcaaatttctgttgacttttgggcttatgtcctgaaagagttaacatacattcttccatacataacttattcacgtaaattaaatggtacacccccaaaacttgtttccctaagctgatattgaaacttccattattgaacagtttttaaaaatgcaattctaatccctttttaagtttcaataccaaaaaaaaaaaaaaaaaaaa

SEQ ID NO: 12671 - DNA, 3291 bp, Homo sapiens
atcgtattttaaacttgagttcagacttagaccttatgagttgaaggtgatttcctgccttactgagtttttctgttatcagacctataatttgtttacactatactcttctgatattattagtagtagccaagattttcttcactcttttcttggaaaattggatagaactgttaaggtacagccttctgggttcttactgtccttgaatcttttcatttcttccttcctccctttcctgttgcacactaatgaagatggacatgaaatggacgtgaaacattaggcaaggcaaggcctgacagatttggctggtaaacaactagtcaactttttgaatttagacagttattaattacttaggcagagaaaaaagtagtccaaggtgccatttctctgtgccccttgtctcacacttgaaaagagtgacaccgaaataaaaggggctagctaacgattgtcccttgaatggtggacaccctgttgctgaggaatcattgttatactgcagctaagcctgtttagtctgcaaatgtaccctacaaggttgaggaagaaaggtctcatgtttcattagaacctgagaggagatgggaaactctcctgacagaagcatcctggggcaagagagaggtgagtggaaaacgtccatccatatagcaacttctcacaagcctctcttgtccatgttccaggatgattccatggccttctgccaagacagcttgcactgtgattcagaccttaacctctctgcgctctttggacatgtgcaaggtctccagagtgccatggctgatctctttcccttcagtggaggctcaagtagaagtactgtttcttctactaatgtcaccccctcatgctgagaaaaacagaatgagaaagggaaagagtggtgaagtggcataggcgataacatccttatctctcatcagtcacacattagtaccttaactttggaaatctagcctttgatgtttttaatttgggactcatatataaaaccagttttttttttttctcttttcgtagcatcttaataattatagcctacttctcttcacagtttcagctattttggaggatgactgtatgtattcctttttaaagtacctattgggactccccactgagaatttcgtatatgccacattaagtgcattttaattttgattaaaatttattcatcacttttcatgtgatacagtaacagcatttaaatgtttaatttcacttatataaatgttcatgttagaataacatacttaaaatctttttctttagatcattgtatgttattaaatgagcaatagtactaccagtcatgtcattttacatattgcttttggcactcatactctttattgctggttttatattaagatcaataataatcaagaggtctctcttttcagtaaatttcatgcagactcggtggcagaggctaaactttagtttgagagaccagtgaaaaaacctggaacctaaagttgagatgatgaagtcttacataatggccttggaaatagagagggagggctgaatctagatgggatatcacagataataaattgacaatatttgggaaaattatttgttgttagtagacctgtgcggtgatctggaagatgcaagcaaggctttagggtctgctggctttttcctagagtgtcaggagcatggtcagatctccatgattcttggagaaagctatgttggaggagatccttgcaattcctcctgttattaacccttccccttacccccaagagtagcagtgttttgctactgcaagctactagttggcagaaaggttattgagtaagtaggtggcagtcttccttaaccctgtacatgggagagcattagtctttgcagctgaagagactaagcagtagagaagattcctctcattgtcttgatgagggactgacagcttgctagcgaaaatgttgcttgaccacaggaatgagacttccatgcaccctcatcttgccattattaaagctatccagcatttgggtccagccttaagagaaggtgagagtcatgactaggccagtgaatataacagtgcatataaaagggacctagttaccagggagaaaacagaagtagaccactgaaagaggcaaaacctagtgaaaatagaattattgaacaaaatattgaacaaatacacttgaacaaaataataagggcacataagcagattgaattataacaaattctttagagctagaaaaaaatgacattaagttttaatgtttagattatttaaaaaagaggacacgtgctattaagttccaaattacaggcctagaaaatcagggggaagaattatgtcattaaatggaatgaaagtactaacagataaaatcaagagaagacgattagagacttacaagaagttctgaaggggaaaataaaaaaccaggtggacaagcaataactaaataatagatgggatgaagaaagacttgagactgcagatcagaacagctggctgttgtctagccaggagagaagtgagggaaacacacaaacacctatgcagagtctggcaaaatccctgaattccaaggaaaaagtaaaaatcctctaagcttccatatgaaagaccaagttgcatacaaagaaaaagaaccaaaccgacaccaggcaatcttccttaccacacaagcagaagtagaaaaaagtggaatgacgctacacagttgacaaagaactgcaactcaggaaccttgtactcagccaaaggaccctccacatgtcagaatgaaaaggagatactagtttatcctatctgaggaaaactaaagaaacaacctgtgaatcaaaatagagacctttatacaggggaagataaagaagacagagaacagtttaataaagaaaacagtagatcagtctcactaatataaattcaaaagtaaaaataaaatattagcaaattgaatctgccattgtatcaaaagaattctagactatcaacactagagtttatttcagacatgtaatgatgatttgttaccaggaaatctgtcaacataatttattctatcaaagggacaaataatcatagaagctattctcatgagaatttgaagtaaaatgggtataagaaggcagttatgcctgtaatcccagcactttgggagggcgaggcagttggattgcttgagcctggtaggtggagtttgcaatgagccaagactgtgtcactgtacttgagcctgggcaacagaatgagactcagtctcaaaagaaaagaaaaaaaaaaaaaaa

SEQ ID NO: 12672 - DNA, 398 bp, Homo sapiens
ctttggcttactgtgcctacaggataaagtctgaatgccttcatggaacgtacatggccatcagggatttggttccttcctgcctctccagactcatttctcaacacactctgccttgaacttttttctttctgtggcactgaactggagtttttgtatagctatcacattctttcttaccttggtagctgtttttctatctcaagtcctttctgccttttttgtaagttcgtttctctgctggactcttaatacaattttaattctgaaactccattctaatccaagctaggatagtttcccctttctcctgttttccttgtagcttgtgtaaacctattttgttgccttaatcacattattatagtatttccctgtttgtcacttttttgagtccc

SEQ ID NO: 12673 - DNA, 355 bp, Homo sapiens
gtgaaagaggtgacatttttcttagcatacacattatcagccttgaagtaattttctggttataaaggtttaggagaagctggtttatttagtaaattaattggtaatctgaagctattcagaaagttactgcgcttttccaagattactgttggtgctaccagagaagatttaagtagataatggccatttagagacagggccgttaggcaactcagaactttctatttcctagtgctttgccctcacagagatgctctttgtcatataaataaatgaagaaaagctgacattttaaatttcagcattgtctcattcagatagttaatttgaatctgatagggcaatacttcat

SEQ ID NO: 12674 - DNA, 2489 bp, Homo sapiens
ctcagtcgactgccaaagcaatgaagcgacctctcgaagcaactgtagacctggtactttgacctttcacctttcgctttgcatgtagcttttcagagaaccatctgagatttgtattacttgtaaaatactggttgcaaacaatcattattattaatttatggaaaaaatccaataaggtgtttagccatctcattctcatatgtaatctgtgaaataaattaatcctaacaaattttaataccttttccaaaagagtgaagcaaatttaaattatttgactcagaaaatgttcattataattcgtattaacctttaaattcaagaaattgccatttagttaaagaaaagaataggtattaataataacaccaatgcttcgtccccccttagaatagtttaactcattttaaaagctgaagccattttttttgttgttgttgcttgatagtttttcttttccttagttgagatgctaccgttttgggttacagaaatcatgctttcgctctcaataacaaattctcactcattcgacattgccgctgtttaaattaaggtgcatggcagaggcatctccttagctgtcatttttaaaaagaatgttgcaattgatgatctctgtgaacatggaaggtgtgtttgctttaagttagacatatcttatcgaattcttcatttctaggcctttccccctggtgctcttcatcctttaccaaagagacaagcacttgaaaaaagcaatggtaccagcgcggtctttaaccccagcgtcttgcactaccagcaggctctcaccagcgcacagttgcagcaacacgccgcgttcattccaacaggtatgtgcccttactgccctacgtcctgtgcccttctggtcatgtgctttcttctcatttctctaagctgtttggtggcatctagtttgcttttgaaggtataatacagtttgaaattcatcgttgtcctagctatctaaatgtatttaccttactttgaatgatagctaaagactgttaggattctaaagccaaatatttgatagattgaagagacagatttaacccatgagaaacagcagttagggcttttggtttcttgtatttgcacaagccctgtaaaattgtttatgtaaataagaccttttatgtgtgacaattgaaatttgtccttaactctgaatgacctaaaaatagcaattccagtaaatactaaccatttttttctatttctattcagagcactaaaacaatgaggctattcaaattaaagcaattctctactcatatttttatattcattctatctctttctccatccttctcaactttcaccaagttcacaagtatatagagctcttatcctcagtgtctaagccaatgcctgatactattacgtacgatgtgcattaactatgattccactaaaagatccattgtaatagtcatagaatcttagagtttaaaggactcttagtgatctcctcatccagctgattgttttacagatgagaaaactgaggccccctaaatgagaagtgactttccaaggtgccacaactaatgagaaaaagaactgagtttccctgtgaccaaacccatttacatcacattctaccacctgggcccgcctatatatacacattccacagagttctcctgaaaaaagaaaaaagcagataaaagtgaatttttaaataactgaccccaaaaagtcagataaaagtaaaaaaacaaaagtataaatcatgtcatccctcccccatttgcaccgacatctctaaccacagacacacacacgcacaccatacgcaaagatagtcaccataattgaccatgtttttcaccttttagtcaatgttagaagcaaggggtaacttaagtcctggtgggaagaccatccattgagttctttgaaagtcaacatttttcagcccacgatagtgaaatgaaagtaaatataaatgaataacaattctaacaaaaagagttttttgattcaaatccattaattagaacttttcgagcttattatccatttccttaaatcccatagcttatcagagttaacatcagagggaggtaaaatatttctgtgatattctttgtataaaatctacactttgaaatggattagtaacctgtgaacaatacatattttagttaacatataaattatgtgagcaaagtggttttcagtgtttttttcttattttagttttgaacctgtcttaaactcacagacttgtagaagaaatctctaattcagtatttattaggagttcacttttgccctattacagccttaattagtgacatcccagtgctgttacagcatagcagtgtcttaatatgtaatctaattgaaataacacatttgtaaaataattactagaaggtaaacttacgttaatgtcctgtgtggtttctacaaagtgtgtcattgtagacctcttggccactagatattttaagataaaaaaaaaaaaa

SEQ ID NO: 12675 - DNA, 6504 bp, Homo sapiens
ggcgggcctccaaggccctgctcccagtgggcgcctatgaagtcttcgcccgggaggcggtgggtgcgggtgcagctcgggccctgctgcctggagatgaggacgctggtcgagctcgggccctgggctggggactttgggcctgacctgctgctcaccctgctcttcctgctcttcctggcgcacggggtcaccttggacggggcctcggccaaccccactgtgtccctgcaggagttcctcatggccgagcagtctctgcctggcacgctgttgaagctggcggcacaggggctgggcatgcaggccgcctgcaccctgatgcgcctctgctgggcctgggagctcagtgacctgcacctgctgcagagcctcatggcccagagctgcagctcggccctgcgcacatccgtgccccacggggcgcttgtggaggccgcctgcgccttttgtttccatctgaccctcctgcacctgcggcacagtcctcccgcctacagcgggcccgctgtggctctgttggtcaccgtcacggcctacacgggtgagcactgcttccccttcccctgggcccctgaggacctctcacctgtgtggcctccatgcacactcaggcccgtttgcacccaggatagggggctgctggcccgggtggccaacaaacccacaagaagaggcggtgatttcctgggatctggcgggtagacgagggcctgcgctggacatggggtgcggtggagcagcctgtcccctgccagggccatcctgcccactgcacctctccccagtcgcagctattcttggtcctcccagaagttctgcctctggggtagtagggacagccgaggcagacgattcaaggcccagcccagtttcctggtctggtgtgggagtccctgcaccctctatcaccccttccagagcgacaggtcctgtctcacctgccccagttggcctccctggcctcctactgacacctgcatcctgcgatctctgcctgcacctggaccgaccgtggcacccagctctcatggtcccatcacccccttgtgagctccctccactcagaccctccgtctgatccagtcccccatgtctgctttcccctccgagcgctaggctccaccaccacgaaagcctttgctcagcaagttcccaggacaggtgtccacagcgctggggctgcagggagagccaggggagccggctcgtgctccaggcaccacaggaagggctgcagggagaatggtgccaggtctccttccgggggtccgaggtcctaatcaggacaggaccagcacttaggtccatggcactgcccacgacccagcactgggcagacaccacggaatctggaccacaaaggccacaggaaggtgccaccagagccctgtacagatggggaaactgaggcacgggtgagcgggagctctgcagggacacggctctgtggcagattgcccgggcctctgtcctgggtggcaccggagagctcccgtcaagggtcctgcctccacgaggcacagggcgcctggtctcagggacggagctgcccatcctcagggtcctggtttacacctgggcggccgcagactccatgtccctgtggtccctgccctccgctaggcccactccctgctcttccgtgcccagaggcaggtccccggtattggtggattctgttatttggggtggtcacccaggcctggggctgcaggacagcggcccggctgccgccgccttcccttgtctcacatcgcacagccatgtcgtcttctctcctctgctgctgctcgtttatttctgagatctctctctgtctctcctctctctctctgtctctcctctctctctctgtctctcctctctctctctgtctctcctctctctctctgtctgtcctctctctctgtctccctgtctctctctgtctctcctctctctctctgtctctcctctctctctctgtctctcctctctctctctgtctctcctctctctctctgtctctcctctctctctctgtctctcctctctctctgtctccctgtctctctctgtgtctttttgtctctctctcactatctgtctctcttagtgtctctctccatctctctctgtccgtctttctcgaaggccacatcccacagggtggggtgctggagggcagcatgggcggggcacgggatcccggtgagatgtcgcgagggtgttggacggccctggggggccccaagctgctgcccctgacccagaccttggctgacccggccttgctgcatcgtgtgtccatcggtgcgggggaccaggcggggcttcaggagccgagagcagctcccaggcctgcacacagtggggctctcggtgtggattcggtggcggggatcaggtcctggcctgcagaggggcgtcaggcagggctggggaccagggctgtctgtgctctgcccacagccgggcccttcacgtctgccttcttcaaccctgccctggccgcctctgtgacctttgcctgctcgggacacaccttactggagtacgtgcaggtgtactggctgggccctctgacaggtaagggcaggggcagggtggggtccctagggctgctggggcccacagagcatcctggcacgtggggtcctgcagggtggaggtgagggtgcctggtcagtgctcctggggaggtctctgcagtgggcatggtttcgggggtaggggctgtgacggcatgtctcactgtggacaccgtcccggtgccgagcaagctgcagccaggtaaggaggccacaggctggggaaaggccaaccttgcaaggggtgctgggcacacgggggatggtgtctgcagtggggctccatgcacctggggttcccgtcccaggtggcatctccacacacccagagccagactccgccgaggggggctcattctggtgtccctaaagcctcaggaggcagagagccccgcttagatgatatagggtgccatcgtgcacttatagggctgtgagcatggggctggagcagccaggccctttgcatcctggtggggcagacccgggactcgctgatgcacacaggggaccccagagttcccccacagtgtgtgcccctcctttcttatatcctggatccaagcagaggagcagcatggggaggtcatggagccccctcttggacctagatctggggattctggcccctggcttcagaggcccaggtggagcccacaccttctcctgcacctgctctcagacactcggctccacctcactgaggtaccagaagggcagctgggttcctatggaattctggaagcttttttcagcttctgctggctctacactggggaggtctcaggggcaatgcctcagcctccccttggggggaaagacaggagctgggggtctctcaggcacctggccctgcgatggtgacactgacgtcatcgtgatttgtcgccatggttctgatgtggtcacagtctctcaggcatgtgcagggtcctaggaagcatatgaagtgcatcaggaaccccctcctgcccccgttgccgaggcagcactgccctctgctaggaacagctccgtgttggcctctctgtccccacacactgggcctgcagggcttctccgagactcttcagttcaggtatcaaccctgggctgtctcctgggatgtggggggcggatgttctttccttgcctccccacgctcctcctgcggatccttcactccgggtgggtcggcctcttcctcctgatcagctccagagccccctctagttccctggcatggaaacacggcccgggtgagctgtggtggccccggaggcctctccgctcctgcacaggccttgcttcctgcgggtgacgaggtcctggactctctcctgcccaggcttctgggtgctttccttagttcagcaccagtgctctgtgtgggcagcgtctcccccgaggatccgcagctccgggttacccgcaggcgtccatctccggtatggtgctgcccttcactgatcctggttgtatttctgtttcctgctttcctcatcgcctcctgtttcggttgattccttctttttgctggtgcccgtctcacagtagcttcctgagaacggggacctggcaggtacacttcagacctcctgtgtctgaaatagtgtcctggttctgacctgcacttgagtgtcggtgaggcctgggcagggttccgggtgggagctcagtttcgtcctgagtttctcaggccccaaccatggcctgtggtggcttcacgggctacaaggcaaaggacgcaaacgaagaggcttcacgtgacagggttgtatgctcagccagctctggaggctggagtctgagctggcagcactgacagggtcagctctcctcggaggctgctggggaggagcctcctgcctcttccgggctccgggggcctctggcacccccggtgtccccgggcttggagacgcagcactcccatgtctgccggttcccctggccgcctcctctgtgtcattgtctgttctcttcatatagggacaccagtcatcgaattggaggttcactctactcaagtatgacgtcaccgtgatttcactgattttatgtcccaggccgtattctaacaagggcacatcctgtgttctgggaagggcgtgtcgctggggaaatactcttcacccggctgcaacctctcactgtagaactgcctctgtggagaagcccaaagggcatttgcggcttctaggagccaagtaggaggaggctgggatccgtgtttcaggcgggactccaggcttgggcgggcctgatactcgagtccacatgccccctctagagaggaacctgtctcctgccagggccagggaggggggcactggctgcttctgtattttggggtttggggccctggagcttcccatgcggaattgccgtccctcctcctaggcgagtcccagggccaccccatcccacagggacccgggcgccagcttctgaaagcatggggcatctgcggaagaactgggttgtttcccagctttcgtccctgcggaggggcgatccggcccctccatgtcagcagtgtttggtcgtccacatgcttgtcagccccacgctgtgctcctgcgtctcttcccgtctcatccatctggatgcttgacacctctgacagcatccctttcctgtcatcttagggcagcttcaggaaaccgaaaaacaggcttgtgtccttccattaacccctttatccacaagttcagtatcagcatgagccctggggagctccaaggctgcagccaggagccccgtagccaggtgtggacatggggctatctccctgggtgtgagcggccaccggcacctgctggcagcacccctgagcaggtcatcccgcctccctgggcctgccctcctgggaacagagctaggaccagtgtgggcctggagggccgagtgaggggcaactgtaggcaagctgtaggcacaggggccactgtcaggagccacagcagctgcaggtggtgacaggcagggccccctcaggccagccctagtggagctcacacactgtgggttaaatccttagaggagtgagatcaaacttgaagaggatctactctccccttctgcccggaacacctgcccttcccaatgacctggaaggcaggcggggatttaggagtctctgctcctggagttctgggagaacgttcgcatgaggatttagccaggcccagcctcccacccaggggcatccacatctttcttgtccactcacatcccccacctctacgccaggccacagccctgcaagcagccaccctgggacgccacatcaggtcccggaggaaaatggccacagaagctctgggagtggctcaggacaatgtggggggaggggaattccagtcactcatcccagagggtggtccagaagtacaaggaaccccaccggcttgcccccgtccccatggctggcatacccagagagaggggcatgaccagggcgggaagaccaggaccaggcaggagctgggcctcagggttcttggggctcctggccaggctgcctggctcgcctgtcctggcacaggcctgggagtgggtgtcctgtctgtgtttgggcccaggagcccgcggcccacctgggacctgccttctcttgcagggatggtcctggctgtgctgctgcaccagggccgccttccccaccttttccagaggaacctgttctacggccagaagaacaagtaccgagcaccccgagggaagccggccccggcctcaggggacacccagacccctgcaaaggtgtccagtgtccgggagcctgggcgcagtggtgttgaggggccacattccagctgagtggccttgctctgtgtgagccccgtgcgagggccctgcttgtagctggaccctggaaccttctgtagctaagagggaatcctggccccctccccagaagccatttgtcaataaaccatttctaaga

SEQ ID NO: 12676 - DNA, 397 bp, Homo sapiens
aaggtctccagtggtgtcggattagaatatgaggaatccgtctgagctcattctccacaggatcccacgagggaaagcctggcttttccctgtgcagatgccaggcctctacaggttccagaaggttcctctgctcctctgagagggcagggcacttgcacagggaacaggcagccgaaggcagccacagccctactggaaccagggtttctctgcctcctgggaagaggtcagtggatgggttggggagggggacaggcggccttcctgtgggagtcgaagagcctggggcctcccctccttggaggcgaccagacaccttccctaactggaggaaattctgaaccccagacctggaaagttcaaagctgaaataaaatcgccccttgttttgcga

SEQ ID NO: 12677 - DNA, 16106 bp, Homo sapiens
tggaaattcttttggttcatgaggtggtgtttggtaatagaaagaaagggtcaaagttggcaaagtgatgcaggtttagtgtcctttatctgaaatgcttgtgaccagagtgtttcatattttgtatttttccagattttggaatatttgcatatacaaaatgagataacttggggatggaacccaagtctaaacatgaaattaatttatgtttcatatatatctcttatacacatagcccgaaggtaattttatatgatatttttagtaattctgtacattgaagataggaagggaaaaaaataataattctctgcacgaaacaaagctttgactgaccagcacatgaggtcaggtgtggaattttccaccatggcactcaaagggttttgaatttttagatgagggatgctaaatctatatgttggattgaacttccattgtagaaaaaacttcttgttaggagcagactcctaattcgcctattgattgattgattaattgagacagagtctcctctggcccaggctagagtgcagtggtacaatctcggctcactgcaacctccgcctcctgggtttaagcaattcttgtgcagcttcccaagtagttgggactacgggcacataccagcaacgcccagctaatttttttttgtatttttagtaggcacggggtttcaccatgttggccaggctggtctcgaactcctggcctcaagtgatccacccgcctggtcctcccgaagtgctgggattacaggtatgagccactgcatccggccttaccttattattaaaaagttttgtgccagccatggtgttgtgcccttgtagtcctagttactcaggaggctgaagtgggaggattgcttgagcccaggagttcaaggccagtgtgaacaacagtgagaccctgtctctcaaaaaaataaaaaataagttttctgtatatttgtcaactaattagctttaggggtatgacgtggggtatgatacggaaagcagcttcagtttcatgatactaggatggaaatcaatgagaaaaacttggaaaccaactgcaaaaaccttaaccaatcacaattttttatgtcatttgtatactatttatgatacagacatggtatatactttatcttgaaagttctaggcggaaaggttaacatttctacttatgtattttcctgtttttgtgcttatctagctttttttaaacaatttcttctttgtattacagtcttggtcctttagtgagtaaagtgaaagaataccaagtagagacaattgtagataccctctgcactaacatgctttctgataaagaacaacttcgagacatttcaagtattggtcttaaaacagtaattggagaacttcctccagcttccagtggtaagcaagagcacatttttcttcctatttctttttgtgtggaggtatttctccccacccttttttccccttctggccaaggagggagggaggtggctgtccttacagatgttcataggaatccctttggacaattaagaaaattaaagcgtgaagccttattttccttagaaataaatgttaaatgaatattttgattgaacttgtatgtaatatgaatttcagtgaaggatttttatatgttggagcaagattttatactgtgtgtaccatgactgcagactagagttatgccaacctatgcagtgagggaagagataaccaaaatattgcatcctgattagttcactgtttccagtattaattttactttgcgtcagtatttgctatgtaaaatgtaacaccattcagacatagctgtggaatagttcagtttactagtagctttaattaaagctgagccttttacagctacttggtaattaaacaaatttaaaactatgattaatgtatttgttaactaattagcttttggcctttgatagaaatgtgtaggtaatataaattttagaattggtcttgactactaaactattgctaaaattattaggctaaaagtttttgtctcatctgcaaaaggtgagattatcacctatttcatgggaagatttagattggtaataatgtagtctgggggccgggcgaggtggctcacgcctataatcccagcactttgggaggccaaggcaggtggatcacctgaggtcgggagttcaagaccagcctgaccaacatggagaaaccccatctctactaaaaatacaaaattagccgggcgtggtggtgcatgcctgtaatcccagctacttgggaggctgaggcaggagaatcactttaactcaggaggcggaggttgtggtgagccgagatggtgccattgcattccagcctagggaacaagagtgaaactccgtgtcaaaaaaaaataaaaaaacaaaaaaataaataatgtagcctgggtatgttatttccactcatgtacttgaatcattcactgtgctagttttcatgctaaaggctgcatacgtaaactagtctaaacatcaatcatatgggaggtcttactgttccttctagtttgtagatgggagaactgaaattcagagagattaggttaattcacccaaagttgggtgagtaattgggtaaagattcaaatccattttcttttaatccaaaaaggatgctttcttcaatgtatcataccagtgttattttacctttattaaatagttacttatttcaataaaacatttcaccaactcagaagtatgttatttataattgtattagctatgtatatattttttaattttttttctctcattgaaatgtgtttgcattgagccaatttccggttcttacaagaatttttttaaccattcagattcttactttcacagtgacttgttctttttcttctctcatcagtaacaacatgacctactgtaagtagtaacaattctgatttatgagtcctggaacgaggtttttgctttataatgaagttacggaatctttgggttggaaaggaccttattaaaagttatggctgatttttttttttaaagaagctgctaagcattggagctcagaatatatgctttttaattcactgaagtttaaaaggctagtctactagaaaagactcaaatagagaaaactctccttgctgcttttcaatctaggtgtgcaagctctacagctactactggctccatagttagcattcataccaatgcatacagattatccagtagatagcatagttatctatctactattactagttatctgtaatatctactattatccagtagaaagaatctgctgacatctgtattgttttctgtgtcctttaccccttctgaagttgtcatctctaattcttgtttatgtccagtaagttattttattgaaaagcagcctgttttgaaagatgtgtttttctcccacagatctcctgtgtctcatgatcaggtgtggagttgttaaatatttggtctaattcttgtttatttctataagtcattttattgaaaagcagcctgttttgaaagatgtgtttttctgccctggatctgttgtgtctcatgatcaagtgtggagttgttaaatatttggtaactaccatgaatataagagggaattcaacatgcttgccttgaaattattattggcttcttattcatgcaggctctgcattagctgctaatgtatgtaaaaagattactggacgtcttacaagtgcaatagcaaaacaggaagatgtctctgttcagctagaagccttggatattatggctgatatgttgagcaggtaagtgtgcctgtttatttccgttactcgtaatacagataactacattaatttactaaaaaccctttctagtaaatataataaaacttggtcagaaattattcatatttaaatggtggctgttttatcaatttgtgtgattgggagtgagggggaaataagctaattacactaacatataagtatataatattgtatagtaaacattttgtagttctttaaagtaattaataaaatttgtgattttaaattttttttagcacggttcatgttttgttttactcatatattcttgcattcagtggtgtatttagataaggagatgtgctggtagttacggattttccggttaaaagaatgctggtaatcttcggtaaccatattaatagtgcatattttaggggagggaggaccttggcttttatgtatttgttgctttttcactttcctttggaagtcagatgttagaacatagacagacctaagcaactcctaggagaaaataccttaaaggacctgtcaatttctgattctcatattcattataggccaccattatttgtgtgtgttttttgtggcaaattcatgtcaacttaaaaacaatcaagtgccttcaggtgggtgtgtgggtgtgtgtgtataaagtgaggagctatcatcctggcactgaaagagcttatactttacgataggacataagaacaccgatggctacagggcagaatgggactaaagactaactgggagcatagtgtgttttgggttttaaaatggaaggattcaagaaaattgtttttatggaaagtggcatttgaattgggttttgaagaatgggtagcccttcaatagttagatgtgcccaggtgtagaatacataagtagtatgcgaatggggaagcatattctagttttctagaatagagaatgaatagaaaagcagtaggaaatcattctgatagattggggtcatgttgaggtggatgaggaatttatgtttaatttgataaactgaaaattcagactttttgtcctgtgcatgatttaatcacgaacactgattgtcctggcacaggtttgggtagtagtgactcattgaactatacatttgagatgatttggaagaggggtgttggaacaacaggaacaatgaaactatatatagaggaaagccaataagggagagggagaactcaagagaaggtcagttttttagtgttgtgaatccccccctaaaaaagcaatacagaaagtcagaatacagaaaatcatttagatttctttttttttttctttcttgagatggagtctcactctgtcacccaggctggagtgcagttctgtgatctcagcttactgcagcctccgcctcctgggttcaagtgattctcgtgcctcagcttcctgagtagctgggattacaggtgcccaccacctccactggctaatttttgtatttttagtagaggcagggttttaccatgttggccagggtggtctcaaacgcctaacctcaagttatccacccgcctgagcctcccaaagtgctgggattataggcatgagccaccattcctggcacagaaaatcatttagagattttggaaggagaaagtgacaagatgattgtgtagttttggttgttgttgtttgtgtttggttttggttttgagacaggttttggcccaggctggagtgcattggcatgatcatggctcattgcagcctcaatttaccaggctcaggtgatcctcccacttcagcctcctgagcagctgggactacaggcatgcaccaccacacgcagctaatttttgtgttttttgtagagatgaggttttgccatgttgcccaggctggtctcgaactcctggggtcaagtgatctgcctgcctcagcctcccaaagtgccgggattacaggtgtgagccttcacacccagacttgtggtttttgtttttgttttttaatattttcccaagccaatcaattagatatcctataattggggatttaggtctagattcccggagtcagtttggcaatgtaaatttcagtgctgcattcacttagctcaggtttcagttgcattggtagataaagtgataatttaatttttctttcactatgaattagtctcaactaaatttgtgttctgaatatttgcattgaggtcagaggccagacatttagtagtggccaggcatcttgaattcatttgttgttttctttctttttttattttattttaaggcaaggaggacttcttgttaatttccatccttcaattctgacctgtctacttccccagttgaccagccctagacttgcagtgaggaaaagaaccattatcgctcttggccatctggttatgagctgtggaaatatagtttttgtagatcttattgaacatctgttgtcagagttgtccaaaaatgattctatgtcaacaacaagaacctacatacaatgtattgctgctattagtaggcaagctggtcatagaataggtaagaaatctttaaaagttttacagttttctttaattaaaaaaattaatgcatgtttttaaagaaccattatgcttttcttaggtgaataccttgagaagataattcctttggtggtaaaattttgcaatgtagatgatgatgaattaagagagtactgtattcaagcctttgaatcatttgtaagaaggtaagtttttaagatctctattttttacaaaaagtttttccttaagagtagaatcataaggtctacattaggtgtgtgaggagaagcggccttttggatttcagatataacagacaatacagtatttgaaactaatgtcatcttgctattataaaatgtggtcatcacatttattttgaaaattttccttgtcattgttaggactttatttaaagaattttggaaaggtatttataattattttgggtttactttagaagggaagaaatgccagtgtaataatgtagtctgtactgaaagcccagcaggataaattattcgtcagaaataagtagtgaattgccttttcaacaatttcttaggtcacatccattttgctaggtcagtgattctcaatttggaaactgattctaatatattttttaaaagcttagtaaaagttgtgtatttgtgtactagaaggcaatacaagataagtaacattatttttcctcttgactaatgcagtagcatggtgtcttgagaccttactggttgttttctgcatttatcccttgacactcctggttttgagaagtggcttttaatcataccatattctgaaaatcagaaattgttagattcatttttgttcctttagttgagaaacacaaagtattcttttatttgctggccctgtgggcatttatatgttctgtcctctcattacatcggtagaagaccaagcctaggtgaatatgcactggcatttccacaaataatcctagttactgaagagcacattcatctgggtttggttttctaataacatgttgattatataccgatttctgtctatactgccatacattaaccataacatagttaaaatcgggattaggggagttcatcttaaaattgattaaataagtacaatttgaaaggtaaaccttttaaaatagtaagtccatgggagagaaagagcaagaatcattggtgctagatagtctgggaactactgtcctatgttattgctggtaataaagcaaaatgtggcaggtaatgaatcaaggagtaaaatgcagctcttcaaggcagcttttgtttttgtctttagatgtcctaaggaagtatatcctcatgtttctaccattataaatatttgtcttaaatatcttacctatgatccaaattataattacgatgatgaagatgaagatgaaaatgcaatggatgctgatggtggtgatgatgatgatcaaggtattgcaaattaaatagaatcttttgagtttttgtgaaagacacttatagatggagatgattcttagtccaaattgtactgtttgttttatttagttataatagtgaaaagggaaatgatctcaatatttgacaacagcaaattaagttagagggcatccatgtattgaactgttatgcaacacattaaaaaatcatgtctaaaaatcattcattaatgctgttaataaggtgagtgaaaagtatgtagcaaaaattgctcaccatagcccaattttatttctttaagtatacagaaaaaaatctgtatatttacaactagtactattaccacttgttttctcttggctaggaactatgtatgatttttggttttaagtactattcaaattttctacaaagcatttttgtaaggagataaaccaaggttttagaaagaattgaatctgtagatatacatatttagggcagcttggcttgaaagaatattagtttgtttattcatagttcatgaaaaattctaaatactgttcgaggccccatttaacattcattaatagcttacaacatttctgaggctcctaagattgatgtaatcacacgatgatttatgatatttactctggaaagtagtagcagcacttcaaggacataggggttgctcatgtcagttgtttctgtttgtattggaagaatcataataacaaatatttaagttggtaaattactaggtaaacaggttggtggattttttgttatttttgagaatactttttagtttgattctttgaatgaatttacataacagctttcctgtcaagtcagtaatttcacccatctttaaaaaacaagtaccaaaagagtttcttaacaccatatactcctctagcagctgctgcctagtttctctcctccacaacagagctccttaaaagaatgcagttccattttcttttttccattctctcttgaatccactcctccagtgatggatgagattgcaaatgtttgactctgcctatcgtattactcagtctcggcaacatttctttatttagcttctgggataccattctagcctggatgtagtcctatcgttgtgattactccagtcttcgatgctgtttcttcttcttcaccctgaccactgtacttacagtatcccaaggctcagtccttgaacttacctgttatactgttgatttttttgttgatctcatctagtctcctggctttaatatcaatatgctggcaacccacatcctatctttaatccagatctcacttgtgaatccagattcatatgcaactgcttaattaatattgctgcttggatatctaaaatatcttttccctgccccttccccatctcccacctaacctgttcttctttagccttttccatctcagaatggtacctctattcttcttagttgatcaggccaaaaaccttgcagtcatacctgattcctttttcacacatccctcagctagtcttccacctcagaactatctttcattttattgtttttattttgtttatcacacttagtaactttctgacatactgtaattgatggtctcctacctattagaatataagtttcatgaaggctagatgttttaatctcttgattgactgctttattccagtgcctaggacagtacttgacacacaggcaatcaataaatgggttgtattaatgaagggaaactttagcttatattttaatatgaatatcttttgaagaaagcagtagcaatgtatattccaggttttgaattttgtttttttgtgtgctgtataacaaactaggtacttcacctgctttatcacttagtatgaattatacccattaaatgacttttctaccatggtgtttttgtgatttataaaatcaacgtaattttagtgaataaggacatttgttaattttttataatcttgtttttaataaagcttatatttctgggaggcaattgccatagtgtattgacatggaaaaaattttatgtgctcttaacttgatagtgtattttggcagtatcttttaactttatttgaatagatattggtaaataagcaaacgtcttgcatttagcagtatttggttgtattttcctgtaatgtgctaaggtgaattttaagcttttgagttggaaaattttattattttgttgtatactgtagaatcttctaaggcctagctggctacatttgactgtcaaactaagctaattggaataaaagccagtaaaaagttactactccgctctattatttcaaggctatgtatagtcttatctaagaataaagaaattattgtgagataattttagactatcatgataactgctaatatttctgccacctttctgacttcatattacccaactaattaaacctgatggtgttagaaagaaagattttctggagatttcacacacatgttatccatcaagtatagataagtgagatacaattcttagtgcttttgctttgaatgtttaaggtttagcattaggggaaaaaatggtcctctgttaagtgtgcagcattttcttggtataattaagcaaaaatggttttgttaaagtacattaagacaaaattgtgaaaggtttagaatatacatatttgttcctcacagcttatcaacaagttgagtgaaaagccttgtagtcacaaagctgatgtcaaccttctttttattcccagcaaattagttctacagtgttttgggattggtaaccattctttttatcacctactctattaccacaaatccatttcatggtttgtcttataaagtccctgattgtttgcttgatttttcctatgctgttaagtaagttctttgaattttgtttcaaaggctgggaaatttatgactataaatatttatattctaaagaagttgaatgtgttaattgatgattttaaagggttaaaataagcagcagttcattacaaagtaaatgagaaaatgtttaactaattaaaaataccattatgtttgttttttaagtttaatttatgtgcagatttacagaaataacaagctctttgttcaagttctagttctgttgaaacctacctgttgctgtatatgttaccggaaagttagattaactgatttggttaagaatatcaattgattttctgttttaaatgttatacttctcttgtcattaatagcctgtttacattaaaacttacccttagggagtgatgatgaatacagtgatgatgatgacatgagttggaaagtgagacgtgcagctgcgaagtgcttggatgctgtagttagcacaaggcatgaaatgcttccagaattctacaagaccgtctctcctgcactaatatccagatttaaagagcgtgaagagaatgtaaaggcagatgtttttcacgcatacctttctcttttgaagcaaactcgtcctgtacaaagttggctatgtgaccctgatgcaatggagcagggagaaacacctttaacaatgcttcagagtcaggggggttttaaagtaaagtttagaaaatcatgatagtaaatgcaatgcttttaaaattgtctttatatggaaaggtgagttccagaatatctatagagaagcagaaagttctaggatatgtttatatagttaatgcatgttcatattatgttagttgtaaactattctaattgaattattcttggctttacatgataatatttaaataattttaagattcagtaaagtagtctttatctttgatgttaatagagaagtcttagagctgtggagtcatactacttgcgatcacataactgacttcatttctaatttaggtgtgtgatcttgggcaagttatttagtcattttattaaacctcacttttcttatttgtaataagaacgtacttagaaatatctacctgtggttgtgagagctggatgatctgtgtagagcattcagtgtagtgcctactacatatatgcttgatatatgccagtacttactaataaaatacacattttttcacttgagggcatttgttttctaagatcctaaacattagagctattatatgctcccatttattgaatatttattacataccaggcattctcctatcttatatgtaatctctacagcagccctatgggatgcacaaatagtaggtcaatttttatagattacaaaacagatattgccagggattaaaccagtggagaggacgggacacacatactgtatctatcttgtttttaagtagtacaaataaatacatttttgtggtgaacttactcataaaggtgaatgttgaagattaattgtagaaggaaatgagataaagtgtatggaggacatatgcaagtgagtgagtatatagaagtcaggtattgctcagtagagttgccaggaattctgacaatgctatggaaagttagacattttttttgttttgtctagttcttagatcattgtgtaattagggtatgtgtccatgtagtttggttgttgggatttttcttggctttttgtttttactctgtacttgctttgctgttgaggtattctagaagctccgttgatagctttgcatccgtaagatttgttagtagagaccctgtttgttttactgactagcaaaacattaggaagtttagagcagatgtcttttaatcatacccctgctgcttgtagctacatttgaagtgaggttgattccttctaacagcaaatggaaagtaagaaaaggacctgttcgatggttgcttttccataatttgtcttgtttcctttgatttttatctgtgctgttgtcattcaaaataccatttataaattaacctcctaaattttttattgaaaatatgatttgattaatttctttctttctctttttttttttttttgagatggagtcttgctctgttgccaggctggagcgcagtggtgctatctcggctcactgcaacctccacctcctgggttcaagcgattctcctgtctcagcctcccgagtagctgggagtacaggcatgcaccaccacgcccagctaatttttgtatttttaatagagacagggtttcaccatgttggccagaatggtctcgatttcttgacctcgtgatctgcctgcctcagcctcccaaagtgctgggattacaggcgtgagccactgtgcccagcctattaatttctttttagtcatgtatgtttcacaattaaaaattaagtagggaagactattttgttgctctctggaaagctaaatgatagcttttctgtaatttcttatcagtatcaagcaaatatagttacaagagaacatatataatacatgcaacaaacttgatcttgtgttagcaatagcaatagatagctgaattaggaatttaacaaaaaaagataaactcttccctttatcctcattctccataattcatgttaagtgtactgaggaaataccaacagctgaaccagctaatgactatatgataattgcaggttcccaacattgttaaagctcttcacaaacagatgaaagaaaaaagtgtgaagacccgacagtgttgttttaacatgttaactgagctggtaaatgtattacctggggccctaactcaacacattcctgtacttgtaccaggtatgaaagaaacataaatctcttttgggacttattgtagcctttttgttaggacttagataagcttaaataattgtttccttttaaaggaatatatgtgacaacttaatatgcacatagagctaactttttaatctaacaatcttgaatacctgaagttagaaatttgtaagtaaaaggttaaaagtctcaccctaaaatatttggctgtaatatttattgtagatggtgaaaatttctacttatagaaataatataatgaagtgggaacattagcagtactataggggttgatttttaatttttctttcttaaaagtctgcacagcaatgattggattttttgttggctttttaggaatcattttctcactgaatgataaatcaagctcatcgaatttgaagatcgatgctttgtcatgtctatacgtaatcctctgtaaccattctcctcaagtcttccatcctcacgttcaggctttggttcctccagtggtggcttgtgttggagacccattttacaaaattacatctgaagcacttcttgttactcaacagcttgtcaaagtaattcgtcctttagatcagccttcctcgtttgatgcaactccttatatcaaagatctatttacctgtaccattaagagattaaaagcagctgacattgatcaggaagtcaaggaaagggctatttcctgtatgggacaaattatttgcaaccttggagacaatttgggttctgacttgcctaatacacttcagattttcttggagagactaaagaatgaaattaccaggttaactacagtaaaggcattgacactgattgctgggtcacctttgaagatagatttgaggcctgttctgggagaaggggttcctatccttgcttcatttcttagaaaaaaccagagagctttgaaactgggtactctttctgcccttgatattctaataaaaaactatagtgacagcttgacagctgccatgattgatgcagttctagatgagctcccacctcttatcagcgaaagtgatatgcatgtttcacaaatggccatcagttttcttaccactttggcaaaagtatatccctcctccctttcaaagataagtggatccattctcaatgaacttattggacttgtgagatcacccttattgcaggggggagctcttagtgccatgctagactttttccaagctctggttgtcactggaacaaataatttaggatacatggatttgttgcgcatgctgactggtccagtttactctcagagcacagctcttactcataagcagtcttattattccattgccaaatgtgtagctgcccttactcgagcatgccctaaagagggaccagctgtagtaggtcagtttattcaagatgtcaagaactcaaggtctacagattccattcgtctcttagctctactttctcttggagaagttgggcatcatattgacttaagtggacagttggaactaaaatctgtaatactagaagctttctcatctcctagtgaagaagtcaaatcagctgcatcctatgcattaggcagcattagtgtgggcaaccttcctgaatatctgccgtttgtcctgcaagaaataactagtcaacccaaaaggcagtatcttttacttcattccttgaaggaaattattagctctgcatcagtggtgggccttaaaccatatgttgaaaacatctgggccttattactaaagcactgtgagtgtgcagaggaaggaaccagaaatgttgttgctgaatgtctaggaaaactcactctaattgatccagaaactctccttccacggcttaaggggtacttgatatcaggtaggtatctagattttcttacttaaaaagttttttattgatagttggttgccttaaaagacacctaataaagaagttaagccatgtctatattttcttaaacctaaaagctaagtatgtgatgaagaaaaactgtctttcgtagtatggagtgatattcaaatgacattttgttgttttaaaggatagtgtggtaattagataatggttaaatctgttctaattcctcatgataactacattttaatgttactatattgtgttaaaatgtggaaaagatgtatctaatgaattaacataatctgaagagcttgttgatactaattacaataagtataattggtgacagtacttttttcaaatggaagattctggaagagttttcagatttaccagtgtcatccccattagaacaagtaaaaggtagtaatattaatagcagtaatagccattcattcttagacattgctttctgttttagtaaaaaatttgaagatttttaagcggttttggatttagctagttctattttgtgagggcgagatcgtccactgctgcttcaagtccctccttcccagaaggaattgtttctttgaaatctaatgggattatattttgtgctcataagtaagttaattttgctcctttggattcatgtgtgcaataagaaatacccttcttggccaaggagaattctaaggcattgaagacactggtgttatttgaagtggtttaaaaatgatgtccgtgagttttagtggactacataccaatagacttgcaatttatttttaactaggctcatcatatgcccgaagctcagtggttacggctgtgaaatttacaatttctgaccatccacaacctattgatccactgttaaagaactgcataggt

SEQ ID NO: 12678 - DNA, 299 bp, Homo sapiens
ggttaagtttttgaagataggggccatactgtctttgttattcaataattttgaatacagtgacttcttaatataggggtccttaaaccctgggccatggacccatacagatccttggcctgttgggaactgggctgtacagcaggaggagagcagagggcgagccagcattactgcctgagctttgcctcctgtcagatcagcggtggcattcgattctcataggagcacgaaccctatcgtaaactgtgtgtgcaaggcatctaggttgcatgctccttatgagaatctagtgcctg

SEQ ID NO: 12679 - DNA, 2600 bp, Homo sapiens
agtcatggctcactgtagcctcgacatcctacctcaacttccgcagtagctgagactacaggcacgcaccaccactaactaacgcacctggctaacttttgaaaattttgtgtagagatgaggtcttgtatgttgcccaggctgatctcaaactcctggactcaagtgatttgcctgcctcagcctcctaaaatgctggattacaggcatgagcccccatgcccacacgacagaacctctttagaacatgactgttaaagctgatatttggatacttttgattttaatagcaataacaacaataataaagactgggtgggactgaacttttaaaatactcttgctattgttcagttggttttcagctttgctcaggcctatatgaagtttacctttgggagaaaatgaaaccttgtccaatgggtctatagcttataccacatgccgtattcctatctatgctatgcctcttatctcttctgccagtagtttttctccccagaatctgtgcacattaaatttcatttttccagtagttcatttttagaatctttgcttcagtgatgaattgaaaagttaaaaaaaatctgatcgcttgtaagtaatttgagaagttctctgacccaccttacctgtttattgtgcagtgctattatgagggagagtaaatcaatgttatatgtttctgcaaaagcagcaaattacaggagaaacatgagaaaagtcacatctagtttgtccaaaagacattatctctttatgaggacctattttattaatgtaactgtttttaaataggattaatcaactttaattataacttatgaaaagtgccgaatcaggtcagtgggctatataaaaatacgcaaggtcattagaagcttattggacttgttgagtatgggttcttttcttgaattttagtgatgataacctcacacatagttaagtgaacttcgtgcctgaagatgggggtcctgcctagacaaatgagcaaaaatgtgtcttttttcctgaactggaaaagctagtttacagagtgatgacttctttgtgattaaagttaccagtttctgtaagtatggaacacatcgcttctccattaagttggaagcttgttaatcagctgattttaacgttcaccattacactggagttttgggttcatatttagttcttaatctttctatcatgtttaagtttctcatgatcttcagaaataaaactggaagaaatggatgtgcattcctttctctcctgattctgttatttaaattggtaatcctacagggtttctgtttgattttgttttgtgtttttgccccacgagaaagctaaagaaactttttgacattttaaagatgagtgtgtactcctcccttccctttcccctccctcctcctcctccctccctttgccgtcccctccccctcatttcttggaaatttgacttttttttctgtcatcggtttgaaattactttattcagttatatcattctttccaagtttcagcttattttgtaagcaattctcttttttcctgttctcattaccactgttgttgatcttggtcaacagtggtaatgttctcgctttgaaaataattttcaggggcctgtgtttctcagcctcactaagtggcgtgaagcactggttaaacagaagacagttaagtagctagtaagccaataactgtcatggaatagacagagacaacacaagttctgacatagatcaacctagtttgtgtataaatacaaatttaaataatatttaaatagaaatctctatttcagtggtccccaattttttttggcaccagggactggttttgtggaagacagttttttcatggacctgtgggaggaggggatgtgatggttgaggggatgattcaagcgcattacatttatcatgcactttatttctgttattactgcactgtaatatataatgaaataattatacaactcaccataatgtagagttagtgggagccctgagcttgttttcctgcagctaaacagtcccatcagggggtgatgggagacagtgacagatcatcaaacattagattcacataaggagcctagatccctcacatacgcagttcacgatagggttcacgctcctgtgagaatctagtgccaccgttgatccgacaggaggcggaattcaggtggtaatgcaagcagtggggagcagctgtaaatacagatgaagcttcactctctagcctgcacttacttcctactgtgtggcctaacacgccatagactggtactggtttgtggcatgggagttggggacccctgctttatttaatcacttataacttataatcacttagatgctctaagtcatctggggggtgagaaggttggaaaagaaaaagtacattagtgagtgagtaaagattatctgggattgtttcttagatgaggatctatttgatgttggtgttggtctactgtgaactaaatataactgcattggagcctaagcgcagatgtctgcgtcatggtttattactcctgtgttcgtttcaaggagctcctgtgatacctgctgtctccacctaaaaaaaaaaaaaaaaaa

SEQ ID NO: 12680 - DNA, 242 bp, Homo sapiens
tgctgggaacacaggtgtgagtcactgcacccagcctatttatttatttttaataattaagttgtacataataatattcatgatgcacctgcataagacaggtttattttattatcagatattacctcccatattgtatggaatttttaataacagttgtagctgatgctccattttgtagtctgatagtttcactttgtcatatttttatctatttctatggtctttataaatatttttga

SEQ ID NO: 12681 - DNA, 2109 bp, Homo sapiens
ctccgcactggctgactgattttatagtcttgctctctagagaagcccaggcatggatcttataggaaaactttctgactctgcttggccattttatccttttctcctacttctgcccaagagacctgaattgctgccatagaggacagtgtttgtgtggtctcctgagtccacatcgctcgcttccatggggtcccggtgttgtttttgcctcgttccccataggctgctgcccttatggcctctggactgaactctggggcctttggggtggtgtgaaggagtctgtgggcttcttggaacacatggatctgttcggtgggtccccagacctctgctcccagagctcatggcccaggtggtgaggagggaaaggcagtcagattccaggctggagtgtgattctgtgggaatactggggtcagttatggaacaggacttgcccatcataggtaagtgagacagcaaatagatgattcaagagcaaggattactgcgggaaggtgagactcctactgtccacgcgcatgagcagaacctggaaccagaggggcagggaccaggggtctttactcatttattttatgggtaaagagacatgaagagacagcctctctcttctgtctcagaagctctgtgtttgggaaactttgagcccagtgagtagcagggtctgcagtgtgagtaccaggtttccctggcaatccaggtctcctctgaggaagcattctgacttcccactgaccacggaaggcatgtcagcttcatgcctcgggctagagttctgataatcggggctgaggggtgaaaagaaatccagtcagacagacagtggggagacaggtccctgccctttatttgcgggatcaatcagggactcccagaaaggaaggagaatggtgagaagggccctaagagttcgtctctcacctgggggctggtgacgtggtcaccacaagctgaagacaggctaatggggtggcgggtgtgtgtttaaacctcacgtgcctggaagctgcacattgaccaaaggagggagggaagtgctaaccatgtatagagtgggcaggcggttccagggagacaagcagcatgttattaaattgggcctaggcagttggacgataatggagaaaaagcagggatgctataatgagtcctccccaagggtgagttcagcaccccagccctgttctgcttgtatcccagtgatacttgggaggtaggaagaaaatgggagtaagagaacaatttggggctgaagggagtgtcagaggcacgttgatccttgttttgttgtcatggaaacttcggggctggtgggacttaggccaaaagctcagaggcacagccaaaatttagaagcttgctactcctacgactcggcctataaggaagagagaagctgtctgtactttggggactacattgctgaaggaaaaaaatcactccctggctaattaagattgcttccaaattgggggaatgtgtgtcatttcctttaccaaggccagtcatccctgcttccacccatggtcaggacagtcagccactacgtgatgctgtataaattggattacaaaccatattcttgttcagcttgcactaatctatataaataaaatatgtactttgaaaaaaattaggctacatgagtttcaaatggactgtgatgttatagacctgctttctctttggttctgggccagtgtcagacggggacaggggtgataggcctggtgtcctaggggccatttgtgtaccttgaggccgtgttaacatggcctgggggaaagaaagctctcctgtcacttggagtctcattcctaaaccctccttcccagggagcaagtgtggggcagggtttcagagcacaggctttggtgtccagcctgggtacatccagctgtcccgctgtctaactgacattgtgtgagatgcttactctctctgagctccctcctcctggctcccaactttattataaaatggggaaaatgattgtgcttgccctacagaattgtagtatgaattaaaagtctggatttaatgtatttaatatagaaaattttagcttttattaataaaagtttttggcatacaagtcaa

SEQ ID NO: 12682 - DNA, 2108 bp, Homo sapiens
ctccgcactggctgactgattttatagtcttgctctctagagaagcccaggcatggatcttataggaaaactttctgactctgcttggccattttatccttttctcctacttctgcccaagagacctgaattgctgccatagaggacagtgtttgtgtggtctcctgagtccacatcgctcgcttccatggggtcccggtgttgtttttgcctcgttccccataggctgctgcccttatggcctctggactgaactctggggcctttggggtggtgtgaaggagtctgtgggcttcttggaacacatggatctgttcggtgggtccccagacctctgctcccagagctcatggcccaggtggtgaggagggaaaggcagtcagattccaggctggagtgtgattctgtgggaatactggggtcagttatggaacaggacttgcccatcataggtaagtgagacagcaaatagatgattcaagagcaaggattactgcgggaaggtgagactcctactgtccacgcgcatgagcagaacctggaaccagaggggcagggaccaggggtctttactcatttattttatgggtaaagagacatgaagagacagcctctctcttctgtctcagaagctctgtgtttgggaaactttgagcccagtgagtagcagggtctgcagtgtgagtaccaggtttccctggcaatccaggtctcctctgaggaagcattctgacttcccactgaccacggaaggcatgtcagcttcatgcctcgggctagagttctgataatcggggctgaggggtgaaaagaaatccagtcagacagacagtggggagacaggtccctgccctttatttgcgggatcaatcagggactcccagaaaggaaggagaatggtgagaagggccctaagagttcgtctctcacctgggggctggtgacgtggtcaccacaagctgaagacaggctaatggggtggcgggtgtgtgtttaaacctcacgtgcctggaagctgcacattgaccaaaggagggagggaagtgctaaccatgtatagagtgggcaggcggttccagggagacaagcagcatgttattaaattgggcctaggcagttggacgataatggagaaaaagcagggatgctataatgagtcctccccaagggtgagttcagcaccccagccctgttctgcttgtatcccagtgatacttgggaggtaggaagaaaatgggagtaagagaacaatttggggctgaagggagtgtcagaggcacgttgatccttgttttgttgtcatggaaacttcggggctggtgggacttaggccaaaagctcagaggcacagccaaaatttagaagcttgctactcctacgactcggcctataaggaagagagaagctgtctgtactttggggactacattgctgaaggaaaaaaatcactccctggctaattaagattgcttccaaattgggggaatgtgtgtcatttcctttaccaaggccagtcatccctgcttccacccatggtcaggacagtcagccactacgtgatgctgtataaattggattacaaaccatattcttgttcagcttgcactaatctatataaataaaatatgtactttgaaaaaaattaggctacatgagtttcaaatggactgtgatgttatagacctgctttctctttggttctgggccagtgtcagacggggacaggggtgataggcctggtgtcctaggggccatttgtgtaccttgaggccgtgttaacatggcctgggggaaagaaagctctcctgtcacttggagtctcattcctaaaccctccttcccagggagcaagtgtggggcagggtttcagagcacaggctttggtgtccagcctgggtacatccagctgtcccgctgtctaactgacattgtgtgagatgcttactctctctgagctccctcctcctggctcccaactttattataaatggggaaaatgattgtgcttgccctacagaattgtagtatgaattaaaagtctggatttaatgtatttaatatagaaaattttagcttttattaataaaagtttttggcatacaagtcaa

SEQ ID NO: 12683 - DNA, 2108 bp, Homo sapiens
ctccgcactggctgactgattttatagtcttgctctctagagaagcccaggcatggatcttataggaaaactttctgactctgcttggccattttatccttttctcctacttctgcccaagagacctgaattgctgccatagaggacagtgtttgtgtggtctcctgagtccacatcgctcgcttccatggggtcccggtgttgtttttgcctcgttccccataggctgctgcccttatggcctctggactgaactctggggcctttggggtggtgtgaaggagtctgtgggcttcttggaacacatggatctgttcggtgggtccccagacctctgctcccagagctcatggcccaggtggtgaggagggaaaggcagtcagattccaggctggagtgtgattctgtgggaatactggggtcagttatggaacaggacttgcccatcataggtaagtgagacagcaaatagatgattcaagagcaaggattactgcgggaaggtgagactcctactgtccacgcgcatgagcagaacctggaaccagaggggcagggaccaggggtctttactcatttattttatgggtaaagagacatgaagagacagcctctctcttctgtctcagaagctctgtgtttgggaaactttgagcccagtgagtagcagggtctgcagtgtgagtaccaggtttccctggcaatccaggtctcctctgaggaagcattctgacttcccactgaccacggaaggcatgtcagcttcatgcctcgggctagagttctgataatcggggctgaggggtgaaaagaaatccagtcagacagacagtggggagacaggtccctgccctttatttgcgggatcaatcagggactcccagaaaggaaggagaatggtgagaagggccctaagagttcgtctctcacctgggggctggtgacgtggtcaccacaagctgaagacaggctaatggggtggcgggtgtgtgtttaaacctcacgtgcctggaagctgcacattgaccaaaggagggagggaagtgctaaccatgtatagagtgggcaggcggttccagggagacaagcagcatgttattaaattgggcctaggcagttggacgataatggagaaaaagcagggatgctataatgagtcctccccaagggtgagttcagcaccccagccctgttctgcttgtatcccagtgatacttgggaggtaggaagaaaatgggagtaagagaacaatttggggctgaagggagtgtcagaggcacgttgatccttgttttgttgtcatggaaacttcggggctggtgggacttaggccaaaagctcagaggcacagccaaaatttagaagcttgctactcctacgactcggcctataaggaagagagaagctgtctgtactttggggactacattgctgaaggaaaaaaatcactccctggctaattaagattgcttccaaattgggggaatgtgtgtcatttcctttaccaaggccagtcatccctgcttccacccatggtcaggacagtcagccactacgtgatgctgtataaattggattacaaaccatattcttgttcagcttgcactaatctatataaataaaatatgtactttgaaaaaaattaggctacatgagtttcaaatggactgtgatgttatagacctgctttctctttggttctgggccagtgtcagacggggacaggggtgataggcctggtgtcctaggggccatttgtgtaccttgaggccgtgttaacatggcctgggggaaagaaagctctcctgtcacttggagtctcattcctaaaccctccttcccagggagcaagtgtggggcagggtttcagagcacaggctttggtgtccagcctgggtacatccagatgtcccgctgtctaactgacattgtgtgagatgcttactctctctgagctccctcctcctggctcccaactttattataaatggggaaaatgattgtgcttgccctacagaattgtagtatgaattaaaagtctggatttaatgtatttaatatagaaaattttagcttttattaataaaagtttttggcatacaagtcaa

SEQ ID NO: 12684 - DNA, 489 bp, Homo sapiens
gcagaggacagctggaaaggaagagctggggcggaggacagctggaaaggaggtacctaatgtgtccttagataacagggtctgaaacccagtgcaagggtctccaaaaccagggtaagaggaggcataaacccagagaccccagcccaggccagagtgaacagtggtacgaggggaacaggatctcccgggttggaacaggggctctcagctctttggcactgcagcagaggggtcgcatctgagtaaaggcagaaacctgggaatgttgggtggggacacatccagtgagagcaaaggaaatggaaaaactaagtctgcagtgatttttggcttctctgcctctttagtgttcactgtctatccttttctccatgggcttatgctcaggatatgtttggagtgaaaggttaaaggggctctggcaccatgcagaggtgtcctagaccagggtctttactcttcattaagagatgaagaggttataag

SEQ ID NO: 12685 - DNA, 7163 bp, Homo sapiens
cacaatcgaacccaccaccctgacgtatttgctgctcagaaccaccgatcttccaagttctcatcactccagtgcagctcctgtgacaaaaccttccccaacaccattgagcacaagaagcacatcaaagcagaacatgcaggtggagtttgggtaccgccggcagagagcgggaggggcttgatggtgtagcctcctgggccccaccagaaatccccacttctaatagtctagtgtgatgtgcagtggtcattgcctttgttctgccccagcgcacctgtccgtagcagcagcagtcagtagcagcagcttgagtggcagtggttctcaaacctggaagcgtagcgcagtgtaagctcccaccagccctgagtgagagcttgttggggcacctgggaagggtgtcagcctcagtggtaggcaggcctgagtggaaatcctgattccagcacttatcagctacatgaccttggcaagtgacttcccttttctgagcctgtttccttctctccaggatggcagttattaaaacctactttgcaggtaaatttggtgataatcacaacagctgtcagttacagagtgtttcctatgtgcaagacaccatgctaagcacctcgtgtatattttctcatttcattctcacaacatccctctgagcatccaggcagtctggatccagatctcatgctctttaccactagattgtacaaatataccataggttataagattcctggcacttggtagatgcttgctaagtattggccatcgccccaaccccagccctgttactcttcagccttggagagccaaccatttgttctttcccagcacgtctttctttatgcacttcacagatatgaagttccatgaatgtgaccagtgtaaggagctcttccccacgccagccttgctgcaggttcatgtcaagtgccagcattcaggtcagtacccctgtcagcatacttctaggctagactcggggcctgaatctcccctccaccacttgcagctttgcaacctaggctaaatcgcttaacaaacctgtgcctcggtttcttcatctataaaatgggaacagttgtagcacctgcctcatagagtagtgtgaaaaactgaaggccttggcatcaataagcatcccttaagccgtaactgtgattgtcattgttattgctatactcatcaaatctaaagtgccagttaaaaataaataaatacaattccagttataagatataccatttttattttttttttttttgagacagagtctcactctgtcacccagcctggagtgcagtggtgcgatctcagatcactgcaacctccatctcctgggttcaagcaattctccctgacttagcctcccaagtagctggaattacaggtgcctgccaccatgctcgactaaataagatgtaccttttttttttttttttttttgagatggagtctcactctgtcacccaggctggagtgcagtggcgcgatctcggctcactgcaagctccgtctcccaggttcacgccattctcctgcctcagcctcccgagtagctgggactacaggcgcccaccaccacacccgactaattttttttttgtatttttagtagagacggggtttcatcatgttagccaggatggtctcgatctcctgacctcatgatccgcccgcctcaccctcccaaagtgctgggattacaggcgtgagccactgcgcccagccaagatgtaccatttttaaggaactattaaaaaagaaaaactactgccagttaaactgtgctttcttatcacttagaatttctacgttattctaagtgctgttttggactaatttgacatagatttttatcatgtcactcactctagtgtgcatacatacaaaggaaaacataaaaaaactgattaagggaagaatccagcttctcagagtagtgttcaattcagattgtcaacaagcatgtttttccacacagtgtttactctgccatcaagaacattgatgatggaacgcataatataagattccatcaagaattgaaggccattcgttttggtctcttgagcgttatgtaaaactagtctacttttgattcctgctttgggaatatagctaacctttcatcacttacttcctcccttctaaaccatttggtttccatgagttaaaaacgtgcaccattcctgtcttagggagtttcttccaagccgtggatgcccattctgcaagtcttgatgctgccacttttgatgttggtgtgcgcattgacgattgcacctgactgccttagcccacagaagtcataaggtgccattgatcctacttcagagatgttaaaatgtatttcttagaattgatgaaatatagtatcgtcagcatctttatctgcagttgaatgaataatgggcttctgcagaggcagatttggcctgaatctgatactaatgaaactgtcatctcagggcccctcacttgcatggacccttccaaggctctgtccttgtcattttgtattatttttcttaaggccccccagattgaataacgttcgtgtcccacaaaatgtggatccgcctccaagcctcgatcctcattgctctttcctctcatgtcttcctgccctcatttctctcattttacccagagaattttacccacagccctccccttctgtctccctctcctccagggtcccagccattccggtgcttgtactgtgctgctactttccgttttcctggagcattgcagcaccatgtcaccacggagcacttcaagcagtcagagaccaccttcccctgtgagctctgtggggaactcttcacctcccaggcccagcttgacagtcacctggaatctgagcacccaaaggtgatgagcacggaaacccaggccgcagcctcacagatggcgcaggtgattctggggccatcagctacattagaatgctaatgcatggttcctaaggcttctctagaggtggctctgtcatagtacccagagatactctttggggatcttgtagagagtctctctggacttcttacaaaacagaacagaaaattctagtctcctggtggccacatgggaagtggcccttaggtagagggagcctggaacaataatttccaaaagaggaacagcttggttcctcctcccagtgcatacgtccctgcctcctgagaaacaccgtggggtgtggtgagaactgcgggaaacctcggagacagaggaacactttgttgggcagggactgcctgcagttgaagtgcttggagagcgcctctgggcaggacacagtacacacttgcacacacctgggcctctcacctttacctgggcaaaaaaaccacctcttcttgatgcttcagggctaagcttgatccagcttccctttgcttcccagatcctcttttactcttcttcccatcttctccagagagggtgggcagaaaaggaaaataaattcaggtccatccatcgtcagtaatttgtgggtgggttggagaggaaccataaactgattgaggttttggtctgttagactgtcccgctgtccagttccagatcagtcatttataaaccaggttcttacaggcctctggggaacagaggggaagtcaggtaggcaggactcccgccaacactctgctgtcatatcaaccaaaggtgctctgcttttatcttttttgtatattatggttcttgataatatgtcctttggggaaaaggtggggctggggcgtccatttctaaaagaaaaagaaagaaaagcagtttgaaaactactatcctggatcattgttgattgaacatcacagttgatctcttctctcctgtagcacggagaagtagctgggcttggcttcctcacttgttcctgctctctgctcttcactgattctcaagagcaaggtggctgtggcctctagtttaaaaatatcaagggcatctagctcttctgggatctatgggttagaaacatcaactgggaggcttaggcgggaattggatatgcctaaccacagactcattctctctcagttggaaaggtggtctctaacagattatgcagatttggaagggacataggtgggctgtggaggagagaagggggcactggccccgccaggctggtgagctgaatgaatgcgtggagtcacagttcatccagtcttcctcctaagctcggtcactgtgtggcctcctgggaaggctgtgagcctgcgagaggtccagagaggctgccccgggcccacctgggcctgtggtggatcaatcccattcccatgttccaggcatgagaccagctggcttcagtggcattcctctcacatggcactcacctctgcagtgtcatcccaagacaggaaagcccagtgtgaaaaacagagccagtgttcgctggtgtataatcatagagtccgggcgccccgagatggcgtactgagcaaaattatagcaatttagtgcacagttatttaaattgtttgctggccttctcttttgcatcgccagtgggttagacttgcctcttcccattaggcacatgtaagtgctctcctcaggtgaaaacataaatatcatcattacagcatgagatgaaaaccatgtaaatcagggagccaactgtgaacactgcccagagcagcctcacggtctttctctttcaggtgatccaaaccccagagccggtggccccgacagagcaggtgatcactttggaggagacccagcttgccgggtcgcaggtgtttgtgacgttgccagattctcaggcatctcaggccagctctgagctcgtggcggtgactgtggaggacttgctggatggcacagtgacgctgatctgtggtgaggccaaatgagcagcctttcatccggcagagccttcctgcgtttgcagcagagaggaggccccacagcttgccctttgccctccatccctggctgtcctgagtggtgagcatcttagcttagcaccaaccaacacagtctcacctagaaaacagatggaagcttcgttgttctcatagaaccaacagcatctgagccctcaacaccaacagcaccatcctctgtagcagacaggcctccctccccacaggcccgctgctgcggcctctatgacactgtccatccccaagtgacatgtggcttcagaagtagagtctgaaagagcagtgggatgggagctggtgaccagggtaccccaggaggcatgatgtgccgacagcgctcagtgggcagaatggcagttagatatgggacttggcccacagtgggggctgcaaatgctgccactgcctctggccatttaaagtgagaggggcaccaacagacaattcggggaccttaggccccttcctgaggcacacttggccccttcctcggtcctatcatcctaccctctgctggggttccccctccacccagtggccacgcccagcaccctattgatggctataggacaggtagccctcatttccatgcctgataaccccttgtcagttgtcagctcttcccaaaacaaagctctggagtttctgctggaagtgtttaatgtgaggcatcagctgctagacagtgtctgcctttccaggacattcttcttggtattccttacctgaagcctggttcccacagctcttccgtgtcatcttcatccccttcctttaatcaaaggctgaaatctctgcctgacctggcagcctggctccctctgggtcatatggtgcagactgtgaccagcaccaggcaggcagtcctgtctgcgtgtggaggagcagccgtgactgcccgtggctctgctgccgcccactccctgccttgtgagtggcctgctgcctcacctcccgcaggccgccacacttattgcaggtcagtgatcctttggagtttgaatttcacaaagctttttttatcttcagttcctaaaatataatctgataattaatggtttgtggaatccattatgaagtgcaattagatagatgtaggttcctgccgtttggagagaatgactagcatttatcttcttttccttccatgccaaaggttggagtctgctggtgcggtgtttacacaccaggcagggctgtctgccaccttgtgtggcttgaccccctgtggaggggagtgcctggttggatcccacactggcagagatggggccaccccttccttccaggcacatctcacattgccatgtacagaggcaggagtcacgtttggtcaccatggaagcttttattgctcccacatggtcaggtctcaccctgcttgaagcgcagaaggcacagccttactgaccagcacgcccactgactggcatctgccggctttgtgcaggcagccccgacggtttccacagcgagcgccagctccggccagcctgggacagctcatcccagccgactacacctgcttctggtcctgtccacattttgatacgcagatcacttgagcttgtcaattagggttctgccattctgaaataaatgaagtttctaaagcagagtcggcctcagaagccaaaaactgaccagaagatggtgctcaaacctttaagacttcatctccatgtgaagggctcactgtttctaccaaggctgtgcctgtattaaggcttttccgtcctgggaactgtcagtctgggagagctcttgatctgcaggtggcaaaatggcactgaatatccccttggcagcagagaaaacccactgaaagatcgtagagtggcacatgcttacagggcattggtgccaagtccagtggatgagaatccagcccctcacaagctgtgggatggggcttgggagttgcagtgaatgtcattaaaatttcttccaaaacaaaactagaaataattgctgagggcttatagggaagtgatttaaaaagaaaaaacaaacaacaacaaaaaaaactcttcggaataaagagggctgtaaattttgaattccagtgtcagatcctttcaagcactgagaaattctttctcaggtttctttttttgggggagacagggtcttgctctgtcacccagactggaacacagtggcacgatcttggctcactgcaacctctgcgggctcacgcaatcctcctgccacagcttcccaagtagctgggaccacaggcgtgagcca

SEQ ID NO: 12686 - DNA, 7161 bp, Homo sapiens
cacaatcgaacccaccaccctgacgtatttgctgctcagaaccaccgatcttccaagttctcatcactccagtgcagctcctgtgacaaaaccttccccaacaccattgagcacaagaagcacatcaaagcagaacatgcaggtggagtttgggtaccgccggcagagagcgggaggggcttgatggtgtagcctcctgggccccaccagaaatccccacttctaatagtctagtgtgatgtgcagtggtcattgcctttgttctgccccagcgcacctgtccgtagcagcagcagtcagtagcagcagcttgagtggcagtggttctcaaacctggaagcgtagcgcagtgtaagctcccaccagccctgagtgagagcttgttggggcacctgggaagggtgtcagcctcagtggtaggcaggcctgagtggaaatcctgattccagcacttatcagctacatgaccttggcaagtgacttcccttttctgagcctgtttccttctctccaggatggcagttattaaaacctactttgcaggtaaatttggtgataatcacaacagctgtcagttacagagtgtttcctatgtgcaagacaccatgctaagcacctcgtgtatattttctcatttcattctcacaacatccctctgagcatccaggcagtctggatccagatctcatgctctttaccactagattgtacaaatataccataggttataagattcctggcacttggtagatgcttgctaagtattggccatcgccccaaccccagccctgttactcttcagccttggagagccaaccatttgttctttcccagcacgtctttctttatgcacttcacagatatgaagttccatgaatgtgaccagtgtaaggagctcttccccacgccagccttgctgcaggttcatgtcaagtgccagcattcaggtcagtacccctgtcagcatacttctaggctagactcggggcctgaatctcccctccaccacttgcagctttgcaacctaggctaaatcgcttaacaaacctgtgcctcggtttcttcatctataaaatgggaacagttgtagcacctgcctcatagagtagtgtgaaaaactgaaggccttggcatcaataagcatcccttaagccgtaactgtgattgtcattgttattgctatactcatcaaatctaaagtgccagttaaaaataaataaatacaattccagttataagatataccatttttttttttttttttttttgagacagagtctcactctgtcacccagcctggagtgcagtggtgcgatctcagatcactgcaacctccatctcctgggttcaagcaattctccctgacttagcctcccaagtagctggaattacaggtgcctgccaccatgctcgactaaataagatgtacctttttattttttttttttttgagatggagtctcactctgtcacccaggctggagtgcagtggcgtgatctcggctcactgcaacctccgcctcccaggttcaagcgattcttctgcctcagcctcccgagtagctgggactacaggcgtgcaccaccacacccggctaattttttgtatttttagtagagagggggtttcaccatgttggccaggctggtctcaaactcctgacctcatgatccgcccacctcgccctcccaaagtgctgggattacaggcgtgagccactgcgcccagccaagatgtaccacttttaaggaactattaaaaaagaaaaactactgccagttaaactgtgctttcttatcacttagaatttctacgttattctaagtgctgttttggactaatttgacatagatttttatcatgtcactcactctagtgtgcatacatacaaaggaaaacataaaaaaactgattaagggaagaatccagcttctcagagtagtgttcaattcagattgtcaacaagcatgtttttccacacagtgtttactctgccatcaagaacattgatgatggaacgcataatataagattccatcaagaattgaaggccattcgttttggtctcttgagcgttatgtaaaactagtctacttttgattcctgctttgggaatatagctaacctttcatcacttacttcctcccttctaaaccatttggtttccatgagttaaaaacgtgcaccattcctgtcttagggagtttcttccaagccgtggatgcccattctgcaagtcttgatgctgccacttttgatgttggtgtgcgcattgacgattgcacctgactgccttagcccacagaagtcataaggtgccattgatcctacttcagagatgttaaaatgtatttcttagaattgatgaaatatagtatcgtcagcatctttatctgcagttgaatgaataatgggcttctgcagaggcagatttggcctgaatctgatactaatgaaactgtcatctcagggcccctcacttgcatggacccttccaaggctctgtccttgtcattttgtattatttttcttaaggccccccagattgaataacgttcgtgtcccacaaaatgtggatccgcctccaagcctcgatcctcattgctctttcctctcatgtcttcctgccctcatttctctcattttacccagagaattttacccacagccctccccttctgtctccctctcctccagggtcccagccattccggtgcttgtactgtgctgctactttccgttttcctggagcattgcagcaccatgtcaccacggagcacttcaagcagtcagagaccaccttcccctgtgagctctgtggggaactcttcacctcccaggcccagcttgacagtcacctggaatctgagcacccaaaggtgatgagcacggaaacccaggccgcagcctcacagatggcgcaggtgattctggggccatcagctacattagaatgctaatgcatggttcctaaggcttctctagaggtggctctgtcatagtacccagagatactctttggggatcttgtagagagtctctctggacttcttacaaaacagaacagaaaattctagtctcctggtggccacatgggaagtggcccttaggtagagggagcctggaacaataatttccaaaagaggaacagcttggttcctcctcccagtgcatacgtccctgcctcctgagaaacaccgtggggtgtggtgagaactgcgggaaacctcggagacagaggaacactttgttgggcagggactgcctgcagttgaagtgcttggagagcgcctctgggcaggacacagtacacacttgcacacacctgggcctctcacctttacctgggcaaaaaaaccacctcttcttgatgcttcagggctaagcttgatccagcttccctttgcttcccagatcctcttttactcttcttcccatcttctccagagagggtgggcagaaaaggaaaataaattcaggtccatccatcgtcagtaatttgtgggtgggttggagaggaaccataaactgattgaggttttggtctgttagactgtcccgctgtccagttccagatcagtcatttataaaccaggttcttacaggcctctggggaacagaggggaagtcaggtaggcaggactcccgccaacactctgctgtcatatcaaccaaaggtgctctgcttttatcttttttgtatattatggttcttgataatatgtcctttggggaaaaggtggggctggggcgtccatttctaaaagaaaaagaaagaaaagcagtttgaaaactactatcctggatcattgttgattgaacatcacagttgatctcttctctcctgtagcacggagaagtagctgggcttggcttcctcacttgttcctgctctctgctcttcactgattctcaagagcaaggtggctgtggcctctagtttaaaaatatcaagggcatctagctcttctgggatctatgggttagaaacatcaactgggaggcttaggcgggaattggatatgcctaaccacagactcattctctctcagttggaaaggtggtctctaacagattatgcagatttggaagggacataggtgggctgtggaggagagaagggggcactggccccgccaggctggtgagctgaatgaatgcgtggagtcacagttcatccagtcttcctcctaagctcggtcactgtgtggcctcctgggaaggctgtgagcctgcgagaggtccagagaggctgccccgggcccacctgggcctgtggtggatcaatcccattcccatgttccaggcatgagaccagctggcttcagtggcattcctctcacatggcactcacctctgcagtgtcatcccaagacaggaaagcccagtgtgaaaaacagagccagtgttcgctgggtgtataatcatagagtccgggcgccccgagatggcgtactgagcaaaattatagcaatttagtgcacagttatttaaattgtttgctggccttctcttttgcatcgccagtgggttagacttgcctcttcccattaggcacatgtaagtgctctcctcaggtgaaaacataaatatcatcattacagcatgagatgaaaaccatgtaaatcagggagccaactgtgaacactgcccagagcagcctcacggtctttctctttcaggtgatccaaaccccagagccggtggccccgacagagcaggtgatcactttggaggagacccagcttgccgggtcgcaggtgtttgtgacgttgccagattctcaggcatctcaggccagctctgagctcgtggcggtgactgtggaggacttgctggatggcacagtgacgctgatctgtggtgaggccaaatgagcagcctttcatccggcagagccttcctgcgtttgcagcagagaggaggccccacagcttgccctttgccctccatccctggctgtcctgagtggtgagcatcttagcttagcaccaaccaacacagtctcacctagaaaacagatggaagcttcgttgttctcatagaaccaacagcatctgagccctcaacaccaacagcaccatcctctgtagcagacaggcctccctccccacaggcccgctgctgcggcctctatgacactgtccatccccaagtgacatgtggcttcagaagtagagtctgaaagagcagtgggatgggagctggtgaccagggtaccccaggaggcatgatgtgccgacagcgctcagtgggcagaatggcagttagatatgggacttggcccacagtgggggctgcaaatgctgccactgcctctggccatttaaagtgagaggggcaccaacagacaattcggggaccttaggccccttcctgaggcacacttggccccttcctcggtcctatcatcctaccctctgctggggttccccctccacccagtggccacgcccagcaccctattgatggctataggacaggtagccctcatttccatgcctgataaccccttgtcagttgtcagctcttcccaaaacaaagctctggagtttctgctggaagtgtttaatgtgaggcatcagctgctagacagtgtctgcctttccaggacattcttcttggtattccttacctgaagcctggttcccacagctcttccgtgtcatcttcatccccttcctttaatcaaaggctgaaatctctgcctgacctggcagcctggctccctctgggtcatatggtgcagactgtgaccagcaccaggcaggcagtcctgtctgcgtgtggaggagcagccgtgactgcccgtggctctgctgccgcccactccctgccttgtgagtggcctgctgcctcacctcccgcaggccgccacacttattgcaggtcagtgatcctttggagtttgaatttcacaaagctttttttatcttcagttcctaaaatataatctgataattaatggtttgtggaatccattatgaagtgcaattagatagatgtaggttcctgccgtttggagagaatgactagcatttatcttcttttccttccatgccaaaggttggagtctgctggtgcggtgtttacacaccaggcagggctgtctgccaccttgtgtggcttgaccccctgtggaggggagtgcctggttggatcccacactggcagagatggggccaccccttccttccaggcacatctcacattgccatgtacagaggcaggagtcacgtttggtcaccatggaagcttttattgctcccacatggtcaggtctcaccctgcttgaagcgcagaaggcacagccttactgaccagcacgcccactgactggcatctgccggctttgtgcaggcagccccgacggtttccacagcgagcgccagctccggccagcctgggacagctcatcccagccgactacacctgcttctggtcctgtccacattttgatacgcagatcacttgagcttgtcaattagggttctgccattctgaaataaatgaagtttctaaagcagagtcggcctcagaagccaaaaactgaccagaagatggtgctcaaacctttaagacttcatctccatgtgaagggctcactgtttctaccaaggctgtgcctgtattaaggcttttccgtcctgggaactgtcagtctgggagagctcttgatctgcaggtggcaaaatggcactgaatatccccttggcagcagagaaaacccactgaaagatcgtagagtggcacatgcttacagggcattggtgccaagtccagtggatgagaatccagcccctcacaagctgtgggatggggcttgggagttgcagtgaatgtcattaaaatttcttccaaaacaaaactagaaataattgctgagggcttatagggaagtgatttaaaaagaaaaaacaaacaacaacaaaaaaaactcttcggaataaagagggctgtaaattttgaattccagtgtcagatcctttcaagcactgagaaattctttctcaggtttctttttttgggggagacagggtcttgctctgtcacccagactggaacacagtggcacgatcttggctcactgcaacctctgcgggctcacgcaatcctcctgccacagcttcccaagtagctgggaccacaggcgtgagcca

SEQ ID NO: 12687 - DNA, 2432 bp, Homo sapiens
ctttggaggagacccagcttgccgggtcgcaggtgtttgtgacgttgccagattctcaggcatctcaggccagctctgagctcgtggcggtgactgtggaggacttgctggatggcacagtgacgctgatctgtggtgaggccaaatgagcagcctttcatccggcagagccttcctgcgtttgcagcagagaggaggccccacagcttgccctttgccctccatccctggctgtcctgagtggtgagcatcttagcttagcaccaaccaacacagtctcacctagaaaacagatggaagcttcgttgttctcatagaaccaacagcatctgagccctcaacaccaacagcaccatcctctgtagcagacaggcctccctccccacaggcccgctgctgcggcctctatgacactgtccatccccaagtgacatgtggcttcagaagtagagtctgaaagagcagtgggatgggagctggtgaccagggtaccccaggaggcatgatgtgccgacagcgctcagtgggcagaatggcagttagatatgggacttggcccacagtgggggctgcaaatgctgccactgcctctggccatttaaagtgagaggggcaccaacagacaattcggggaccttaggccccttcctgaggcacacttggccccttcctcggtcctatcatcctaccctctgctggggttccccctccacccagtggccacgcccagcaccctattgatggctataggacaggtagccctcatttccatgcctgataaccccttgtcagttgtcagctcttcccaaaacaaagctctggagtttctgctggaagtgtttaatgtgaggcatcagctgctagacagtgtctgcctttccaggacattcttcttggtattccttacctgaagcctggttcccacagctcttccgtgtcatcttcatccccttcctttaatcaaaggctgaaatctctgcctgacctggcagcctggctccctctgggtcatatggtgcagactgtgaccagcaccaggcaggcagtcctgtctgcgtgtggaggagcagccgtgactgcccgtggctctgctgccgcccactccctgccttgtgagtggcctgctgcctcacctcccgcaggccgccacacttattgcaggtcagtgatcctttggagtttgaatttcacaaagctttttttatcttcagttcctaaaatataatctgataattaatggtttgtggaatccattatgaagtgcaattagatagatgtaggttcctgccgtttggagagaatgactagcatttatcttcttttccttccatgccaaaggttggagtctgctggtgcggtgtttacacaccaggcagggctgtctgccaccttgtgtggcttgaccccctgtggaggggagtgcctggttggatcccacactggcagagatggggccaccccttccttccaggcacatctcacattgccatgtacagaggcaggagtcacgtttggtcaccatggaagcttttattgctcccacatggtcaggtctcaccctgcttgaagcgcagaaggcacagccttactgaccagcacgcccactgactggcatctgccggctttgtgcaggcagccccgacggtttccacagcgagcgccagctccggccagcctgggacagctcatcccagccgactacacctgcttctggtcctgtccacattttgatacgcagatcacttgagcttgtcaattagggttctgccattctgaaataaatgaagtttctaaagcagagtcggcctcagaagccaaaaactgaccagaagatggtgctcaaacctttaagacttcatctccatgtgaagggctcactgtttctaccaaggctgtgcctgtattaaggcttttccgtcctgggaactgtcagtctgggagagctcttgatctgcaggtggcaaaatggcactgaatatccccttggcagcagagaaaacccactgaaagatcgtagagtggcacatgcttacagggcattggtgccaagtccagtggatgagaatccagcccctcacaagctgtgggatggggcttgggagttgcagtgaatgtcattaaaatttcttccaaaacaaaactagaaataattgctgagggcttatagggaagtgatttaaaaagaaaaaacaaacaacaacaaaaaaaactcttcggaataaagagggctgtaaattttgaattccagtgtcagatcctttcaagcactgagaaattctttctcaggtttctttttttgggggagacagggtcttgctctgtcacccagactggaacacagtggcacgatcttggctcactgcaacctctgcgggctcacgcaatcctcctgccacagcttcccaagtagctgggaccacaggcgtgagcca

SEQ ID NO: 12688 - DNA, 80 bp, Homo sapiens
aaaaaaaaaaaaaaaaaaaaaaaaaaaaaaaaaagaaaaaaaaaaaaaaaaaaagaaaacagaaaagaaaaaaaaaaatc

SEQ ID NO: 12689 - DNA, 6388 bp, Homo sapiens
ccggcacccttaccccgccctcgccatgaacgcctcgatgtccaggtgagtcccggggctggggctgtccgcatgtttgtcttagcaaccacgccatttctgaccacgaaacagctttttcttgccagttaatgagcaggcacagggctcaccctccccccaactctctttgatcaagcatcttctcacgtcccgcgctccccacccccaggtcagaatggagaccacaggatcactgtccccatctctccaacagaaggattgcaaagccctagcactctgcctcctgccatgggctctggcactgaagcattttgaggacagatgctccccgacttaggatggagccgcgtcctgataaacccgtcgtacattgaaaacacaactttcaccttagaatatttgcaacatatgatggttttatccagacataaccccatctaggtcaaggagagtactgaattaatatcgtttttgcaccatcgtaaagtcaaaatatcctaagtcacggactgtctgtatatcacactgaagctagggactgggagaagatgaatttttcctgaaatgatgtcaggagaggagacggtgaaaggggatttctgtctcagggaccagctctacctgacagtggaacctctgaggacagaggaaagctgcccacagcctaagcccttcttttccccagtatgcccgggcctctgaccctcctccccttttgtgtgtttcatcccacctgcttccagcaccagatgggcagcctgggtgttggtggggagaaggaagaggcattaagcatctcccaaacctggttttctagaagacgacaaatagccttctagtcctgagactctgccccacggacatgcctgtgcccttaaggcagagagccaccgtgtcctctgctgggtggcaggtatccagcctgaacccctctgttgccatttgtttctatccggtgcacagcctggtctccagtcggttctctcctcacatggtggctcctgcccaccctggcctgcccacctcagggatcccccaccctgccatcgtctcccccatcgtcaagcaggaaccggcaccccccagcctgagccctgcagtgagcgtgtaagtaagcggcagcctggattcaggtgggagggtgcaggctgtggggaggggtggccacactctgagcagcaaatgtcatgtactcttctctcttggtgtcactcagcaggcatcacagcctccccagccaggccctccctcttcctcgggacttactccctctgaccttctgggtccctgtcctttcagggacatggtgcatcttctctcttattaaggaaagttttactgtcaggtctcagaggctgaaagagaacctgagaaagcttttaacaccccaccgtaagatatatgaaaaggtgaggcccagaaaggagacagtgttttcttaaggacttgtggtgggctggtggccgagctgagatgagcaccagggtccttaccttgcccgtgtaccataaagatggcaggaagccaaagtcagtgctccctggagatcccaagagaaccccctcccaacttggttctgcccagagtgccccacactgtgtcctgtcaccgccgccagcacctgccagctccagtgagagctcatctcagcaaccccaccatgctctgttcctctgtcaggaaattggagagtagattttcaaagaatctggcgtggagatcgttcaaaggtgggaaactacgggaggaaggtactcaggtgttgagtgcagccatggggccacttgaattagcatccaggcagcccgcgcccctccccagagacaatcagcggtgtttcagtgacaggtggggattgatgagttgtgtgacacctgacatgctaacctacaaccacgtgccttcccaggaaatcaccagtcaccgtgaaaaaggaggaggaaaagaagccccacgtgaagaagcctctgaatgccttcatgttgtatatgaaggagatgagggccaaggtggtggctgagtgcaccctgaaggaaagtgcagccattaaccagatccttggaagaaaggtaagacctgccctctccctccaggccagggaggcagcgtccctgcattgatggctccgtgtggtctctgaccctctctcccccagtggcacaacctgtctcgagaagaacaggccaagtactacgagctggcccggaaggagcggcagcttcactcgcagctctacccaacctggtcagcccgggacaactatgtaagtgcacactctgggcagaggacgctcagaccccaggaacagcctctgcaagaggaggaagggtgaaggaaagcaactgcatttatttttatttattttattttcttttattttttgagacagaggctcaccctgtcacccaggctggagtgcatgcagtggcgcgatctcggctcactgcaagctccgcctccccggttcacaccattctcctgtctcagcctcccgagtagctgggactacaggcacctgccaccacacccggctaattttttgtatttttagtagagacggggtttcactgtgttaaccaggatggtctcgagctcctgacctcgtgatccgcccacctcggcctcccaaagcgctgggattacaggcgtgagccaccgcgcccggccagcgactgcatttatagaggactcttaagatcagggagaagcccatacttctctagaaataaggaaggtgttttaattctcaggaggtcaacaagtcctgaggacggacttcagttgatgcatttccctttgaactggactctgccctcgatttcataacacagggcacggggttagctgtggtaggaagagttgtctccagccactcctaacccaacccagggctcaaagaccagtgtgtgagcctcagggggcgtgtctctaagctcccggaaaccaagccaattttcgcatgcgtgttcttctttgctttttttctggtaagaggacccacagttgcatcaaactttcaaagggacctgggacccctcagaaaagatctagaagcactgttctagggagagaaacagaaaaacagagtctgaagggcagtggagggaggaggccttccaagaaggcctggacacccgacctggaggggaaacgcgtttgtaggggaggaagggctccctctgtcctctcacgggctcccacggctgtgatctgaattatctctccacactctccctgagggatcgagagcagtaaagggcaacgtcctgtcttctctctgatctgggagcccctgagaagccagcattcttctctcccagcttacctcttcctttggctgtattttccagggtaagaaaaagaagaggaagagagaaaagcagctgtcccagacacagtcacagcagcaagtccaggaggcagagggtgcgtctcggggcactggcctcttctcctgcttttccttttgtcacagccacacctgcccatgctgtctctagctccctgatgggtcagggcttctgcctcggtattcgcgggcgggtattattacccctttctcgaggtggccacttaagaggctctgagatgtgaaggcattttcccaggcactctgcttcagtggtggtggtaggatttgatcccaggactttgtcacttcaaagcctagacaatctaattccattgaaaagtgaatcatcctacctgagggttaatggaatgaggttgaaattgtctttgaaatacccttaggaaggcagcacatgagcccctgacatcccacctgtcagtggatccaggggagcccgggtttccttggatgtttctttggttgaacaccagaaaaaattagtttgcttgggtttaggaggcactttgtgtcaaaaccatgtataaaatctctatattaccagaatcatgcctagcacagaaagatgctcacactgtgacgattattattaatatttaggtcacgccccccatctcatgctcactccaggacaagtgtatcgctgcttgcacgatgtaaagtgctttcaatctctcttcttcattcctccctccctccctttcttcctccctccctttcaccttccctcccattctccttccctccctttccccttccctccctccttttctccctccctttctctttccctccctctctttccctccctctccccctccttccctcccttccccccctccctttcttcttccctcgctttctccttccgccctccctttctccttccctccctccctatttccttgcctcccctcctcccttccttccttccttccattatacataggagcgcacatgagtggaacccgtacctgctacagaacccgctgtctggcacgctgttcagcaggcatgcactctctctgactgtattaataccataaaccaaagatttcaaagcaaactggagattcatcccaaaagttaccagctttaggaaaggagggtggtcctgtgagacactgagccgtcttctctccgatctgatgctgggtggatcttcatcagtttgggcgttgcctcttctctgtgctctgggtatttgtgaatgcagtttcctagtcttgaaagccttggaagtaatgtcaggtcctcgccaaaatcatccctgtgtctccaaagcacatgtatcgccagggctgttcctcagcctcctcctctcacagagctatagctgctcactctttcttgtattttccccctaggtgccctggcctccaagagcaagaagccatgtgttcagtacctgccccccgagaagccctgtgacagccctgcctcctcccacgggagcatgctggactccccggccactccctctgcagctttggcctcaccagctgcccctgctgccacccattcggagcaagcccagcccctctccctcaccaccaaaccagaaacccgggcccagctggctctccactctgccgccttcctgtcggctaaggctgcagcctcctcctctgggcagatgggcagccagcctcccctcctgtcccggcccctcccccttgggtccatgcccacagctctgctggcctctcccccgtccttccccgccacgctccatgcccaccaggccctcccggtgctacaggcccagcctctttccctggtcaccaagtctgcccactaagctccccccgacccctgcaggctgtcacatgactcattgagtagtaatgattcagaagaaaaagaaaaaggagactttattggtcaatatttgaccactctggactgttctgtaaagtggctggtaacaacagcactttacagtttgtagatgtaaccagtagctgatcttaaggcttttttaaaaaacaaaacaaaacaacaaaaaaaaatctttataagaaagagaactgaaaagtagcgtgctattcgtcctgtaggtgctgtggtggatggacctgggcagagggcacttctctctcttacctctcttgcactttctgtctcctgtctcttctcgcccctgccgcctgccccagcttccccgactccatctgcagctctgccattgtgacatttcctgttacccagcccaagttttcatcgtctgctcaataccgtgggttcttcttcgtcctctgtcctctgcccagtgtgaggccatcaccatgtgagaagacatcttggcctgatttgctgccaccagcgtcccctccctcagtgggcccgaactcgccagccccagctttcagtggagaaagcggtcctctgaaatggtttcctcccaacccccgcatttaaagggactcaaggtgcctgccacttcctcagcgaagaagtctgtgttcctccccgtccttgccagtggcgatcatcccttcacaatcccagagtggcaggcgggaccagccccatggtctggctcctgtcacctgggtccgtgccagcacaatctgccaaagttctagagaccctgttcccttccccatcacctcacatgcttcttctgtgtgtatttctttttgtttttatggtttttggagcaatttaaactcccagttgtttattttcacaaaagaaaataaaattgcagttgcaagaccttttctgagtgtttctttagtgcttttgttgaatcaaaccacctgtttgtttcactcccaaaccctgtgttagactttcgcagatatgcaaaggaagattgccacttgccacaggggaatgttaggcatgcctgacacccttagaaaacctgaacccagcttcctgtctcaaatgtgcatgggccagtcagtgtccatgactgagctgcaaagggggtaatcattttcacagctgatttaaatgaatttgccgcctggaatgacattcagcttatgcttctatcacccattt

SEQ ID NO: 12690 - DNA, 77 bp, Homo sapiens
aaaaaaaaaaaaaaaaaaaaaaaaaaaaaaaaaaaaaaaaaaaaaaaaaaaaaaaaaaaaaaaaaaaaaaaaaaaaa

SEQ ID NO: 12691 - DNA, 386 bp, Homo sapiens
gagttcaggactagcctgggcaacatagcaagacctgatctctttaaaaaaaaaaaaaaaaagcaactagctggggatggtggcacacaagcctgtagtcccagcttctcaggaggctgaggcaggaggattgcttgagctcaggagctcaagactgcagtgagttatgattgtgccactgcattccagccttctcaacagagtaagactctgcctcaaacaaaaaaggtatacaattcaggctgggtgcgatggctcacacctgtaatcctagcactttgggaggccgaggcgggtggatcacctgaggtcaggagttcgagaccagcctggccaacatggcgaaaccccgtctctactaaaaatacaaaaattagccaggcatg

SEQ ID NO: 12692 - DNA, 1855 bp, Homo sapiens
caaagaggaatatagccatttggagttgtagcccttgggttacctccaaatcatcttttttacaaatctcttttttttttttttgaaatggaatcttgctctgtcacccaggctggagtgcagtggcacgatctcggctcactgcagcctctgcctcctgggttccagcaattctcctgcctcagcctcctgggtagctgggactataggcacacgccaccatgcccggctaatttttgtatttttagtagagacagggtttcaccatgtcggccaggctagtctcgaactcctgacttcaggtgttctgcccgccttggcctcccaaaatgctgggattacaggcatgagtcatcgtgcccggccacaaatctcttttaaaaagaaatctcttctccacttgtaactcacttatcttattatcaaaaaacataatttctgtcctttctctgtgacagataagttttacgttttgagaaggttctgggagagacaggttgtacaagagaaaacattcttgtttattagagccataaacagctgatatgaatcccagctctgccacttactaaccgtgtcccaggctaagtcatgtaatctttctgggctgttccctcatctctggaatgggggtaatcacagcttcttttctaggttataaggagtagaaattatgcctggtgctgtgtttgtaatgcagggttcagtgacctgtagatgtttttaaaataaaaagccttatggataagtcagattaggtttaaacaattaaaaagttaattctgtttaccaattgtagaacgcacaggtttttcccatgttaacatctctgaagatgtgtctgtggcgtgccagcgtttttctcaatagctttataaaataatggtgctccttccatttggtggtgttttacacagaatgtggtagtgaggtcagcagagtaaagtgttacagagagaagtgtttcaagtgctttagggttgtgtctgtaaagcctgaatatgagacttggtagtatgaggtctaatgggggcaactctccccctgccctgttcccagtcccagacttgaacctgagagcaactgtttctatgaagtttatttgaaaaatgtgtgttaaaccttttcagggccgggcgcagtggttcacacctgtaatcccagcaccttgggaggccgaggcgggtggatcacctgaggtcaggagttcaagaccagcctggcccacatggtgaaaccctatctgtactaaaaatacaaaaaaattagccaggcgtgatggcagacgcctgtaatcccagctactccagaggctgagacaggagaattgctggaatccgggaggcagaggctgcagtgagccgagatcatgctactgcactccagcctgggtgacagagcaagactccatctcaaaaaacaaaacaaaacaaaaaaaaaacctttttagattcaatgagatgacacagcgcagatcatccctcagcagcctgtagtgtttgagatgacacagcgcagatcattccccagaagcctgtactgtttcccacacacagtgcacgtgaggggagcgatggagggtgggtgtgatcccttctcaagtcctgctgctctgctgtgtccactgctgtcatctctcagggactgttttgaggactgaatgggatgttgcctggaaaatacctggcacttacttgattccataaataacagctggtcatactctccatctccttggcaaccattcctggtcttttttgtctctttcagtctaataaagttcctgtcgttcagcacccgcatcacatgcatccgctgactcccctcatcacctacagcaatgaccacttctccc

SEQ ID NO: 12693 - DNA, 8056 bp, Homo sapiens
agcggcctgcagtgggaagctggagcagcacacggagcggcgtggggtcatctacagcccggcctggcccctcaactacccgccaggcaccaactgcagctggtacatccagggcgaccgtggtgacatgattaccatcaggtaggggcacccgggggtgtcggaaggaatcaatgtgggcccacgtgcatggggtgggtgagaatgtgtgtgtgtgagcaggtgtggagggcacacgcctgagggtgtacatgtgtgtgagcaggtgtgggatcatgtgcatgtgtgtgagcatatgagtgaggcgtgtgtgagcactcgtgtgaacaggtgtatgggtgtgtgcatgtgtgtgagcatttgtgagtaggtgtgtgtgcatgcagatgtgtgtgtgtgaggtaggcgtgtgtaggtatttgagcaggtatgtggtgtgtgcatgcatgtgaacacatgtaagtaggtgtgtgtgcatatgtgtgtgtgtgcatgtatgtgaacacatgtgtgcttgtgtacatggaaaagcccatgtcggagaagacataaaggacacatgtgagagactgcatgtgtgagcacatgtatgtgcacgagccatgcctgcaaaggtgcagagagcgtgtatgtgcgcatgcatgtaagataacaggtgtaaccatgtgtgaaccgtaagcatgtatgtgcacatgtgaatgcatgcacgcaagtgtgtccagtgctctgggtctccacgggcctctgtggcgaggtgcccaagctggacctcttcctggtttgagcctcgttcatggggtgtggggggtctcagtcactcagctctgccaggaaggcagggccagcacacaggccactgggaacacagcctgggactggtgggcatggtctgatgtctctgaggtggcagaggtgtcctctctgtcctgcaggggtggctgggggccaggctggcactgagcccagagcatggtttctggagggggccttggggaggggagtgaatcaggcaaagcccgggtgcttgagctgcagggacatgcagagggaaagggggccaggcagtgagcggtggtcctggccaggggtggtcacagggacatttggctggggagtcactataggttccatctgccatagttttcctaaatgccagagcccaaaaagcgcaacccctgacttactccatagctgcaatgcgtgaggatgtgatgggcatgggcagggtctatcctagtctctgtgcctcagtttccccaagggccaggtggttcagggccagtgtatctccggagatgacaagctgtcaacctgctgcagccttagccagccccgtgggcagtctcaccctcacttcccatgcctgggactttgtgctgggcccatcccagtggtcccgaggtggagggttctgggcccttgggccactgcccttttggggagggtgtcggggcagggggctcttgacttcctgctccacttcggcttcgggctgggggtactgtgtgcactgatggagggaaggggagccgcagcagagctggaaatgacctgcgtggatgtcgcaattcttcatggagcctcccgtgcacacctggatggggacagtgtggggacagagtggctgggagtggaggaaccaggcagtctggaacatgaggagtgggggcagccggccgggacagggctggctgtcctggccgtggctccagcctgaccactccctgctggtcctcggccatggagatcccacctactgcctcatgtctgggtcctctccgcccccccgcagcttccgcaactttgacgtggaggagtcccaccagtgctccctggactggctcctgctgggcccagcagccccaccccgccaggaggccttccgcctctgtggctccgccatcccacctgccttcatctctgcccgcgaccatgtctggattttcttccactcagacgcctccagctccggccaggcccagggcttccgtctgtcttacatccgaggtgatggaggctgcagggcaggcaggacaccacggagcacaccgtgcatgcccacaggctcccggcccacaggggcggcaccctccacagggccccggctccctgtgggatgtcccctgaccgccctgtcaatctcaggacagtggcaggactgggcatgcggatgccttggacctctcaaggtcactggccccacttcccagtcttggctagtcctgggaactcacccctaaccccaggctcaggtcagggacagagcccaccctggtgttggaggggtctctgctgccacagtgatggggaaccacctgcccgcttttggccccaggccccctggccgaagggaggctcttctgtctcctgactgtcccctgctacgtctccaccccacagggaagctgggccaggcatcctgccaggcagatgagttccgctgtgacaacggcaagtgcctgcccggcccgtggcagtgcaacacggtggacgagtgtggagacggctctgatgagggcaactgctcggcgcccgcctccgagcctccaggcagcctgtgccccggggggaccttcccatgcagcggggcgcgctccacgcgctgcctgcctgtggagcggcgctgtgacggcttgcaggactgcggcgacggctcggatgaggcgggctgccccgacctggcgtgcggccggcggctgggcagcttctacggctcctttgcctccccagacctgttcggcgccgctcgcgggccctcagaccttcactgcacgtggctggtggacacacaggactcccggcgggtgctgctgcagctggaactgcggctgggctatgacgactacgtgcaggtatacgagggcctgggcgagcgcggggaccgcctgctgcagacgctgtcctaccgcagcaaccaccggcccgtgagcctggaggccgcccagggccgcctcactgtggcctaccacgcgcgcgcccgcagcgccggccacggcttcaatgccacctaccaggtgaagggctattgcctcccctgggagcagccgtgcgggagcagtagtgacagtgacgggggcagcctgggcgaccagggctgcttctcagagccacagcgctgtgatggctggtggcattgtgccagcggccgagacgagcagggctgccctgcctgcccgcccgaccagtacccctgcgagggtggcagtggtctgtgctacacgcctgccgaccgctgcaacaaccagaaaagctgtcccgacggcgccgacgagaagaactgcttctcctgccagcccggcaccttccactgcggtaccaacctgtgcatcttcgagacgtggcgctgtgacggccaggaagactgccaggacggcagcgatgagcatgggtgcctggccgccgtgccccgcaaggtcatcacggcggcgctcattggcagcctggtgtgtggcctgctgctggtcatcgcgctgggctgcgccttcaagctctactcactgcgcacgcaggaatacaggtgggcgctgtgcccgcagccaggggaccgggcttcttcatcacccaggcttgctgtccccgtagctgtgggtttgcaaacgggggcctggactagctacatggaggctgccctggtgcacactggggtccctatatcttggggtgtctgggtggagggtcgtcctggaatcctgttgttgttcctgctgcaggtcccgggcagcccagtcatgtcgccctccgcccactgcttctagggccttcgagacccagatgacgcgcctggaggctgagttcgtgcggcgggaggcacccccatcctatggtcagctcatcgcccagggcctcattccacccgtggaggactttcctgtctacagtgcgtcccaggtgagcccccggagggcgtgaggcccctccggggccacttgggacagtgtgcggaggaggctggtccaggggtcacaggagcaggaggcaaggcctgcgcagggtgacctgagggcccatggccaggtggggggggtggacaaggtggtctctcgggtctcaggtcccttgggggtgtgctgtctcctgcccctgagcagcctgtctgccccctcagccgcatccccccgcccctaccctgctccaccccacaggcctctgtgctgcagaatcttcgcacagccatgcggagacagatgcgtcggcacgcctcccgccgggggccctcccgccgccgcctcggccgcctctggaaccggctctttcaccggccgcgggcgccccgaggccagatcccactgctgaccgcagcacgcccctcacagaccgtgctgggcgatggcttcctccagcctgctccaggggctgcccccgaccccccagcaccgctcatggacacaggcagcaccagggcggccggagacaggccccccagtgcccccggccgtgcaccggaggtgggaccttcagggccacccttgccctcgggcctgcgagacccagagtgcaggcccgtggacaaggacagaaaggtctgcagggagccactggtagacggcccagctcctgcagatgcacctcgggagccctgctcagcccaggacccgcacccccaggtctccactgccagcagcaccctgggcccccactcgccagagccactgggggtctgcaggaaccccccgcccccctgctccccaatgctggaggccagcgatgatgaggccctgttggtctgttgaccgctgggctcgctggtgaccgccacagccccgctttgtaaccagggaatacacagtcatttctaccctgcctctgcgtcctttcttatggagaggccctccggggaccccagcggaggggctggcccctaagccagctggctgcactggtgggcgggagctgtgggactgaacggcgggggggagaagagtggagtggtgagcccgtctgcagggtcccattgtacacaagcaccctggggtctcacttctctccccccactccattctgggaacccatttccagagaagcaggggaccagagcctttttgcttcatctgccctgcagtggcaacagctgcccctagagctgggagttgtcatgaggatggggccgggccatggggacgctgggtctcatccgtggtgactattttgctcacgcctcaccctcttcctgtccagcaaggcctctggaggacctgggttgggtggctcctgccaaaccctcatgcccctggccaggcaggcgccctttgccctccctgaaggtccaatctcctgggcaccgtggaagggctggggtgtgtgcctgctgtacatgaagcccctggagttccctgcaggcctcaaagcccccaggacatgctgctctgtgctttctggggacagagaggccgaggcaccaacagcagtggccacgtctgttccatcctatctcagggcctcggtttccccacctgtaagccagggtgagactgtgggctctgaagtcctgaccttcactctgtggtgatttacgggaagaaagacaatcccagcctggagcccctgagctctcctgggtggccgagctcagactggcatcgaggggcctggggtaggggcggactgagctgctaccccatcctcgacatccctttagggcagggggactctgggtgccatggtagggagcgcctgtgtcaagcagcaaagccccctaatgtcaagagcctcctccagggcctgccacggcatcttcctggccagcaacatgtgtgcacccaccgaggtacgccccagccactcccatctgtgcccatcagggactccccatagcacgagcgaacagccagccctgtttatttataggccttttcaggaagagctagcagggcagtgctaagacaggaaacccagtccacattttagggcttccttaaacaggcttctgagagtcgtatcttttttcttttttttccagaaaaaaacaaaacaaaacttttttgccaaaacacctcctcaataaacaacatgtaaacagaaacaactgcttcagtctctacaaaaatctcattgtggcttcgagggcttgtctgtggcaggcagcagggagggtgggcaggggccattctcctcctcttcgggggcgtcctgggggtagaccacgaaacacagctcctggccccagtgtgtcatggactctgaggacagacagatggaccttggggcctgacctctcgggataggggtgacccccagctccggacacctccccttgggcaggggtcttcagggagttgctccgtcggtacccgtggttctggaaactttgggtacatcttgggaagagacatttggtggcggctgggccctgtgttcccacctcagctgctaggacaccctgctctggggtgagcctctaagagggaggtctggtctccaggccccggccccctgtgctgggtgacctgcagctgcccggctcacctgtgagtctgtgcacacactttggtttgcttctccagaacactcccagaaagaaaatgggcacccccgtaaggatgatgatgacgccgaccccacagaccataggctctgagatgaagctgaagaccagcaggaaggcccagaagaccaagtacgccacggggatgagaaggttcacctggggaagggggagcagaaacaccgatggtgcagggcctccagctgtctgtacccccgacccctgggggtctggggaattttcctcccttccctgggagctgaggcctgaagggcaattgcacccactacaccccctcttggcgacagcccagtgtgttggaggccaattcatgggtcaggccgttggccagttttgctgaggatttttcaaagtctcagcggcaccgagctccacacagcggttgcgtgtggacttgaggcttgcacttggctggaggtcagtgattttttggtgtttcacatttcaggcactgagcacttctccacttaaggatttatacacacatggggggctttgcttttagctcaggctatggtcttctgtttttgtgtgggctcatgaaatcctggcagcctttgtgaccttgaacagttcctgagtctcattttctttaatttttttttttttttgagacagggtctccctctgtcacccaggttggagtacggtggccctagcaccgctcactgcagcctcaacctcccgggctcaagcgatcctcccatttcagcctctcaagtagctgggaccacaggtgcgcaccaccacaccaggctaacccttttatttttaactttttgcagagaggaagtctcgttatgttgcccaggctggtctcaaactcctgggctccagcaatcctcccacctcggcctcccaaagtgctggaataggcatgagcccctgtgcccagtcctgagcctcattttcgccatctgtacactgggagcattcaaagctctgtcctcatggggctgctatgaggaatggctgcctcagtgcacagagagccctgagcagggcccaacactccacaaaagctggcacctcccatcccacctgcccctggtgcccactgtggatgcaggggtggctctggcagcacccggcacagggccagctgtcccagggcctcaccttgatgggcctgtggagtgcaggccgcctccagcgcagcagcagcaggcccaggatggtgacgccgtagcagaggtagttgatgaaggacacatagttgatgagcgtgtacgtgtcgcccacgagcatgatgacggctgtggccccgcactgggagaggacctggggctgacggctggcccctagcctgcctcctgacgcccctgcaggatgagccctggccccaccccccaacccccaccctggaatggctcacccctgccattacccggaaggtcctgcattgccgggtagccctgcctccacgccctgcctggcccaggtcccccaacttacacagacgaggagggcggggatgggggtgcagtgtctgacgtggatcatggccagcaggctgggcaggtgcccctcgcgggctccagagaagcacagcct

SEQ ID NO: 12694 - DNA, 3540 bp, Homo sapiens
gccgtgcattatccgcaacgctctgcagcactggccggccctccagaagtggtccctcccctatttcaggtgggagctgccctggggtcaggtgtgagcagtgattactggcatctgggcatgggctgagtgtccattcctctagagccacagtgggctccacagaggtgagtgtggccgtgaccccagatggttacgcggatgccgtgagaggggatcgcttcatgatgccagctgagcgccgcctgcccctgagcttcgtgctggatgtgctggagggccgggcccagcaccctggagtcctctatgtgcagaagcagtgctccaacctgcccagcgagctgccccagctgctgcctgatctggaatcccatgtgccctgggcctccgaagccctgggtgagtggagtggggtggtcgtggccctggacagggaagatatgggaaggaggggggtcagcctgtttgcccttaggtgatgacctggcctatgggcttggtcctgtcagcatctggtgcagctcactaaatacattcccaggccttgacttaatcatagatgaattgccaaagattgttgtccttccttctgccccagggagggaggaccccttccccaagatttcccaacctctgcctcttctccctgacccctttcttgggattcttctgtgctcacccaggttttggctctggcatcactggatggcagctttccccagcctggccttcctaacttgctctctgccttctgccctgcaggaaagatgcccgatgctgtgaacttctggctgggggaggcggctgcagtgacttcttgtaggtgtaaggggaatacaaaggtggggaaggagcaggttggggcagagggagggaagacgaggccaggagtggagggatggccctgggtggaggttgggctgttctctaagatttcttttggcttctaggactcgggcaccacagagggtttcccctgacagctgaggtcggggaatggacccatggcattgggggcgggtgcattgtttcttctagacccaaagaaacctccctgaaggcccgctgggccagggggtaagtgtaggagaacttcccctcttgttgaagaggagtccagggcctggtgagcatcaggtccctggtaggcagagttccagaatgcccatcagagcccctggcatctccagcccactggctctgtgtgtgcttctcttttgtcataggacgtcttggggtgcagggctctcagcatgatggtttgcctcctcccgtgcccctgccctccataccctgcccccgggccttctttctgttggcagtgcacaaggaccactatgagaacctctactgcgtggtctcaggagagaagcatttcctgttccatccgcccagcgaccggcccttcatcccctatggtaggggatgtggcctgcagggaggggctggggaacagctggcccaagggggagggaggcagcaagagcctgggaggccagttcccaggcctgaggtgtggctgtggcatccccagtgcaccagggcccctgatccccttgcccctgcccagggctggctggggtggaggagggtctggcaagttccaggctgtttgcaattcccccacacccttctcccttgggctccagagctgtacacgccggcaacctaccagctaactgaagagggcacctttaaggtggtggatgaagaggccatggagaaggtgtctgtcctgttcttgggctctagggagggagaagggcagaagcctggctctgaagaacaggcacaaaagatctggggaggtggcaccttgctctgaaaagtctctaagtctgaggcctttcactgctgagccaagcagggcctgtggtgttgacctttggaagggacagagcctgaagtcctgggggggtctggggggctgctccctggcatctgatgtgttcccaggtgccctggatccccactggaccccttggcgccagacctagcacggtaccctagttacagtcaggcccaggcccttcgctgcacggtgcgggccggtgagatgctctatctgccggctctgtggttccaccacgtccagcagtcccagggctgcatcgcaggtgaagagttgcccaggccgcctggggagaggccctgtcaaggtccagcagggcctctggggggaggcttgggaggctctaggtcagaagagggatcttcatgctcagatccccgttcttcccacagtgaatttctggtatgacatggaatacgacctcaagtatagttacttccagctgctcgactccctcaccaaggcttcaggccttgactgatggagcactggtgaacaccaccaagcacgcctcgggggacggagccagcccctccctggccaggtcaattctcgagagagcctggagtgtgcatgctggctgctggccccgggtccagcatggcttgagatcagctttggaggatcttggaatgtggtcataaggactcaaggtgccaggcaggtctgggtgagggttctcaggaagttgccacacaggtgagcagagtggggatcaggtgcagcggcacctctccccagcgctgtgatgttgggcgagtcactgcgtctcgggcattggtgtcctgtcagtaaagagataataatggctgtacctcgcggggctgttgtgggcttggagatgatgtctatgaggaccagcatggagctggcacacaggacatgttgaataaaaggtagctgtgagtcgtatgtccttttttttttttttttaagatggggtctcgctctgtcacccaggctggagtgcagtggtgtgatgtcagctcactgcaagctccgcctcccaggttcacactattctgcctcagcctcccaagtagctgggactacaggtgcgtgccaccatgcccggctaatttttttgtatttttagtagagacggggtttcaccgtgttagccagtatggtcttgatctcctgacctcgtgatccacctgcctcggcctcccaaaagtgctgggattacaggtgtgagctgctgcgcctggcttatgagtcgtatgttctgatcctccctcttgaagttgccttctgtggtctaaggagggcctgaaggttcaggtaaaaacttcagggtgaccttcactgggggtgagggctggatcccagcctgggcccaaagagccgtcagctgcccaagtcccgctgtccatgagagtcaccgcagcccctccctgggacaagcaagcagacctgagtcttgtagctctctggtccggacctctttgcccaggaccttgagagctattcctagctctcctatggttactgtcctcccccagttcaggggcagcaggtgggacctgggtgccctggggataacccctgtttctcccataacaggcacaggcaggaagggacggaagcccccgcctctcctggggctgtccctctgaggaaagagttggtctccacacgctgacccccccacaaaccatgccctggaggcagaagaaccccctgcc

SEQ ID NO: 12695 - DNA, 1711 bp, Homo sapiens
agttaatatgtttcttatgggagctgtggtcttctccaggggtagggaggggagtttattgaccacaagaccagggtagcgggcagaagccaggggaggaggaggcttggggatgagggatccgtcctgagtgttttctgtcctgggaacgggctcctggcagagctccctggcaccacagatttgggccctggagactcagaggctcccagctgccgccctgaggccctggaagcaagtggctcctccatgctcctctgactcagttgcctggagtgtgagggccctgggctgaccctggtggatgaggccctccagcactgccctggacctggttgctccctggacttgacctgttagggtccttgtggaggcaggtggaaggccgaaaggaagcagttggcacaggcttccctggtcccggtgcgcctgccaggctgcattcccagaaccaggggcatgggtttggagggagctaccgggggaccatcttcagcctgacctggcaggacctggaggacatgacagcctgtgaggggtctgagctaggagccgcctcccctgcccaggagagagcccatttccaggatgctcttctgaccagggtggagggagggtacgagagcagctcagcctggggcccaaggccctgatgtgctacttcccctccctcgatagcttatgtcccctgccacccaagaccagccggaaagctgcttagctggggtgtgggctggggatgtggggtggagagcctaaaggatactagcccgagaaggtggaagcaggtctgtgtgaggcataaatctggagccagcctgcccgggctccaaccccaattgtggacctcaggcaagtgactgcttctctgtgcctcagtttccttgtggagtgggccatcgtaaatagtatctgtgcataaggtggttgtgcgataaatgagttaatgtatgcaaagcccttggcccagagccggcgcagagcattgtgtaagtgctggcaggcgtcatgatggagatatcatgtctcctcttgttgattcaggattctgatgagatggaggatgggcctggggttcaagattaagcccttgaggcactgctccagcctccttttgtgggcccctgtcacccttggcttcatcggcccgtagcaggtctcccctctcccacctctgcaggcagaggtgtccaggacctgcctgctcacggttcgtgtcctgcaggcccatcgcctaccctctaaggacctaggtgagtgcgcaccgccctggcccctgtgctgggctgagggaggaggagggtgcttaggaggagggtgctgtggctggatttggtggaggcgggtgggccggtgggcagggcctagaggagggagctgagaggagcttctgggtggaaggtggcagctggggctctgcctctggcccccacttcccctccccctcagtcttaacccacatggggctctaggtgatggaaggaagtgggtctgggcggctgggaagggctcttgtccaccgctgggcacttgttccttcccgcagtgaccccctctgactgctacgtgactctctggctgcccacggcctgcagccacaggctccagacacgcacggtcaagaacagcagtagccctgtctggaaccagagctttcacttcaggatccacaggcagctcaaggtgggccaggcatcagcgctgactctac

SEQ ID NO: 12696 - DNA, 38771 bp, Homo sapiens; identical to SEQ ID NO: 7561
  SITE (7892): n equals a,t,g, or c
  SITE (7893): n equals a,t,g, or c
  SITE (7894): n equals a,t,g, or c
  SITE (7895): n equals a,t,g, or c
  SITE (7896): n equals a,t,g, or c
  SITE (7897): n equals a,t,g, or c
  SITE (7898): n equals a,t,g, or c
  SITE (7899): n equals a,t,g, or c
  SITE (7900): n equals a,t,g, or c
  SITE (7901): n equals a,t,g, or c
  SITE (7902): n equals a,t,g, or c
  SITE (7903): n equals a,t,g, or c
  SITE (7904): n equals a,t,g, or c
  SITE (7905): n equals a,t,g, or c
  SITE (7906): n equals a,t,g, or c
  SITE (7907): n equals a,t,g, or c
  SITE (7908): n equals a,t,g, or c
  SITE (7909): n equals a,t,g, or c
  SITE (7910): n equals a,t,g, or c
  SITE (7911): n equals a,t,g, or c
  SITE (7912): n equals a,t,g, or c
  SITE (7913): n equals a,t,g, or c
  SITE (7914): n equals a,t,g, or c
  SITE (7915): n equals a,t,g, or c
  SITE (7916): n equals a,t,g, or c
  SITE (7917): n equals a,t,g, or c
  SITE (7918): n equals a,t,g, or c
  SITE (7919): n equals a,t,g, or c
  SITE (7920): n equals a,t,g, or c
  SITE (7921): n equals a,t,g, or c
  SITE (7922): n equals a,t,g, or c
  SITE (7923): n equals a,t,g, or c
  SITE (7924): n equals a,t,g, or c
  SITE (7925): n equals a,t,g, or c
  SITE (7926): n equals a,t,g, or c
  SITE (7927): n equals a,t,g, or c
  SITE (7928): n equals a,t,g, or c
  SITE (7929): n equals a,t,g, or c
  SITE (7930): n equals a,t,g, or c
  SITE (7931): n equals a,t,g, or c
  SITE (7932): n equals a,t,g, or c
  SITE (7933): n equals a,t,g, or c
  SITE (7934): n equals a,t,g, or c
  SITE (7935): n equals a,t,g, or c
  SITE (7936): n equals a,t,g, or c
  SITE (7937): n equals a,t,g, or c
  SITE (7938): n equals a,t,g, or c
  SITE (7939): n equals a,t,g, or c
  SITE (7940): n equals a,t,g, or c
  SITE (7941): n equals a,t,g, or c
  SITE (7942): n equals a,t,g, or c
  SITE (7943): n equals a,t,g, or c
  SITE (7944): n equals a,t,g, or c
  SITE (7945): n equals a,t,g, or c
  SITE (7946): n equals a,t,g, or c
  SITE (7947): n equals a,t,g, or c
  SITE (7948): n equals a,t,g, or c
  SITE (7949): n equals a,t,g, or c
  SITE (7950): n equals a,t,g, or c
  SITE (7951): n equals a,t,g, or c
  SITE (7952): n equals a,t,g, or c
  SITE (7953): n equals a,t,g, or c
  SITE (7954): n equals a,t,g, or c
  SITE (7955): n equals a,t,g, or c
  SITE (7956): n equals a,t,g, or c
  SITE (7957): n equals a,t,g, or c
  SITE (7958): n equals a,t,g, or c
  SITE (7959): n equals a,t,g, or c
  SITE (7960): n equals a,t,g, or c
  SITE (7961): n equals a,t,g, or c
  SITE (7962): n equals a,t,g, or c
  SITE (7963): n equals a,t,g, or c
  SITE (7964): n equals a,t,g, or c
  SITE (7965): n equals a,t,g, or c
  SITE (7966): n equals a,t,g, or c
  SITE (7967): n equals a,t,g, or c
  SITE (7968): n equals a,t,g, or c
  SITE (7969): n equals a,t,g, or c
  SITE (7970): n equals a,t,g, or c
  SITE (7971): n equals a,t,g, or c
  SITE (7972): n equals a,t,g, or c
  SITE (7973): n equals a,t,g, or c
  SITE (7974): n equals a,t,g, or c
  SITE (7975): n equals a,t,g, or c
  SITE (7976): n equals a,t,g, or c
  SITE (7977): n equals a,t,g, or c
  SITE (7978): n equals a,t,g, or c
  SITE (7979): n equals a,t,g, or c
  SITE (7980): n equals a,t,g, or c
  SITE (7981): n equals a,t,g, or c
  SITE (7982): n equals a,t,g, or c
  SITE (7983): n equals a,t,g, or c
  SITE (7984): n equals a,t,g, or c
  SITE (7985): n equals a,t,g, or c
  SITE (7986): n equals a,t,g, or c
  SITE (7987): n equals a,t,g, or c
  SITE (7988): n equals a,t,g, or c
  SITE (7989): n equals a,t,g, or c
  SITE (7990): n equals a,t,g, or c
  SITE (7991): n equals a,t,g, or c
  SITE (7992): n equals a,t,g, or c
  SITE (7993): n equals a,t,g, or c
  SITE (7994): n equals a,t,g, or c
  SITE (7995): n equals a,t,g, or c
  SITE (7996): n equals a,t,g, or c
  SITE (7997): n equals a,t,g, or c
  SITE (7998): n equals a,t,g, or c
  SITE (7999): n equals a,t,g, or c
  SITE (8000): n equals a,t,g, or c
  SITE (8001): n equals a,t,g, or c
  SITE (8002): n equals a,t,g, or c
  SITE (8003): n equals a,t,g, or c
  SITE (8004): n equals a,t,g, or c
  SITE (8005): n equals a,t,g, or c
  SITE (8006): n equals a,t,g, or c
  SITE (8007): n equals a,t,g, or c
  SITE (8008): n equals a,t,g, or c
  SITE (8009): n equals a,t,g, or c
  SITE (8010): n equals a,t,g, or c
  SITE (8011): n equals a,t,g, or c
  SITE (8012): n equals a,t,g, or c
  SITE (8013): n equals a,t,g, or c
  SITE (8014): n equals a,t,g, or c
  SITE (8015): n equals a,t,g, or c
  SITE (8016): n equals a,t,g, or c
  SITE (8017): n equals a,t,g, or c
  SITE (8018): n equals a,t,g, or c
  SITE (8019): n equals a,t,g, or c
  SITE (8020): n equals a,t,g, or c
  SITE (8021): n equals a,t,g, or c
  SITE (8022): n equals a,t,g, or c
  SITE (8023): n equals a,t,g, or c
  SITE (8024): n equals a,t,g, or c
  SITE (8025): n equals a,t,g, or c
  SITE (8026): n equals a,t,g, or c
  SITE (8027): n equals a,t,g, or c
  SITE (8028): n equals a,t,g, or c
  SITE (8029): n equals a,t,g, or c
  SITE (8030): n equals a,t,g, or c
  SITE (8031): n equals a,t,g, or c
  SITE (8032): n equals a,t,g, or c
  SITE (8033): n equals a,t,g, or c
  SITE (8034): n equals a,t,g, or c
  SITE (8035): n equals a,t,g, or c
  SITE (8036): n equals a,t,g, or c
  SITE (8037): n equals a,t,g, or c
  SITE (8038): n equals a,t,g, or c
  SITE (8039): n equals a,t,g, or c
  SITE (8040): n equals a,t,g, or c
  SITE (8041): n equals a,t,g, or c
  SITE (8042): n equals a,t,g, or c
  SITE (8043): n equals a,t,g, or c
  SITE (8044): n equals a,t,g, or c
  SITE (8045): n equals a,t,g, or c
  SITE (8046): n equals a,t,g, or c
  SITE (8047): n equals a,t,g, or c
  SITE (8048): n equals a,t,g, or c
  SITE (8049): n equals a,t,g, or c
  SITE (8050): n equals a,t,g, or c
  SITE (8051): n equals a,t,g, or c
  SITE (8052): n equals a,t,g, or c
  SITE (8053): n equals a,t,g, or c
  SITE (8054): n equals a,t,g, or c
  SITE (8055): n equals a,t,g, or c
  SITE (8056): n equals a,t,g, or c
  SITE (8057): n equals a,t,g, or c
  SITE (8058): n equals a,t,g, or c
  SITE (8059): n equals a,t,g, or c
  SITE (8060): n equals a,t,g, or c
  SITE (8061): n equals a,t,g, or c
  SITE (8062): n equals a,t,g, or c
  SITE (8063): n equals a,t,g, or c
  SITE (8064): n equals a,t,g, or c
  SITE (8065): n equals a,t,g, or c
  SITE (8066): n equals a,t,g, or c
  SITE (8067): n equals a,t,g, or c
  SITE (8068): n equals a,t,g, or c
  SITE (8069): n equals a,t,g, or c
  SITE (8070): n equals a,t,g, or c
  SITE (8071): n equals a,t,g, or c
  SITE (8072): n equals a,t,g, or c
  SITE (8073): n equals a,t,g, or c
  SITE (8074): n equals a,t,g, or c
  SITE (8075): n equals a,t,g, or c
  SITE (8076): n equals a,t,g, or c
  SITE (8077): n equals a,t,g, or c
  SITE (8078): n equals a,t,g, or c
  SITE (8079): n equals a,t,g, or c
  SITE (8080): n equals a,t,g, or c
  SITE (8081): n equals a,t,g, or c
  SITE (8082): n equals a,t,g, or c
  SITE (8083): n equals a,t,g, or c
  SITE (8084): n equals a,t,g, or c
  SITE (8085): n equals a,t,g, or c
  SITE (8086): n equals a,t,g, or c
  SITE (8087): n equals a,t,g, or c
  SITE (8088): n equals a,t,g, or c
  SITE (8089): n equals a,t,g, or c
  SITE (8090): n equals a,t,g, or c
  SITE (8091): n equals a,t,g, or c
  SITE (8092): n equals a,t,g, or c
  SITE (8093): n equals a,t,g, or c
  SITE (8094): n equals a,t,g, or c
  SITE (8095): n equals a,t,g, or c
  SITE (8096): n equals a,t,g, or c
  SITE (8097): n equals a,t,g, or c
  SITE (8098): n equals a,t,g, or c
  SITE (8099): n equals a,t,g, or c
  SITE (8100): n equals a,t,g, or c
  SITE (8101): n equals a,t,g, or c
  SITE (8102): n equals a,t,g, or c
  SITE (8103): n equals a,t,g, or c
  SITE (8104): n equals a,t,g, or c
  SITE (8105): n equals a,t,g, or c
  SITE (8106): n equals a,t,g, or c
  SITE (8107): n equals a,t,g, or c
  SITE (8108): n equals a,t,g, or c
  SITE (8109): n equals a,t,g, or c
  SITE (8110): n equals a,t,g, or c
  SITE (8111): n equals a,t,g, or c
  SITE (8112): n equals a,t,g, or c
  SITE (8113): n equals a,t,g, or c
  SITE (8114): n equals a,t,g, or c
  SITE (8115): n equals a,t,g, or c
  SITE (8116): n equals a,t,g, or c
  SITE (8117): n equals a,t,g, or c
  SITE (8118): n equals a,t,g, or c
  SITE (8119): n equals a,t,g, or c
  SITE (8120): n equals a,t,g, or c
  SITE (8121): n equals a,t,g, or c
  SITE (8122): n equals a,t,g, or c
  SITE (8123): n equals a,t,g, or c
  SITE (8124): n equals a,t,g, or c
  SITE (8125): n equals a,t,g, or c
  SITE (8126): n equals a,t,g, or c
  SITE (8127): n equals a,t,g, or c
  SITE (8128): n equals a,t,g, or c
  SITE (8129): n equals a,t,g, or c
  SITE (8130): n equals a,t,g, or c
  SITE (8131): n equals a,t,g, or c
  SITE (8132): n equals a,t,g, or c
  SITE (8133): n equals a,t,g, or c
  SITE (8134): n equals a,t,g, or c
  SITE (8135): n equals a,t,g, or c
  SITE (8136): n equals a,t,g, or c
  SITE (8137): n equals a,t,g, or c
  SITE (8138): n equals a,t,g, or c
  SITE (8139): n equals a,t,g, or c
  SITE (8140): n equals a,t,g, or c
  SITE (8141): n equals a,t,g, or c
  SITE (8142): n equals a,t,g, or c
  SITE (8143): n equals a,t,g, or c
  SITE (8144): n equals a,t,g, or c
  SITE (8145): n equals a,t,g, or c
  SITE (8146): n equals a,t,g, or c
  SITE (8147): n equals a,t,g, or c
  SITE (8148): n equals a,t,g, or c
  SITE (8149): n equals a,t,g, or c
  SITE (8150): n equals a,t,g, or c
  SITE (8151): n equals a,t,g, or c
  SITE (8152): n equals a,t,g, or c
  SITE (8153): n equals a,t,g, or c
  SITE (8154): n equals a,t,g, or c
  SITE (8155): n equals a,t,g, or c
  SITE (8156): n equals a,t,g, or c
  SITE (8157): n equals a,t,g, or c
  SITE (8158): n equals a,t,g, or c
  SITE (8159): n equals a,t,g, or c
  SITE (8160): n equals a,t,g, or c
  SITE (8161): n equals a,t,g, or c
  SITE (8162): n equals a,t,g, or c
  SITE (8163): n equals a,t,g, or c
  SITE (8164): n equals a,t,g, or c
  SITE (8165): n equals a,t,g, or c
  SITE (8166): n equals a,t,g, or c
  SITE (8167): n equals a,t,g, or c
  SITE (8168): n equals a,t,g, or c
  SITE (8169): n equals a,t,g, or c
  SITE (8170): n equals a,t,g, or c
  SITE (8171): n equals a,t,g, or c
  SITE (8172): n equals a,t,g, or c
  SITE (8173): n equals a,t,g, or c
  SITE (8174): n equals a,t,g, or c
  SITE (8175): n equals a,t,g, or c
  SITE (8176): n equals a,t,g, or c
  SITE (8177): n equals a,t,g, or c
  SITE (8178): n equals a,t,g, or c
  SITE (8179): n equals a,t,g, or c
  SITE (8180): n equals a,t,g, or c
  SITE (8181): n equals a,t,g, or c
  SITE (8182): n equals a,t,g, or c
  SITE (8183): n equals a,t,g, or c
  SITE (8184): n equals a,t,g, or c
  SITE (8185): n equals a,t,g, or c
  SITE (8186): n equals a,t,g, or c
  SITE (8187): n equals a,t,g, or c
  SITE (8188): n equals a,t,g, or c
  SITE (8189): n equals a,t,g, or c
  SITE (8190): n equals a,t,g, or c
  SITE (8191): n equals a,t,g, or c
  SITE (8192): n equals a,t,g, or c
  SITE (8193): n equals a,t,g, or c
  SITE (8194): n equals a,t,g, or c
  SITE (8195): n equals a,t,g, or c
  SITE (8196): n equals a,t,g, or c
  SITE (8197): n equals a,t,g, or c
  SITE (8198): n equals a,t,g, or c
  SITE (8199): n equals a,t,g, or c
  SITE (8200): n equals a,t,g, or c
  SITE (8201): n equals a,t,g, or c
  SITE (8202): n equals a,t,g, or c
  SITE (8203): n equals a,t,g, or c
  SITE (8204): n equals a,t,g, or c
  SITE (8205): n equals a,t,g, or c
  SITE (8206): n equals a,t,g, or c
  SITE (8207): n equals a,t,g, or c
  SITE (8208): n equals a,t,g, or c
  SITE (8209): n equals a,t,g, or c
  SITE (8210): n equals a,t,g, or c
  SITE (8211): n equals a,t,g, or c
  SITE (8212): n equals a,t,g, or c
  SITE (8213): n equals a,t,g, or c
  SITE (8214): n equals a,t,g, or c
  SITE (8215): n equals a,t,g, or c
  SITE (8216): n equals a,t,g, or c
  SITE (8217): n equals a,t,g, or c
  SITE (8218): n equals a,t,g, or c
  SITE (8219): n equals a,t,g, or c
  SITE (8220): n equals a,t,g, or c
  SITE (8221): n equals a,t,g, or c
  SITE (8222): n equals a,t,g, or c
  SITE (8223): n equals a,t,g, or c
  SITE (8224): n equals a,t,g, or c
  SITE (8225): n equals a,t,g, or c
  SITE (8226): n equals a,t,g, or c
  SITE (8227): n equals a,t,g, or c
  SITE (8228): n equals a,t,g, or c
  SITE (8229): n equals a,t,g, or c
  SITE (8230): n equals a,t,g, or c
  SITE (8231): n equals a,t,g, or c
  SITE (8232): n equals a,t,g, or c
  SITE (8233): n equals a,t,g, or c
  SITE (8234): n equals a,t,g, or c
  SITE (8235): n equals a,t,g, or c
  SITE (8236): n equals a,t,g, or c
  SITE (8237): n equals a,t,g, or c
  SITE (8238): n equals a,t,g, or c
  SITE (8239): n equals a,t,g, or c
  SITE (8240): n equals a,t,g, or c
  SITE (8241): n equals a,t,g, or c
  SITE (8242): n equals a,t,g, or c
  SITE (8243): n equals a,t,g, or c
  SITE (8244): n equals a,t,g, or c
  SITE (8245): n equals a,t,g, or c
  SITE (8246): n equals a,t,g, or c
  SITE (8247): n equals a,t,g, or c
  SITE (8248): n equals a,t,g, or c
  SITE (8249): n equals a,t,g, or c
  SITE (8250): n equals a,t,g, or c
  SITE (8251): n equals a,t,g, or c
  SITE (8252): n equals a,t,g, or c
  SITE (8253): n equals a,t,g, or c
  SITE (8254): n equals a,t,g, or c
  SITE (8255): n equals a,t,g, or c
  SITE (8256): n equals a,t,g, or c
  SITE (8257): n equals a,t,g, or c
  SITE (8258): n equals a,t,g, or c
  SITE (8259): n equals a,t,g, or c
  SITE (8260): n equals a,t,g, or c
  SITE (8261): n equals a,t,g, or c
  SITE (8262): n equals a,t,g, or c
  SITE (8263): n equals a,t,g, or c
  SITE (8264): n equals a,t,g, or c
  SITE (8265): n equals a,t,g, or c
  SITE (8266): n equals a,t,g, or c
  SITE (8267): n equals a,t,g, or c
  SITE (8268): n equals a,t,g, or c
  SITE (8269): n equals a,t,g, or c
  SITE (8270): n equals a,t,g, or c
  SITE (8271): n equals a,t,g, or c
  SITE (8272): n equals a,t,g, or c
  SITE (8273): n equals a,t,g, or c
  SITE (8274): n equals a,t,g, or c
  SITE (8275): n equals a,t,g, or c
  SITE (8276): n equals a,t,g, or c
  SITE (8277): n equals a,t,g, or c
  SITE (8278): n equals a,t,g, or c
  SITE (8279): n equals a,t,g, or c
  SITE (8280): n equals a,t,g, or c
  SITE (8281): n equals a,t,g, or c
  SITE (8282): n equals a,t,g, or c
  SITE (8283): n equals a,t,g, or c
  SITE (8284): n equals a,t,g, or c
  SITE (8285): n equals a,t,g, or c
  SITE (8286): n equals a,t,g, or c
  SITE (8287): n equals a,t,g, or c
  SITE (8288): n equals a,t,g, or c
  SITE (8289): n equals a,t,g, or c
  SITE (8290): n equals a,t,g, or c
  SITE (8291): n equals a,t,g, or c
  SITE (8292): n equals a,t,g, or c
  SITE (8293): n equals a,t,g, or c
  SITE (8294): n equals a,t,g, or c
  SITE (8295): n equals a,t,g, or c
  SITE (8296): n equals a,t,g, or c
  SITE (8297): n equals a,t,g, or c
  SITE (8298): n equals a,t,g, or c
  SITE (8299): n equals a,t,g, or c
  SITE (8300): n equals a,t,g, or c
  SITE (8301): n equals a,t,g, or c
  SITE (8302): n equals a,t,g, or c
  SITE (8303): n equals a,t,g, or c
  SITE (8304): n equals a,t,g, or c
  SITE (8305): n equals a,t,g, or c
  SITE (8306): n equals a,t,g, or c
  SITE (8307): n equals a,t,g, or c
  SITE (8308): n equals a,t,g, or c
  SITE (8309): n equals a,t,g, or c
  SITE (8310): n equals a,t,g, or c
  SITE (8311): n equals a,t,g, or c
  SITE (8312): n equals a,t,g, or c
  SITE (8313): n equals a,t,g, or c
  SITE (8314): n equals a,t,g, or c
  SITE (8315): n equals a,t,g, or c
  SITE (8316): n equals a,t,g, or c
  SITE (8317): n equals a,t,g, or c
  SITE (8318): n equals a,t,g, or c
  SITE (8319): n equals a,t,g, or c
  SITE (8320): n equals a,t,g, or c
  SITE (8321): n equals a,t,g, or c
  SITE (8322): n equals a,t,g, or c
  SITE (8323): n equals a,t,g, or c
  SITE (8324): n equals a,t,g, or c
  SITE (8325): n equals a,t,g, or c
  SITE (8326): n equals a,t,g, or c
  SITE (8327): n equals a,t,g, or c
  SITE (8328): n equals a,t,g, or c
  SITE (8329): n equals a,t,g, or c
  SITE (8330): n equals a,t,g, or c
  SITE (8331): n equals a,t,g, or c
  SITE (8332): n equals a,t,g, or c
  SITE (8333): n equals a,t,g, or c
  SITE (8334): n equals a,t,g, or c
  SITE (8335): n equals a,t,g, or c
  SITE (8336): n equals a,t,g, or c
  SITE (8337): n equals a,t,g, or c
  SITE (8338): n equals a,t,g, or c
  SITE (8339): n equals a,t,g, or c
  SITE (8340): n equals a,t,g, or c
  SITE (8341): n equals a,t,g, or c
  SITE (8342): n equals a,t,g, or c
  SITE (8343): n equals a,t,g, or c
  SITE (8344): n equals a,t,g, or c
  SITE (8345): n equals a,t,g, or c
  SITE (8346): n equals a,t,g, or c
  SITE (8347): n equals a,t,g, or c
  SITE (8348): n equals a,t,g, or c
  SITE (8349): n equals a,t,g, or c
  SITE (8350): n equals a,t,g, or c
  SITE (8351): n equals a,t,g, or c
  SITE (8352): n equals a,t,g, or c
  SITE (8353): n equals a,t,g, or c
  SITE (8354): n equals a,t,g, or c
  SITE (8355): n equals a,t,g, or c
  SITE (8356): n equals a,t,g, or c
  SITE (8357): n equals a,t,g, or c
  SITE (8358): n equals a,t,g, or c
  SITE (8359): n equals a,t,g, or c
  SITE (8360): n equals a,t,g, or c
  SITE (8361): n equals a,t,g, or c
  SITE (8362): n equals a,t,g, or c
  SITE (8363): n equals a,t,g, or c
  SITE (8364): n equals a,t,g, or c
  SITE (8365): n equals a,t,g, or c
  SITE (8366): n equals a,t,g, or c
  SITE (8367): n equals a,t,g, or c
  SITE (8368): n equals a,t,g, or c
  SITE (8369): n equals a,t,g, or c
  SITE (8370): n equals a,t,g, or c
  SITE (8371): n equals a,t,g, or c
  SITE (8372): n equals a,t,g, or c
  SITE (8373): n equals a,t,g, or c
  SITE (8374): n equals a,t,g, or c
  SITE (8375): n equals a,t,g, or c
  SITE (8376): n equals a,t,g, or c
  SITE (8377): n equals a,t,g, or c
  SITE (8378): n equals a,t,g, or c
  SITE (8379): n equals a,t,g, or c
  SITE (8380): n equals a,t,g, or c
  SITE (8381): n equals a,t,g, or c
  SITE (8382): n equals a,t,g, or c
  SITE (8383): n equals a,t,g, or c
  SITE (8384): n equals a,t,g, or c
  SITE (8385): n equals a,t,g, or c
  SITE (8386): n equals a,t,g, or c
  SITE (8387): n equals a,t,g, or c
  SITE (8388): n equals a,t,g, or c
  SITE (8389): n equals a,t,g, or c
  SITE (8390): n equals a,t,g, or c
  SITE (8391): n equals a,t,g, or c
  SITE (8392): n equals a,t,g, or c
  SITE (8393): n equals a,t,g, or c
  SITE (8394): n equals a,t,g, or c
  SITE (8395): n equals a,t,g, or c
  SITE (8396): n equals a,t,g, or c
  SITE (8397): n equals a,t,g, or c
  SITE (8398): n equals a,t,g, or c
  SITE (8399): n equals a,t,g, or c
  SITE (8400): n equals a,t,g, or c
  SITE (8401): n equals a,t,g, or c
  SITE (8402): n equals a,t,g, or c
  SITE (8403): n equals a,t,g, or c
  SITE (8404): n equals a,t,g, or c
  SITE (8405): n equals a,t,g, or c
  SITE (8406): n equals a,t,g, or c
  SITE (8407): n equals a,t,g, or c
  SITE (8408): n equals a,t,g, or c
  SITE (8409): n equals a,t,g, or c
  SITE (8410): n equals a,t,g, or c
  SITE (8411): n equals a,t,g, or c
  SITE (8412): n equals a,t,g, or c
  SITE (8413): n equals a,t,g, or c
  SITE (8414): n equals a,t,g, or c
  SITE (8415): n equals a,t,g, or c
  SITE (8416): n equals a,t,g, or c
  SITE (8417): n equals a,t,g, or c
  SITE (8418): n equals a,t,g, or c
  SITE (8419): n equals a,t,g, or c
  SITE (8420): n equals a,t,g, or c
  SITE (8421): n equals a,t,g, or c
  SITE (8422): n equals a,t,g, or c
  SITE (8423): n equals a,t,g, or c
  SITE (8424): n equals a,t,g, or c
  SITE (8425): n equals a,t,g, or c
  SITE (8426): n equals a,t,g, or c
  SITE (8427): n equals a,t,g, or c
  SITE (8428): n equals a,t,g, or c
  SITE (8429): n equals a,t,g, or c
  SITE (8430): n equals a,t,g, or c
  SITE (8431): n equals a,t,g, or c
  SITE (8432): n equals a,t,g, or c
  SITE (8433): n equals a,t,g, or c
  SITE (8434): n equals a,t,g, or c
  SITE (8435): n equals a,t,g, or c
  SITE (8436): n equals a,t,g, or c
  SITE (8437): n equals a,t,g, or c
  SITE (8438): n equals a,t,g, or c
  SITE (8439): n equals a,t,g, or c
  SITE (8440): n equals a,t,g, or c
  SITE (8441): n equals a,t,g, or c
  SITE (8442): n equals a,t,g, or c
  SITE (8443): n equals a,t,g, or c
  SITE (8444): n equals a,t,g, or c
  SITE (8445): n equals a,t,g, or c
  SITE (8446): n equals a,t,g, or c
  SITE (8447): n equals a,t,g, or c
  SITE (8448): n equals a,t,g, or c
  SITE (8449): n equals a,t,g, or c
  SITE (8450): n equals a,t,g, or c
  SITE (8451): n equals a,t,g, or c
  SITE (8452): n equals a,t,g, or c
  SITE (8453): n equals a,t,g, or c
  SITE (8454): n equals a,t,g, or c
  SITE (8455): n equals a,t,g, or c
  SITE (8456): n equals a,t,g, or c
  SITE (8457): n equals a,t,g, or c
  SITE (8458): n equals a,t,g, or c
  SITE (8459): n equals a,t,g, or c
  SITE (8460): n equals a,t,g, or c
  SITE (8461): n equals a,t,g, or c
  SITE (8462): n equals a,t,g, or c
  SITE (8463): n equals a,t,g, or c
  SITE (8464): n equals a,t,g, or c
  SITE (8465): n equals a,t,g, or c
  SITE (8466): n equals a,t,g, or c
  SITE (8467): n equals a,t,g, or c
  SITE (8468): n equals a,t,g, or c
  SITE (8469): n equals a,t,g, or c
  SITE (8470): n equals a,t,g, or c
  SITE (8471): n equals a,t,g, or c
  SITE (8472): n equals a,t,g, or c
  SITE (8473): n equals a,t,g, or c
  SITE (8474): n equals a,t,g, or c
  SITE (8475): n equals a,t,g, or c
  SITE (8476): n equals a,t,g, or c
  SITE (8477): n equals a,t,g, or c
  SITE (8478): n equals a,t,g, or c
  SITE (8479): n equals a,t,g, or c
  SITE (8480): n equals a,t,g, or c
  SITE (8481): n equals a,t,g, or c
  SITE (8482): n equals a,t,g, or c
  SITE (8483): n equals a,t,g, or c
  SITE (8484): n equals a,t,g, or c
  SITE (8485): n equals a,t,g, or c
  SITE (8486): n equals a,t,g, or c
  SITE (8487): n equals a,t,g, or c
  SITE (8488): n equals a,t,g, or c
  SITE (8489): n equals a,t,g, or c
  SITE (8490): n equals a,t,g, or c
  SITE (8491): n equals a,t,g, or c
  SITE (8492): n equals a,t,g, or c
  SITE (8493): n equals a,t,g, or c
  SITE (8494): n equals a,t,g, or c
  SITE (8495): n equals a,t,g, or c
  SITE (8496): n equals a,t,g, or c
  SITE (8497): n equals a,t,g, or c
  SITE (8498): n equals a,t,g, or c
  SITE (8499): n equals a,t,g, or c
  SITE (8500): n equals a,t,g, or c
  SITE (8501): n equals a,t,g, or c
  SITE (8502): n equals a,t,g, or c
  SITE (8503): n equals a,t,g, or c
  SITE (8504): n equals a,t,g, or c
  SITE (8505): n equals a,t,g, or c
  SITE (8506): n equals a,t,g, or c
  SITE (8507): n equals a,t,g, or c
  SITE (8508): n equals a,t,g, or c
  SITE (8509): n equals a,t,g, or c
  SITE (8510): n equals a,t,g, or c
  SITE (8511): n equals a,t,g, or c
  SITE (8512): n equals a,t,g, or c
  SITE (8513): n equals a,t,g, or c
  SITE (8514): n equals a,t,g, or c
  SITE (8515): n equals a,t,g, or c
  SITE (8516): n equals a,t,g, or c
  SITE (8517): n equals a,t,g, or c
  SITE (8518): n equals a,t,g, or c
  SITE (8519): n equals a,t,g, or c
  SITE (8520): n equals a,t,g, or c
  SITE (8521): n equals a,t,g, or c
  SITE (8522): n equals a,t,g, or c
  SITE (8523): n equals a,t,g, or c
  SITE (8524): n equals a,t,g, or c
  SITE (8525): n equals a,t,g, or c
  SITE (8526): n equals a,t,g, or c
  SITE (8527): n equals a,t,g, or c
  SITE (8528): n equals a,t,g, or c
  SITE (8529): n equals a,t,g, or c
  SITE (8530): n equals a,t,g, or c
  SITE (8531): n equals a,t,g, or c
  SITE (8532): n equals a,t,g, or c
  SITE (8533): n equals a,t,g, or c
  SITE (8534): n equals a,t,g, or c
  SITE (8535): n equals a,t,g, or c
  SITE (8536): n equals a,t,g, or c
  SITE (8537): n equals a,t,g, or c
  SITE (8538): n equals a,t,g, or c
  SITE (8539): n equals a,t,g, or c
  SITE (8540): n equals a,t,g, or c
  SITE (8541): n equals a,t,g, or c
  SITE (8542): n equals a,t,g, or c
  SITE (8543): n equals a,t,g, or c
  SITE (8544): n equals a,t,g, or c
  SITE (8545): n equals a,t,g, or c
  SITE (8546): n equals a,t,g, or c
  SITE (8547): n equals a,t,g, or c
  SITE (8548): n equals a,t,g, or c
  SITE (8549): n equals a,t,g, or c
  SITE (8550): n equals a,t,g, or c
  SITE (8551): n equals a,t,g, or c
  SITE (8552): n equals a,t,g, or c
  SITE (8553): n equals a,t,g, or c
  SITE (8554): n equals a,t,g, or c
  SITE (8555): n equals a,t,g, or c
  SITE (8556): n equals a,t,g, or c
  SITE (8557): n equals a,t,g, or c
  SITE (8558): n equals a,t,g, or c
  SITE (8559): n equals a,t,g, or c
  SITE (8560): n equals a,t,g, or c
  SITE (8561): n equals a,t,g, or c
  SITE (8562): n equals a,t,g, or c
  SITE (8563): n equals a,t,g, or c
  SITE (8564): n equals a,t,g, or c
  SITE (8565): n equals a,t,g, or c
  SITE (8566): n equals a,t,g, or c
  SITE (8567): n equals a,t,g, or c
  SITE (8568): n equals a,t,g, or c
  SITE (8569): n equals a,t,g, or c
  SITE (8570): n equals a,t,g, or c
  SITE (8571): n equals a,t,g, or c
  SITE (8572): n equals a,t,g, or c
  SITE (8573): n equals a,t,g, or c
  SITE (8574): n equals a,t,g, or c
  SITE (8575): n equals a,t,g, or c
  SITE (8576): n equals a,t,g, or c
  SITE (8577): n equals a,t,g, or c
  SITE (8578): n equals a,t,g, or c
  SITE (8579): n equals a,t,g, or c
  SITE (8580): n equals a,t,g, or c
  SITE (8581): n equals a,t,g, or c
  SITE (8582): n equals a,t,g, or c
  SITE (8583): n equals a,t,g, or c
  SITE (8584): n equals a,t,g, or c
  SITE (8585): n equals a,t,g, or c
  SITE (8586): n equals a,t,g, or c
  SITE (8587): n equals a,t,g, or c
  SITE (8588): n equals a,t,g, or c
  SITE (8589): n equals a,t,g, or c
  SITE (8590): n equals a,t,g, or c
  SITE (8591): n equals a,t,g, or c
  SITE (8592): n equals a,t,g, or c
  SITE (8593): n equals a,t,g, or c
  SITE (8594): n equals a,t,g, or c
  SITE (8595): n equals a,t,g, or c
  SITE (8596): n equals a,t,g, or c
  SITE (8597): n equals a,t,g, or c
  SITE (8598): n equals a,t,g, or c
  SITE (8599): n equals a,t,g, or c
  SITE (8600): n equals a,t,g, or c
  SITE (8601): n equals a,t,g, or c
  SITE (8602): n equals a,t,g, or c
  SITE (8603): n equals a,t,g, or c
  SITE (8604): n equals a,t,g, or c
  SITE (8605): n equals a,t,g, or c
  SITE (8606): n equals a,t,g, or c
  SITE (8607): n equals a,t,g, or c
  SITE (8608): n equals a,t,g, or c
  SITE (8609): n equals a,t,g, or c
  SITE (8610): n equals a,t,g, or c
  SITE (8611): n equals a,t,g, or c
  SITE (8612): n equals a,t,g, or c
  SITE (8613): n equals a,t,g, or c
  SITE (8614): n equals a,t,g, or c
  SITE (8615): n equals a,t,g, or c
  SITE (8616): n equals a,t,g, or c
  SITE (8617): n equals a,t,g, or c
  SITE (8618): n equals a,t,g, or c
  SITE (8619): n equals a,t,g, or c
  SITE (8620): n equals a,t,g, or c
  SITE (8621): n equals a,t,g, or c
  SITE (8622): n equals a,t,g, or c
  SITE (8623): n equals a,t,g, or c
  SITE (8624): n equals a,t,g, or c
  SITE (8625): n equals a,t,g, or c
  SITE (8626): n equals a,t,g, or c
  SITE (8627): n equals a,t,g, or c
  SITE (8628): n equals a,t,g, or c
  SITE (8629): n equals a,t,g, or c
  SITE (8630): n equals a,t,g, or c
  SITE (8631): n equals a,t,g, or c
  SITE (8632): n equals a,t,g, or c
  SITE (8633): n equals a,t,g, or c
  SITE (8634): n equals a,t,g, or c
  SITE (8635): n equals a,t,g, or c
  SITE (8636): n equals a,t,g, or c
  SITE (8637): n equals a,t,g, or c
  SITE (8638): n equals a,t,g, or c
  SITE (8639): n equals a,t,g, or c
  SITE (8640): n equals a,t,g, or c
  SITE (8641): n equals a,t,g, or c
  SITE (8642): n equals a,t,g, or c
  SITE (8643): n equals a,t,g, or c
  SITE (8644): n equals a,t,g, or c
  SITE (8645): n equals a,t,g, or c
  SITE (8646): n equals a,t,g, or c
  SITE (8647): n equals a,t,g, or c
  SITE (8648): n equals a,t,g, or c
  SITE (8649): n equals a,t,g, or c
  SITE (8650): n equals a,t,g, or c
  SITE (8651): n equals a,t,g, or c
  SITE (8652): n equals a,t,g, or c
  SITE (8653): n equals a,t,g, or c
  SITE (8654): n equals a,t,g, or c
  SITE (8655): n equals a,t,g, or c
  SITE (8656): n equals a,t,g, or c
  SITE (8657): n equals a,t,g, or c
  SITE (8658): n equals a,t,g, or c
  SITE (8659): n equals a,t,g, or c
  SITE (8660): n equals a,t,g, or c
  SITE (8661): n equals a,t,g, or c
  SITE (8662): n equals a,t,g, or c
  SITE (8663): n equals a,t,g, or c
  SITE (8664): n equals a,t,g, or c
  SITE (8665): n equals a,t,g, or c
  SITE (8666): n equals a,t,g, or c
  SITE (8667): n equals a,t,g, or c
  SITE (8668): n equals a,t,g, or c
  SITE (8669): n equals a,t,g, or c
  SITE (8670): n equals a,t,g, or c
  SITE (8671): n equals a,t,g, or c
  SITE (8672): n equals a,t,g, or c
  SITE (8673): n equals a,t,g, or c
  SITE (8674): n equals a,t,g, or c
  SITE (8675): n equals a,t,g, or c
  SITE (8676): n equals a,t,g, or c
  SITE (8677): n equals a,t,g, or c
  SITE (8678): n equals a,t,g, or c
  SITE (8679): n equals a,t,g, or c
  SITE (8680): n equals a,t,g, or c
  SITE (8681): n equals a,t,g, or c
  SITE (8682): n equals a,t,g, or c
  SITE (8683): n equals a,t,g, or c
  SITE (8684): n equals a,t,g, or c
  SITE (8685): n equals a,t,g, or c
  SITE (8686): n equals a,t,g, or c
  SITE (8687): n equals a,t,g, or c
  SITE (8688): n equals a,t,g, or c
  SITE (8689): n equals a,t,g, or c
  SITE (8690): n equals a,t,g, or c
  SITE (8691): n equals a,t,g, or c
  SITE (8692): n equals a,t,g, or c
  SITE (8693): n equals a,t,g, or c
  SITE (8694): n equals a,t,g, or c
  SITE (8695): n equals a,t,g, or c
  SITE (8696): n equals a,t,g, or c
  SITE (8697): n equals a,t,g, or c
  SITE (8698): n equals a,t,g, or c
  SITE (8699): n equals a,t,g, or c
  SITE (8700): n equals a,t,g, or c
  SITE (8701): n equals a,t,g, or c
  SITE (8702): n equals a,t,g, or c
  SITE (8703): n equals a,t,g, or c
  SITE (8704): n equals a,t,g, or c
  SITE (8705): n equals a,t,g, or c
  SITE (8706): n equals a,t,g, or c
  SITE (8707): n equals a,t,g, or c
  SITE (8708): n equals a,t,g, or c
  SITE (8709): n equals a,t,g, or c
  SITE (8710): n equals a,t,g, or c
  SITE (8711): n equals a,t,g, or c
  SITE (8712): n equals a,t,g, or c
  SITE (8713): n equals a,t,g, or c
  SITE (8714): n equals a,t,g, or c
  SITE (8715): n equals a,t,g, or c
  SITE (8716): n equals a,t,g, or c
  SITE (8717): n equals a,t,g, or c
  SITE (8718): n equals a,t,g, or c
  SITE (8719): n equals a,t,g, or c
  SITE (8720): n equals a,t,g, or c
  SITE (8721): n equals a,t,g, or c
  SITE (8722): n equals a,t,g, or c
  SITE (8723): n equals a,t,g, or c
  SITE (8724): n equals a,t,g, or c
  SITE (8725): n equals a,t,g, or c
  SITE (8726): n equals a,t,g, or c
  SITE (8727): n equals a,t,g, or c
  SITE (8728): n equals a,t,g, or c
  SITE (8729): n equals a,t,g, or c
  SITE (8730): n equals a,t,g, or c
  SITE (8731): n equals a,t,g, or c
  SITE (8732): n equals a,t,g, or c
  SITE (8733): n equals a,t,g, or c
  SITE (8734): n equals a,t,g, or c
  SITE (8735): n equals a,t,g, or c
  SITE (8736): n equals a,t,g, or c
  SITE (8737): n equals a,t,g, or c
  SITE (8738): n equals a,t,g, or c
  SITE (8739): n equals a,t,g, or c
  SITE (8740): n equals a,t,g, or c
  SITE (8741): n equals a,t,g, or c
  SITE (8742): n equals a,t,g, or c
  SITE (8743): n equals a,t,g, or c
  SITE (8744): n equals a,t,g, or c
  SITE (8745): n equals a,t,g, or c
  SITE (8746): n equals a,t,g, or c
  SITE (8747): n equals a,t,g, or c
  SITE (8748): n equals a,t,g, or c
  SITE (8749): n equals a,t,g, or c
  SITE (8750): n equals a,t,g, or c
  SITE (8751): n equals a,t,g, or c
  SITE (8752): n equals a,t,g, or c
  SITE (8753): n equals a,t,g, or c
  SITE (8754): n equals a,t,g, or c
  SITE (8755): n equals a,t,g, or c
  SITE (8756): n equals a,t,g, or c
  SITE (8757): n equals a,t,g, or c
  SITE (8758): n equals a,t,g, or c
  SITE (8759): n equals a,t,g, or c
  SITE (8760): n equals a,t,g, or c
  SITE (8761): n equals a,t,g, or c
  SITE (8762): n equals a,t,g, or c
  SITE (8763): n equals a,t,g, or c
  SITE (8764): n equals a,t,g, or c
  SITE (8765): n equals a,t,g, or c
  SITE (8766): n equals a,t,g, or c
  SITE (8767): n equals a,t,g, or c
  SITE (8768): n equals a,t,g, or c
  SITE (8769): n equals a,t,g, or c
  SITE (8770): n equals a,t,g, or c
  SITE (8771): n equals a,t,g, or c
  SITE (8772): n equals a,t,g, or c
  SITE (8773): n equals a,t,g, or c
  SITE (8774): n equals a,t,g, or c
  SITE (8775): n equals a,t,g, or c
  SITE (8776): n equals a,t,g, or c
  SITE (8777): n equals a,t,g, or c
  SITE (8778): n equals a,t,g, or c
  SITE (8779): n equals a,t,g, or c
  SITE (8780): n equals a,t,g, or c
  SITE (8781): n equals a,t,g, or c
  SITE (8782): n equals a,t,g, or c
  SITE (8783): n equals a,t,g, or c
  SITE (8784): n equals a,t,g, or c
  SITE (8785): n equals a,t,g, or c
  SITE (8786): n equals a,t,g, or c
  SITE (8787): n equals a,t,g, or c
  SITE (8788): n equals a,t,g, or c
  SITE (8789): n equals a,t,g, or c
  SITE (8790): n equals a,t,g, or c
  SITE (8791): n equals a,t,g, or c
  SITE (8792): n equals a,t,g, or c
  SITE (8793): n equals a,t,g, or c
  SITE (8794): n equals a,t,g, or c
  SITE (8795): n equals a,t,g, or c
  SITE (8796): n equals a,t,g, or c
  SITE (8797): n equals a,t,g, or c
  SITE (8798): n equals a,t,g, or c
  SITE (8799): n equals a,t,g, or c
  SITE (8800): n equals a,t,g, or c
  SITE (8801): n equals a,t,g, or c
  SITE (8802): n equals a,t,g, or c
  SITE (8803): n equals a,t,g, or c
  SITE (8804): n equals a,t,g, or c
  SITE (8805): n equals a,t,g, or c
  SITE (8806): n equals a,t,g, or c
  SITE (8807): n equals a,t,g, or c
  SITE (8808): n equals a,t,g, or c
  SITE (8809): n equals a,t,g, or c
  SITE (8810): n equals a,t,g, or c
  SITE (8811): n equals a,t,g, or c
  SITE (8812): n equals a,t,g, or c
  SITE (8813): n equals a,t,g, or c
  SITE (8814): n equals a,t,g, or c
  SITE (8815): n equals a,t,g, or c
  SITE (8816): n equals a,t,g, or c
  SITE (8817): n equals a,t,g, or c
  SITE (8818): n equals a,t,g, or c
  SITE (8819): n equals a,t,g, or c
  SITE (8820): n equals a,t,g, or c
  SITE (8821): n equals a,t,g, or c
  SITE (8822): n equals a,t,g, or c
  SITE (8823): n equals a,t,g, or c
  SITE (8824): n equals a,t,g, or c
  SITE (8825): n equals a,t,g, or c
  SITE (8826): n equals a,t,g, or c
  SITE (8827): n equals a,t,g, or c
  SITE (8828): n equals a,t,g, or c
  SITE (8829): n equals a,t,g, or c
  SITE (8830): n equals a,t,g, or c
  SITE (8831): n equals a,t,g, or c
  SITE (8832): n equals a,t,g, or c
  SITE (8833): n equals a,t,g, or c
  SITE (8834): n equals a,t,g, or c
  SITE (8835): n equals a,t,g, or c
  SITE (8836): n equals a,t,g, or c
  SITE (8837): n equals a,t,g, or c
  SITE (8838): n equals a,t,g, or c
  SITE (8839): n equals a,t,g, or c
  SITE (8840): n equals a,t,g, or c
  SITE (8841): n equals a,t,g, or c
  SITE (8842): n equals a,t,g, or c
  SITE (8843): n equals a,t,g, or c
  SITE (8844): n equals a,t,g, or c
  SITE (8845): n equals a,t,g, or c
  SITE (8846): n equals a,t,g, or c
  SITE (8847): n equals a,t,g, or c
  SITE (8848): n equals a,t,g, or c
  SITE (8849): n equals a,t,g, or c
  SITE (8850): n equals a,t,g, or c
  SITE (8851): n equals a,t,g, or c
  SITE (8852): n equals a,t,g, or c
  SITE (8853): n equals a,t,g, or c
  SITE (8854): n equals a,t,g, or c
  SITE (8855): n equals a,t,g, or c
  SITE (8856): n equals a,t,g, or c
  SITE (8857): n equals a,t,g, or c
  SITE (8858): n equals a,t,g, or c
  SITE (8859): n equals a,t,g, or c
  SITE (8860): n equals a,t,g, or c
  SITE (8861): n equals a,t,g, or c
  SITE (8862): n equals a,t,g, or c
  SITE (8863): n equals a,t,g, or c
  SITE (8864): n equals a,t,g, or c
  SITE (8865): n equals a,t,g, or c
  SITE (8866): n equals a,t,g, or c
  SITE (8867): n equals a,t,g, or c
  SITE (8868): n equals a,t,g, or c
  SITE (8869): n equals a,t,g, or c
  SITE (8870): n equals a,t,g, or c
  SITE (8871): n equals a,t,g, or c
  SITE (8872): n equals a,t,g, or c
  SITE (8873): n equals a,t,g, or c
  SITE (8874): n equals a,t,g, or c
  SITE (8875): n equals a,t,g, or c
  SITE (8876): n equals a,t,g, or c
  SITE (8877): n equals a,t,g, or c
  SITE (8878): n equals a,t,g, or c
  SITE (8879): n equals a,t,g, or c
  SITE (8880): n equals a,t,g, or c
  SITE (8881): n equals a,t,g, or c
  SITE (8882): n equals a,t,g, or c
  SITE (8883): n equals a,t,g, or c
  SITE (8884): n equals a,t,g, or c
  SITE (8885): n equals a,t,g, or c
  SITE (8886): n equals a,t,g, or c
  SITE (8887): n equals a,t,g, or c
  SITE (8888): n equals a,t,g, or c
  SITE (8889): n equals a,t,g, or c
  SITE (8890): n equals a,t,g, or c
  SITE (8891): n equals a,t,g, or c
  SITE (8892): n equals a,t,g, or c
  SITE (8893): n equals a,t,g, or c
  SITE (8894): n equals a,t,g, or c
  SITE (8895): n equals a,t,g, or c
  SITE (8896): n equals a,t,g, or c
  SITE (8897): n equals a,t,g, or c
  SITE (8898): n equals a,t,g, or c
  SITE (8899): n equals a,t,g, or c
  SITE (8900): n equals a,t,g, or c
  SITE (8901): n equals a,t,g, or c
  SITE (8902): n equals a,t,g, or c
  SITE (8903): n equals a,t,g, or c
  SITE (8904): n equals a,t,g, or c
  SITE (8905): n equals a,t,g, or c
  SITE (8906): n equals a,t,g, or c
  SITE (8907): n equals a,t,g, or c
  SITE (8908): n equals a,t,g, or c
  SITE (8909): n equals a,t,g, or c
  SITE (8910): n equals a,t,g, or c
  SITE (8911): n equals a,t,g, or c
  SITE (8912): n equals a,t,g, or c
  SITE (8913): n equals a,t,g, or c
  SITE (8914): n equals a,t,g, or c
  SITE (8915): n equals a,t,g, or c
  SITE (8916): n equals a,t,g, or c
  SITE (8917): n equals a,t,g, or c
  SITE (8918): n equals a,t,g, or c
  SITE (8919): n equals a,t,g, or c
  SITE (8920): n equals a,t,g, or c
  SITE (8921): n equals a,t,g, or c
  SITE (8922): n equals a,t,g, or c
  SITE (8923): n equals a,t,g, or c
  SITE (8924): n equals a,t,g, or c
  SITE (8925): n equals a,t,g, or c
  SITE (8926): n equals a,t,g, or c
  SITE (8927): n equals a,t,g, or c
  SITE (8928): n equals a,t,g, or c
  SITE (8929): n equals a,t,g, or c
  SITE (8930): n equals a,t,g, or c
  SITE (8931): n equals a,t,g, or c
  SITE (8932): n equals a,t,g, or c
  SITE (8933): n equals a,t,g, or c
  SITE (8934): n equals a,t,g, or c
  SITE (8935): n equals a,t,g, or c
  SITE (8936): n equals a,t,g, or c
  SITE (8937): n equals a,t,g, or c
  SITE (8938): n equals a,t,g, or c
  SITE (8939): n equals a,t,g, or c
  SITE (8940): n equals a,t,g, or c
  SITE (8941): n equals a,t,g, or c
  SITE (8942): n equals a,t,g, or c
  SITE (8943): n equals a,t,g, or c
  SITE (8944): n equals a,t,g, or c
  SITE (8945): n equals a,t,g, or c
  SITE (8946): n equals a,t,g, or c
  SITE (8947): n equals a,t,g, or c
  SITE (8948): n equals a,t,g, or c
  SITE (8949): n equals a,t,g, or c
  SITE (8950): n equals a,t,g, or c
  SITE (8951): n equals a,t,g, or c
  SITE (8952): n equals a,t,g, or c
  SITE (8953): n equals a,t,g, or c
  SITE (8954): n equals a,t,g, or c
  SITE (8955): n equals a,t,g, or c
  SITE (8956): n equals a,t,g, or c
  SITE (8957): n equals a,t,g, or c
  SITE (8958): n equals a,t,g, or c
  SITE (8959): n equals a,t,g, or c
  SITE (8960): n equals a,t,g, or c
  SITE (8961): n equals a,t,g, or c
  SITE (8962): n equals a,t,g, or c
  SITE (8963): n equals a,t,g, or c
  SITE (8964): n equals a,t,g, or c
  SITE (8965): n equals a,t,g, or c
  SITE (8966): n equals a,t,g, or c
  SITE (8967): n equals a,t,g, or c
  SITE (8968): n equals a,t,g, or c
  SITE (8969): n equals a,t,g, or c
  SITE (8970): n equals a,t,g, or c
  SITE (8971): n equals a,t,g, or c
  SITE (8972): n equals a,t,g, or c
  SITE (8973): n equals a,t,g, or c
  SITE (8974): n equals a,t,g, or c
  SITE (8975): n equals a,t,g, or c
  SITE (8976): n equals a,t,g, or c
  SITE (8977): n equals a,t,g, or c
  SITE (8978): n equals a,t,g, or c
  SITE (8979): n equals a,t,g, or c
  SITE (8980): n equals a,t,g, or c
  SITE (8981): n equals a,t,g, or c
  SITE (8982): n equals a,t,g, or c
  SITE (8983): n equals a,t,g, or c
  SITE (8984): n equals a,t,g, or c
  SITE (8985): n equals a,t,g, or c
  SITE (8986): n equals a,t,g, or c
  SITE (8987): n equals a,t,g, or c
  SITE (8988): n equals a,t,g, or c
  SITE (8989): n equals a,t,g, or c
  SITE (8990): n equals a,t,g, or c
  SITE (8991): n equals a,t,g, or c
  SITE (8992): n equals a,t,g, or c
  SITE (8993): n equals a,t,g, or c
  SITE (8994): n equals a,t,g, or c
  SITE (8995): n equals a,t,g, or c
  SITE (8996): n equals a,t,g, or c
  SITE (8997): n equals a,t,g, or c
  SITE (8998): n equals a,t,g, or c
  SITE (8999): n equals a,t,g, or c
  SITE (9000): n equals a,t,g, or c
  SITE (9001): n equals a,t,g, or c
  SITE (9002): n equals a,t,g, or c
  SITE (9003): n equals a,t,g, or c
  SITE (9004): n equals a,t,g, or c
  SITE (9005): n equals a,t,g, or c
  SITE (9006): n equals a,t,g, or c
  SITE (9007): n equals a,t,g, or c
  SITE (9008): n equals a,t,g, or c
  SITE (9009): n equals a,t,g, or c
  SITE (9010): n equals a,t,g, or c
  SITE (9011): n equals a,t,g, or c
  SITE (9012): n equals a,t,g, or c
  SITE (9013): n equals a,t,g, or c
  SITE (9014): n equals a,t,g, or c
  SITE (9015): n equals a,t,g, or c
  SITE (9016): n equals a,t,g, or c
  SITE (9017): n equals a,t,g, or c
  SITE (9018): n equals a,t,g, or c
  SITE (9019): n equals a,t,g, or c
  SITE (9020): n equals a,t,g, or c
  SITE (9021): n equals a,t,g, or c
  SITE (9022): n equals a,t,g, or c
  SITE (9023): n equals a,t,g, or c
  SITE (9024): n equals a,t,g, or c
  SITE (9025): n equals a,t,g, or c
  SITE (9026): n equals a,t,g, or c
  SITE (9027): n equals a,t,g, or c
  SITE (9028): n equals a,t,g, or c
  SITE (9029): n equals a,t,g, or c
  SITE (9030): n equals a,t,g, or c
  SITE (9031): n equals a,t,g, or c
  SITE (9032): n equals a,t,g, or c
  SITE (9033): n equals a,t,g, or c
  SITE (9034): n equals a,t,g, or c
  SITE (9035): n equals a,t,g, or c
  SITE (9036): n equals a,t,g, or c
  SITE (9037): n equals a,t,g, or c
  SITE (9038): n equals a,t,g, or c
  SITE (9039): n equals a,t,g, or c
  SITE (9040): n equals a,t,g, or c
  SITE (9041): n equals a,t,g, or c
  SITE (9042): n equals a,t,g, or c
  SITE (9043): n equals a,t,g, or c
  SITE (9044): n equals a,t,g, or c
  SITE (9045): n equals a,t,g, or c
  SITE (9046): n equals a,t,g, or c
  SITE (9047): n equals a,t,g, or c
  SITE (9048): n equals a,t,g, or c
  SITE (9049): n equals a,t,g, or c
  SITE (9050): n equals a,t,g, or c
  SITE (9051): n equals a,t,g, or c
  SITE (9052): n equals a,t,g, or c
  SITE (9053): n equals a,t,g, or c
  SITE (9054): n equals a,t,g, or c
  SITE (9055): n equals a,t,g, or c
  SITE (9056): n equals a,t,g, or c
  SITE (9057): n equals a,t,g, or c
  SITE (9058): n equals a,t,g, or c
  SITE (9059): n equals a,t,g, or c
  SITE (9060): n equals a,t,g, or c
  SITE (9061): n equals a,t,g, or c
  SITE (9062): n equals a,t,g, or c
  SITE (9063): n equals a,t,g, or c
  SITE (9064): n equals a,t,g, or c
  SITE (9065): n equals a,t,g, or c
  SITE (9066): n equals a,t,g, or c
  SITE (9067): n equals a,t,g, or c
  SITE (9068): n equals a,t,g, or c
  SITE (9069): n equals a,t,g, or c
  SITE (9070): n equals a,t,g, or c
  SITE (9071): n equals a,t,g, or c
  SITE (9072): n equals a,t,g, or c
  SITE (9073): n equals a,t,g, or c
  SITE (9074): n equals a,t,g, or c
  SITE (9075): n equals a,t,g, or c
  SITE (9076): n equals a,t,g, or c
  SITE (9077): n equals a,t,g, or c
  SITE (9078): n equals a,t,g, or c
  SITE (9079): n equals a,t,g, or c
  SITE (9080): n equals a,t,g, or c
  SITE (9081): n equals a,t,g, or c
  SITE (9082): n equals a,t,g, or c
  SITE (9083): n equals a,t,g, or c
  SITE (9084): n equals a,t,g, or c
  SITE (9085): n equals a,t,g, or c
  SITE (9086): n equals a,t,g, or c
  SITE (9087): n equals a,t,g, or c
  SITE (9088): n equals a,t,g, or c
  SITE (9089): n equals a,t,g, or c
  SITE (9090): n equals a,t,g, or c
  SITE (9091): n equals a,t,g, or c
  SITE (9092): n equals a,t,g, or c
  SITE (9093): n equals a,t,g, or c
  SITE (9094): n equals a,t,g, or c
  SITE (9095): n equals a,t,g, or c
  SITE (9096): n equals a,t,g, or c
  SITE (9097): n equals a,t,g, or c
  SITE (9098): n equals a,t,g, or c
  SITE (9099): n equals a,t,g, or c
  SITE (9100): n equals a,t,g, or c
  SITE (9101): n equals a,t,g, or c
  SITE (9102): n equals a,t,g, or c
  SITE (9103): n equals a,t,g, or c
  SITE (9104): n equals a,t,g, or c
  SITE (9105): n equals a,t,g, or c
  SITE (9106): n equals a,t,g, or c
  SITE (9107): n equals a,t,g, or c
  SITE (9108): n equals a,t,g, or c
  SITE (9109): n equals a,t,g, or c
  SITE (9110): n equals a,t,g, or c
  SITE (9111): n equals a,t,g, or c
  SITE (9112): n equals a,t,g, or c
  SITE (9113): n equals a,t,g, or c
  SITE (9114): n equals a,t,g, or c
  SITE (9115): n equals a,t,g, or c
  SITE (9116): n equals a,t,g, or c
  SITE (9117): n equals a,t,g, or c
  SITE (9118): n equals a,t,g, or c
  SITE (9119): n equals a,t,g, or c
  SITE (9120): n equals a,t,g, or c
  SITE (9121): n equals a,t,g, or c
  SITE (9122): n equals a,t,g, or c
  SITE (9123): n equals a,t,g, or c
  SITE (9124): n equals a,t,g, or c
  SITE (9125): n equals a,t,g, or c
  SITE (9126): n equals a,t,g, or c
  SITE (9127): n equals a,t,g, or c
  SITE (9128): n equals a,t,g, or c
  SITE (9129): n equals a,t,g, or c
  SITE (9130): n equals a,t,g, or c
  SITE (9131): n equals a,t,g, or c
  SITE (9132): n equals a,t,g, or c
  SITE (9133): n equals a,t,g, or c
  SITE (9134): n equals a,t,g, or c
  SITE (9135): n equals a,t,g, or c
  SITE (9136): n equals a,t,g, or c
  SITE (9137): n equals a,t,g, or c
  SITE (9138): n equals a,t,g, or c
  SITE (9139): n equals a,t,g, or c
  SITE (9140): n equals a,t,g, or c
  SITE (9141): n equals a,t,g, or c
  SITE (9142): n equals a,t,g, or c
  SITE (9143): n equals a,t,g, or c
  SITE (9144): n equals a,t,g, or c
  SITE (9145): n equals a,t,g, or c
  SITE (9146): n equals a,t,g, or c
  SITE (9147): n equals a,t,g, or c
  SITE (9148): n equals a,t,g, or c
  SITE (9149): n equals a,t,g, or c
  SITE (9150): n equals a,t,g, or c
  SITE (9151): n equals a,t,g, or c
  SITE (9152): n equals a,t,g, or c
  SITE (9153): n equals a,t,g, or c
  SITE (9154): n equals a,t,g, or c
  SITE (9155): n equals a,t,g, or c
  SITE (9156): n equals a,t,g, or c
  SITE (9157): n equals a,t,g, or c
  SITE (9158): n equals a,t,g, or c
  SITE (9159): n equals a,t,g, or c
  SITE (9160): n equals a,t,g, or c
  SITE (9161): n equals a,t,g, or c
  SITE (9162): n equals a,t,g, or c
  SITE (9163): n equals a,t,g, or c
  SITE (9164): n equals a,t,g, or c
  SITE (9165): n equals a,t,g, or c
  SITE (9166): n equals a,t,g, or c
  SITE (9167): n equals a,t,g, or c
  SITE (9168): n equals a,t,g, or c
  SITE (9169): n equals a,t,g, or c
  SITE (9170): n equals a,t,g, or c
  SITE (9171): n equals a,t,g, or c
  SITE (9172): n equals a,t,g, or c
  SITE (9173): n equals a,t,g, or c
  SITE (9174): n equals a,t,g, or c
  SITE (9175): n equals a,t,g, or c
  SITE (9176): n equals a,t,g, or c
  SITE (9177): n equals a,t,g, or c
  SITE (9178): n equals a,t,g, or c
  SITE (9179): n equals a,t,g, or c
  SITE (9180): n equals a,t,g, or c
  SITE (9181): n equals a,t,g, or c
  SITE (9182): n equals a,t,g, or c
  SITE (9183): n equals a,t,g, or c
  SITE (9184): n equals a,t,g, or c
  SITE (9185): n equals a,t,g, or c
  SITE (9186): n equals a,t,g, or c
  SITE (9187): n equals a,t,g, or c
  SITE (9188): n equals a,t,g, or c
  SITE (9189): n equals a,t,g, or c
  SITE (9190): n equals a,t,g, or c
  SITE (9191): n equals a,t,g, or c
  SITE (9192): n equals a,t,g, or c
  SITE (9193): n equals a,t,g, or c
  SITE (9194): n equals a,t,g, or c
  SITE (9195): n equals a,t,g, or c
  SITE (9196): n equals a,t,g, or c
  SITE (9197): n equals a,t,g, or c
  SITE (9198): n equals a,t,g, or c
  SITE (9199): n equals a,t,g, or c
  SITE (9200): n equals a,t,g, or c
  SITE (9201): n equals a,t,g, or c
  SITE (9202): n equals a,t,g, or c
  SITE (9203): n equals a,t,g, or c
  SITE (9204): n equals a,t,g, or c
  SITE (9205): n equals a,t,g, or c
  SITE (9206): n equals a,t,g, or c
  SITE (9207): n equals a,t,g, or c
  SITE (9208): n equals a,t,g, or c
  SITE (9209): n equals a,t,g, or c
  SITE (9210): n equals a,t,g, or c
  SITE (9211): n equals a,t,g, or c
  SITE (9212): n equals a,t,g, or c
  SITE (9213): n equals a,t,g, or c
  SITE (9214): n equals a,t,g, or c
  SITE (9215): n equals a,t,g, or c
  SITE (9216): n equals a,t,g, or c
  SITE (9217): n equals a,t,g, or c
  SITE (9218): n equals a,t,g, or c
  SITE (9219): n equals a,t,g, or c
  SITE (9220): n equals a,t,g, or c
  SITE (9221): n equals a,t,g, or c
  SITE (9222): n equals a,t,g, or c
  SITE (9223): n equals a,t,g, or c
  SITE (9224): n equals a,t,g, or c
  SITE (9225): n equals a,t,g, or c
  SITE (9226): n equals a,t,g, or c
  SITE (9227): n equals a,t,g, or c
  SITE (9228): n equals a,t,g, or c
  SITE (9229): n equals a,t,g, or c
  SITE (9230): n equals a,t,g, or c
  SITE (9231): n equals a,t,g, or c
  SITE (9232): n equals a,t,g, or c
  SITE (9233): n equals a,t,g, or c
  SITE (9234): n equals a,t,g, or c
  SITE (9235): n equals a,t,g, or c
  SITE (9236): n equals a,t,g, or c
  SITE (9237): n equals a,t,g, or c
  SITE (9238): n equals a,t,g, or c
  SITE (9239): n equals a,t,g, or c
  SITE (9240): n equals a,t,g, or c
  SITE (9241): n equals a,t,g, or c
  SITE (9242): n equals a,t,g, or c
  SITE (9243): n equals a,t,g, or c
  SITE (9244): n equals a,t,g, or c
  SITE (9245): n equals a,t,g, or c
  SITE (9246): n equals a,t,g, or c
  SITE (9247): n equals a,t,g, or c
  SITE (9248): n equals a,t,g, or c
  SITE (9249): n equals a,t,g, or c
  SITE (9250): n equals a,t,g, or c
  SITE (9251): n equals a,t,g, or c
  SITE (9252): n equals a,t,g, or c
  SITE (9253): n equals a,t,g, or c
  SITE (9254): n equals a,t,g, or c
  SITE (9255): n equals a,t,g, or c
  SITE (9256): n equals a,t,g, or c
  SITE (9257): n equals a,t,g, or c
  SITE (9258): n equals a,t,g, or c
  SITE (9259): n equals a,t,g, or c
  SITE (9260): n equals a,t,g, or c
  SITE (9261): n equals a,t,g, or c
  SITE (9262): n equals a,t,g, or c
  SITE (9263): n equals a,t,g, or c
  SITE (9264): n equals a,t,g, or c
  SITE (9265): n equals a,t,g, or c
  SITE (9266): n equals a,t,g, or c
  SITE (9267): n equals a,t,g, or c
  SITE (9268): n equals a,t,g, or c
  SITE (9269): n equals a,t,g, or c
  SITE (9270): n equals a,t,g, or c
  SITE (9271): n equals a,t,g, or c
  SITE (9272): n equals a,t,g, or c
  SITE (9273): n equals a,t,g, or c
  SITE (9274): n equals a,t,g, or c
  SITE (9275): n equals a,t,g, or c
  SITE (9276): n equals a,t,g, or c
  SITE (9277): n equals a,t,g, or c
  SITE (9278): n equals a,t,g, or c
  SITE (9279): n equals a,t,g, or c
  SITE (9280): n equals a,t,g, or c
  SITE (9281): n equals a,t,g, or c
  SITE (9282): n equals a,t,g, or c
  SITE (9283): n equals a,t,g, or c
  SITE (9284): n equals a,t,g, or c
  SITE (9285): n equals a,t,g, or c
  SITE (9286): n equals a,t,g, or c
  SITE (9287): n equals a,t,g, or c
  SITE (9288): n equals a,t,g, or c
  SITE (9289): n equals a,t,g, or c
  SITE (9290): n equals a,t,g, or c
  SITE (9291): n equals a,t,g, or c
  SITE (9292): n equals a,t,g, or c
  SITE (9293): n equals a,t,g, or c
  SITE (9294): n equals a,t,g, or c
  SITE (9295): n equals a,t,g, or c
  SITE (9296): n equals a,t,g, or c
  SITE (9297): n equals a,t,g, or c
  SITE (9298): n equals a,t,g, or c
  SITE (9299): n equals a,t,g, or c
  SITE (9300): n equals a,t,g, or c
  SITE (9301): n equals a,t,g, or c
  SITE (9302): n equals a,t,g, or c
  SITE (9303): n equals a,t,g, or c
  SITE (9304): n equals a,t,g, or c
  SITE (9305): n equals a,t,g, or c
  SITE (9306): n equals a,t,g, or c
  SITE (9307): n equals a,t,g, or c
  SITE (9308): n equals a,t,g, or c
  SITE (9309): n equals a,t,g, or c
  SITE (9310): n equals a,t,g, or c
  SITE (9311): n equals a,t,g, or c
  SITE (9312): n equals a,t,g, or c
  SITE (9313): n equals a,t,g, or c
  SITE (9314): n equals a,t,g, or c
  SITE (9315): n equals a,t,g, or c
  SITE (9316): n equals a,t,g, or c
  SITE (9317): n equals a,t,g, or c
  SITE (9318): n equals a,t,g, or c
  SITE (9319): n equals a,t,g, or c
  SITE (9320): n equals a,t,g, or c
  SITE (9321): n equals a,t,g, or c
  SITE (9322): n equals a,t,g, or c
  SITE (9323): n equals a,t,g, or c
  SITE (9324): n equals a,t,g, or c
  SITE (9325): n equals a,t,g, or c
  SITE (9326): n equals a,t,g, or c
  SITE (9327): n equals a,t,g, or c
  SITE (9328): n equals a,t,g, or c
  SITE (9329): n equals a,t,g, or c
  SITE (9330): n equals a,t,g, or c
  SITE (9331): n equals a,t,g, or c
  SITE (9332): n equals a,t,g, or c
  SITE (9333): n equals a,t,g, or c
  SITE (9334): n equals a,t,g, or c
  SITE (9335): n equals a,t,g, or c
  SITE (9336): n equals a,t,g, or c
  SITE (9337): n equals a,t,g, or c
  SITE (9338): n equals a,t,g, or c
  SITE (9339): n equals a,t,g, or c
  SITE (9340): n equals a,t,g, or c
  SITE (9341): n equals a,t,g, or c
  SITE (9342): n equals a,t,g, or c
  SITE (9343): n equals a,t,g, or c
  SITE (9344): n equals a,t,g, or c
  SITE (9345): n equals a,t,g, or c
  SITE (9346): n equals a,t,g, or c
  SITE (9347): n equals a,t,g, or c
  SITE (9348): n equals a,t,g, or c
  SITE (9349): n equals a,t,g, or c
  SITE (9350): n equals a,t,g, or c
  SITE (9351): n equals a,t,g, or c
  SITE (9352): n equals a,t,g, or c
  SITE (9353): n equals a,t,g, or c
  SITE (9354): n equals a,t,g, or c
  SITE (9355): n equals a,t,g, or c
  SITE (9356): n equals a,t,g, or c
  SITE (9357): n equals a,t,g, or c
  SITE (9358): n equals a,t,g, or c
  SITE (9359): n equals a,t,g, or c
  SITE (9360): n equals a,t,g, or c
  SITE (9361): n equals a,t,g, or c
  SITE (9362): n equals a,t,g, or c
  SITE (9363): n equals a,t,g, or c
  SITE (9364): n equals a,t,g, or c
  SITE (9365): n equals a,t,g, or c
  SITE (9366): n equals a,t,g, or c
  SITE (9367): n equals a,t,g, or c
  SITE (9368): n equals a,t,g, or c
  SITE (9369): n equals a,t,g, or c
  SITE (9370): n equals a,t,g, or c
  SITE (9371): n equals a,t,g, or c
  SITE (9372): n equals a,t,g, or c
  SITE (9373): n equals a,t,g, or c
  SITE (9374): n equals a,t,g, or c
  SITE (9375): n equals a,t,g, or c
  SITE (9376): n equals a,t,g, or c
  SITE (9377): n equals a,t,g, or c
  SITE (9378): n equals a,t,g, or c
  SITE (9379): n equals a,t,g, or c
  SITE (9380): n equals a,t,g, or c
  SITE (9381): n equals a,t,g, or c
  SITE (9382): n equals a,t,g, or c
  SITE (9383): n equals a,t,g, or c
  SITE (9384): n equals a,t,g, or c
  SITE (9385): n equals a,t,g, or c
  SITE (9386): n equals a,t,g, or c
  SITE (9387): n equals a,t,g, or c
  SITE (9388): n equals a,t,g, or c
  SITE (9389): n equals a,t,g, or c
  SITE (9390): n equals a,t,g, or c
  SITE (9391): n equals a,t,g, or c
  SITE (9392): n equals a,t,g, or c
  SITE (9393): n equals a,t,g, or c
  SITE (9394): n equals a,t,g, or c
  SITE (9395): n equals a,t,g, or c
  SITE (9396): n equals a,t,g, or c
  SITE (9397): n equals a,t,g, or c
  SITE (9398): n equals a,t,g, or c
  SITE (9399): n equals a,t,g, or c
  SITE (9400): n equals a,t,g, or c
  SITE (9401): n equals a,t,g, or c
  SITE (9402): n equals a,t,g, or c
  SITE (9403): n equals a,t,g, or c
  SITE (9404): n equals a,t,g, or c
  SITE (9405): n equals a,t,g, or c
  SITE (9406): n equals a,t,g, or c
  SITE (9407): n equals a,t,g, or c
  SITE (9408): n equals a,t,g, or c
  SITE (9409): n equals a,t,g, or c
  SITE (9410): n equals a,t,g, or c
  SITE (9411): n equals a,t,g, or c
  SITE (9412): n equals a,t,g, or c
  SITE (9413): n equals a,t,g, or c
  SITE (9414): n equals a,t,g, or c
  SITE (9415): n equals a,t,g, or c
  SITE (9416): n equals a,t,g, or c

SEQ ID NO: 12697 - DNA, 793 bp, Homo sapiens
cctgtatgtagctccagctacttggaaggctaagatgggaggatggcttgagcccaagagcagagcccgcaatgagtggagatcgtgccactgcattccaggctgggcaacagaatgagactctgtctcaaaaaaataaaaaaaaagaaaagataaacagtaaaatggaatcagaggaggaggtaatgccaagagttccactattcattgaaaactaagggagtatgttgtggaaagagaatgacagcagaagctatgttttctttcttaatttttatctgtcttttgattcttttttcaaaatgagtctagatggtctaagcagaggagatcagaagcatcaaaatggggctggtttggggcagtgggtgtttttctcagtgactgttaatctccagaagcatggcagttctagggccagaggctacgtggcttatcctagagggagtaccttcaggtatacaattatgtcttagttgagggttttaaaaaaattgttgtcaccaggtgcagtggctcatgcttgtaatcccagcactttggtaggccgaggtgggtggatcacaaggtcaggagtttgagaccgtcctggctaacacggggaaaccctgtctctactaaaaatacaaaaaaattaggctctggtggcgcgcgcctatagtcccagctactcaggaggctgaggcaggagaatcgcttgaacccaggaggtggaggttgcagtgagcccaaatcgcgccactgcactccagcctgggcgacagagcgagactctgtcaaaaaaaaaaaaaaa

SEQ ID NO: 12698 - DNA, 794 bp, Homo sapiens
cctgtatgtagctccagctacttggaaggctaagatgggaggatggcttgagcccaagaggcagagcccgcaatgagtggagatcgtgccactgcattccaggctgggcaacagaatgagactctgtctcaaaaaaataaaaaaaaagaaaagataaacagtaaaatggaatcagaggaggaggtaatgccaagagttccactattcattgaaaactaagggagtatgttgtggaaagagaatgacagcagaagctatgttttctttcttaatttttatctgtcttttgattcttttttcaaaatgagtctagatggtctaagcagaggagatcagaagcatcaaaatggggctggtttggggcagtgggtgtttttctcagtgactgttaatctccagaagcatggcagttctagggccagaggctacgtggcttatcctagagggagtaccttcaggtatacaattatgtcttagttgagggttttaaaaaaattgttgtcaccaggtgcagtggctcatgcttgtaatcccagcactttggtaggccgaggtgggtggatcacaaggtcaggagtttgagaccgtcctggctaacacggggaaaccctgtctctactaaaaatacaaaaaaattaggctctggtggcgcgcgcctatagtcccagctactcaggaggctgaggcaggagaatcgcttgaacccaggaggtggaggttgcagtgagcccaaatcgcgcctttgcactccagcctgggcgacagagcgagactctgtcaaaaaaaaaaaaaaa
